United States Patent Application Publication US 2004/0123343 A1 - sequence listing, part 35

SEQ ID NO: 96033 - DNA, 442 bp, Oryza sativa
  unsure (1)..(442): unsure at all n locations
  Clone ID: PAT_MRT4530_94168C.1
aaaaaaaaaaaaaaaaaaaagggcnaacaaaaaaaaaagaaccaagaaaacaaaaaaaaagcaaaaaaaaaaaaaaaaaaaaaaaaaggggggaccgaaaataagaggggccaagctcacaaacacacaaaatgcaacaccagaaaaatccaatagtgacacctaaaaaaaagtcacgggaagacaaataacaacgccgggactggaaaaaccaagaggggaaaaaacttaagggccttcaaaaaaaaccccttttggcaaactgacgtaataccaaagaggcccgaacagaaaacccttccaaacagttgcccacccaaaaagggaaaaggaaaccaccctgaaggggagcatcaagcgcgggggcattaaaggctacgcgcagggggaccataacaattgtaagcccccaagatccaaaacctttagatcccttactttt

SEQ ID NO: 96034 - DNA, 344 bp, Oryza sativa
  Clone ID: PAT_MRT4530_94169C.1
atggtacatctgcgcgtgtacggacgttctctgtatacgctaaggaaattcatcacgaagttcaccagtggaagagttcctacccgtataggactaggttgtcattgtatcgtgcagggtccgatatctccgagtcctacttgaagaccacctgacctgtgatataaaagggacccccgtgaggacctaaggcatagaatctcatagccaagacaataactacagcctacgaagccagagtctacaagagccaagtcgccgggtgatctagtcgaaccaactcgactacgatctcgtcgatcattcaacatactacaaaatctactactcgttttgtaaaattt

SEQ ID NO: 96035 - DNA, 459 bp, Oryza sativa
  Clone ID: PAT_MRT4530_9416C.1
gatcttacataatacttaaaagcatttccattatcattgaacaatagttatatggaacttaaggcacccaaaccactggtcaaaatctgcaattaaaaatgcactctgtcgattaaatgggcataattcaccaaaccggtttgagcttccaggattattgtgcatttgtatgttgatagtccttcacagaactacagaacagaagagacccagcgagaatcaggctcgcgagtacaacatcataaatccactggaggtcttgatgctagagtccatcgcccatggcgtgctggtcgtggcgtggccgcacttctccgaccagttcctgaacgagcggctcgtcgtcgacgtgctcggcgtcggcgtgacgacgcccgtgctgctgctcggcgacgaggccatggcggtcacctgtcacccggggtgacgtcccgcgggcggtgatggcgctgatggacg

SEQ ID NO: 96036 - DNA, 324 bp, Oryza sativa
  Clone ID: PAT_MRT4530_94170C.1
atggccgtgcgtggctgcgtcgctcgtcttcgtttcccaccgccccacgaggccatgacactcctatttcttctttcaaccagctacgcctttgtgcatggtgcgcggaggcgtaatagcatcgacaccgagccgttgtcgaggggtcaatcggtgccgacggcagcggcgatccagtttgcagcttttaggctgggtgagtgcgagggaaggcgagggccagtcgtccacagcgggttcaggcggggcaatggtgaggcagagcgcagtgggcggctatgccgaggggaagcgcggttaccggttaaggaaaggcggagctag

SEQ ID NO: 96037 - DNA, 498 bp, Oryza sativa
  Clone ID: PAT_MRT4530_94171C.1
cagtaaggccgccgccggccgcacggggggtccattcgagggcagtggcctgtagcgccggccgcatatgtcagctctccgcttatgccatggagccatcaagtcgccgtgcgctcggaagcttgctgctgctgctgcgccctgcgctcggaggggaatcccggcaccccaccaaaagaagcaagcgaccttctgcttgatgcgagcttctccttccttccgcacaaattctaggcagtggcctgggccccgtgtgccccggaccggcgagagtcctgacctgtcaggcgtcaatttcgcccgcctgtgttgtgcaggccggtcgtttgtcagcttcgtgcctcgccagctcttgggactttggacaggcctgccgctgctgatccgcggttctctcgccgctctttcctgtgccaccgcagctgcgaccgccgtcggggtaacggcttcccggtctctccgtctgcctccctttcttgttgccattgcgttttctga

SEQ ID NO: 96038 - DNA, 1051 bp, Oryza sativa
  Clone ID: PAT_MRT4530_94172C.1
tttcgattgagatgatgacttgctggggttctgaaatttccaaagtttgaaataaaattgtaatcaccaagtacaagttctcaaagaaacttctctctctaggaaacgaaggttggatgggtcggacgatcgaacggttaatcatgtcacttctatacctgtaaaattttattttgatcccatccatgtctctctcgtcagttgattgtctaatttctataaaaatgacaaatttatcctttggatgaacataggagattgggtaaatttcaggggtatgaaagggattgagtgtgttttgaagggtatataggggaatcatcattgcatgggcttgatgagtttttagctgaggtaccaaatttcagtcactgatcgaaaaattaaggatatcattgaatccaaattaccgatgacacatgtgtgattggaatctcccggttggaccaacgtctcccggttttggaccaacaagtggtatcagagccaaacacacaatctctactacttgtaaacactcagagtggtgtaagcccaaagcccagtgaaccacgggtgtgaggcccgtatgtgcccctgcgccttgattgggggcgcccaacccaatggctggtgggcccccgtcaccctgcgccatataaagagaggtggaggacgggacggctcaagacacgaggtaagtcaccaccaccactccaccccacaaaccctaaaccgatctcgagggggcgcagccagtgacgggaagtccaccaccgcgccacgcctcatcgtcaacaccatcgttgccgcaaccgcgtcactgcctgcgaccgccgctgcatcaccgtcatcggcaccaagcacaccgtcgccgccgtccacgtcgagccacaacgacaacgacgatgtccagcacctcttcctccacgaacacctcaacgcgtcgtccgtcaacgacagcgactgcatccggcgcaagagcatgaaccgcgccgacgcgctccgcaaccggagctacaactccgagggcaacatccaggtcaccatccactcgctccggcgtcgagct

SEQ ID NO: 96039 - DNA, 363 bp, Oryza sativa
  Clone ID: PAT_MRT4530_94173C.1
ctaaaattccccaaactctgtcgccgtcgccatggaccgggatgcgggcgggggcggggaccctggtaccggaggaccagctgaattccctggcgaggccaagataaccctgggacctgatttccttcttttaccagcgggccccttaccagccggtggcaaaaaatctaaaagatatggttttcaacaaaggattcttttccaagaggaccaaagggaatctaaaccttaacttagaagggcacaagccttaaccttccaaaaacctaaggctgccaaagctggaaggaagaattaaggtcggcaaaggggtcttttatcaaaagggaaaagggcaccttaacctggaccaaggaggaccac

SEQ ID NO: 96040 - DNA, 1403 bp, Oryza sativa
  Clone ID: PAT_MRT4530_94174C.1
gtgaaagaattgaattgggatggccgtttctggataaaagggggtaggtgcagctatctaatcataaacccacgtaaaaacatcggcttaaaaacaaaccttttgctcaggccgggtgattcaagctcaaaaacacaagctgtttgttacaagaaggcgcaacgagcaaccgagttgcaaacctgaccctaccccacgaccggcgccaccaggtgcacgggctaacactaaactgcctccctgcacgagtgacggctccatggtgactgatgagcagtatcatgaacaatgtcgcctccagcaaggggggacgtactaccaaccgtctgcgagtcttcggccatcttatcatcttgtcagaagctcgatgtcggctccaacttcagcgatcttcgagtcctttgaagctcttgcggtgttcgcaacactcttaacatcaagatcaagagcaatggacttcacaaggccattcaacatgagagagccgattgcaacaagggcccggtatttcgaatcagcaacttgggtgtcgtcttcagcgatttcaagggcagcagaaagtatctgtgcctgactttgttcatcctttgattcgattgaaagaacagcataattgagtagaagtgtggaatatgccaggtgagcattcttgctaaaagttgtcttacagcttgatactgaatcaataatctccatgccatggattctcaaccattggtgcaagcatggcttgtcaaataagttagtaactgctttaagggttgtaagcacatttggtggctgcacaggtggcgttacaaccttatggaaagtctcggcaagtacatcatttccactttcaatagccttgagaagtagagtggctccatcaggatgcaacacaaacatcctcagaaaatcaataactggaaacatcatttgtgtaggccaagacttcaacattttcagcagcaaggtcatgtcagcatctgcaagcttacttgtatgataaaatgatgtttctttcaatacttttgctatggcagctaatctggacaactcgatctcagacaaagatagttccttctgttccaaattagatgaaagtgttgcattgaattcagagagtttcttaagaattccctcaactgagccgtctcaaatgtcagcattccattctttggtatgtgcttgaaagttggtttaggagcactaactgaaaacaagtttgaacattatgttaggacttgtgaagaagcaaaaaaaggagagtggggaaagggagcaaagccattatcactgaatacaacaaaagtaataaaatagatcagttagatctctattttcatatcagtggacacataccagttgaagacgctgattgcccaggtacatatgcattagctgaacccctcgtgccgatt

SEQ ID NO: 96041 - DNA, 816 bp, Oryza sativa
  Clone ID: PAT_MRT4530_94175C.1
atgggcgcacgcgaggtgcgacgcaagggtttcgggtgcgcgtggcttaggagcggtgcaccggccacgcgggccggcgggaggaggaagaaggggaggccgagatggacggcggacggcggccgtgttcaccggagcaagcgcaacggatttggtcttcgaggagcacaccggagtgacgagggcgtcgagaaggagcgagccaacggctcggattcgcaggagggagttcgacggtggtggaattcaacagcggcggccggcggcgagagaaaggggaaatcaccgaggggcgacgaggactcaattaaaggcgactggagcatctccggtgttcaaggaactcatttccggggtcggatgggcctgagcggcgccgtggaggtccggcgacgagaggcggcctccggggggaaggggaacaggagggaggcactaccgagccgggacggcgcggtgacgagcagccaacggcgcggaagcgagctctccgtcgtcgggccggggaaggggaagaagatgggcgcccagagtcccgcgtcacgcgtccacgcacgcactggctcccccgaggtgggggatgtcggttttgggagggaggaaaccgacctcgtgggcggtcaaggaggggcggtcaaggaggacctggcggcagggcgtgggagaaaggaggaaggagagaggactctgcctccgggagttggacgcacgcggcttggaacggccgagcacgcgtcgcaggggggtgcggagccgagcggcgcaggcgcggcagggcagcatgggctgctgcgtggcgcaggctgccagggctaa

SEQ ID NO: 96042 - DNA, 1299 bp, Oryza sativa
  Clone ID: PAT_MRT4530_94176C.1
atgtcgggttttgaaggcttcacaaacctatttcccaagttttcgacaaacaacggtggaaaaggatttattaatcctttggataagaaaaggaaggagggatgggatttagacttctttgggcggctcgggtacggcccaagggataagcacggcgcggccgagccaatgggccgggcgcgggcgcgaggaggcggcccatggccgggcaaggcgcggcccaagcgggcggggcgcgcgggaggagagagggggatgggtccgggtggaccggatccatcgtgctgggtctcgggacaggcccacgagttagcgactcggcgcatgggggaagggttcatgcggcgcagggcgctagggttttgcggacgcggctcacggcgcggcgcgcgggtggaccaagaggtggagggcccacgcgcagccagttggcgcaccgtggaccgcgcgcgcgagggtgggggagggaggaggcggctgaccggctcggcgcggtcaaagccgaggtggcgccgacgtggtgccttcgtggctgccacgctggctggcggagggaagaagaaggaggccggccgagaggaggaagaagggggcgcggccgaatggacggcggacggcggccgagttcaccggagcaagcgtgacggatttggtcttcggggagcacaccggagtgacgagggcatcgagaaggagcgagccaacggctcggattcgccggaggaagttcgacggcggtggaattcgacagcggctgccggcggcgagagaaaggggaaatcaccgaggggcgacgaggactcaattaaaggcggcgggagcatctccggtgttcaaggaactcatttccggggtcggatgggtctgagcggcgccgtggaggtccggcgacgagaggcggcctccgggggtgggcggcaatggcggtggggccatgccgggtggcggcggtccttggggcggcgtctacgcgcgttcggcagggttaccgagctaccacgcaagctagaggggacgagggtgagcagggaaggggaactggagggaggcactaccgagccgggacggcgcggtgacgagcagccaacggcgcggaagcgagttctccgtcgtcgggccggggaaggggaagaagatgggcgcccagagtcccgcgtcacgcgtccacgcacgcaccggctcccccggtgctcggcgacggacgacggtggcgcgagcagggcggaggcgacattggcgcggtggcggcgagagcgaaaacgagagagattgggagatggggcgcctcgggttttatag

SEQ ID NO: 96043 - DNA, 540 bp, Oryza sativa
  Clone ID: PAT_MRT4530_94177C.1
gcgaagcatgcgaagctctaggggagatggcgcgcgtcgtggcggcggcggcggggggcaagggcggcgccgggaagaagaagggctccgtgaccttcgacatcgactgcgccaagcccgacgacgacacagatcgtggtgatcgcgtagctcgagaagctcctgcaggagcgcatcatggtcgacggaggcatagccgtcaccctcagtgagtacgtcaccgtctcccgcgacaagaccaaggtcaccgtcgcctccgacagtcccttcttcaaggaggacctggagtgcttgaccaacaagtacctgaagaagcacaatgggcgtgactggctactggtgattgcatccaacaagaccggatcgtgtacgagctccgggacttgaacatctccgagaacgaaggcgaggaggaggattagacgcactgcctttatcttgtcttgtgactattgacttctggacactatgctgtagtcactgagagagaagaactttgatgatccatttatcaatggttccctgtgtgcttaaaaccta

SEQ ID NO: 96044 - DNA, 527 bp, Oryza sativa
  Clone ID: PAT_MRT4530_94178C.1
actagtggatccccgggctgcaggctccctcatgattctcctcggatctcgtctcgctctccctcgccactgtgccaagcgccacttggagggtcacggtgtcggtctacgacgagaccttgtacccgttctgctctgtcttagtcgtcaacgaccttgcaaggatcttccgggacggcttctcctccgtacgtcgtcgttgacctccgcctcatcctgttcggcaatggccgcgtctcgtcggacggatcaattacctgccagtgtagccactaggcggagaatctttgtgggcgaggcagtgctcggacactgccggccatcgatgaccccgtcggcggcaagtgtcgaggtggaactgaaggccaagcagagtatcgtggacgcaactatcttctccccgacatagagcagtgcaggcatcttagtgagagtactgcccaaatatgaatgttgagaaactgatgaacgcccttctctccttgttctcgtgatgctctgctcttgcgcattggtggataatacag

SEQ ID NO: 96045 - DNA, 219 bp, Oryza sativa
  Clone ID: PAT_MRT4530_94179C.1
atgtcggaaagcaaggatgtgccaggtggtgcggccggctggccactggcgctggcgcccaaaggggcggacacgctgggccgtgagccgcagcagcagtacacacagcaagtggacaccgacagaggcggcagccctaggggtggtggcgggctaggagtccagaaggcggaggaggattccgacgatggcagcaaccctatgggcgcgaaggcctaa

SEQ ID NO: 96046 - DNA, 294 bp, Oryza sativa
  Clone ID: PAT_MRT4530_9417C.1
atgtccgacgtggtgccgggggctactgtcggagatatgggcccgggggggcagccagggggcctcggggtgccacatcacgcccctcgggcccccgcgctgactcgccctgaggccctcgcccaactgccattcgggtctgaccagtctgtgaccggcctgtcgtcggtcacatctgactggacaggcggccgtgcccccacgtcgcctctgtatccggcggagtggagggctgtcccccgtgtcaggtggggggcggcaccgggtgacactgaagggcggaccgctttttag

SEQ ID NO: 96047 - DNA, 1816 bp, Oryza sativa
  Clone ID: PAT_MRT4530_94180C.1
atcagcacaggttcatctgaatattcagagtctggcagtgcactgaacaagaagtcaaaatcagtttaaagagcaaatacaacaaattgtctcaagtaccggcaaacttctacttacaacaatctcttgaatttttttatttatttactgacataacacttacaggctgtaaaattaactgggaaagagactaacatacagaggagaacaattttacagctcagaatagggctttacccagttggccaaataaaatgaaagaacaacaatggcctctctgcagatccggcattttcagcagttaagcatacaaaatctgactgtttgaaggtgtcagatcaccaaattccctaggaacatccacatcttgccactgaattaagtagcttgagctcctactatcaggatggctgccaggttgcttcttgacatggccaatagctacatggaggcctcggccaacaacaacaatcttattctccaaacaactcaccgaaaatggcttcataattcgttcaggcataggagggccttttacagagtcccatgagtccgtttctggatcgtagactttaaccttcatcctctcatattctgaaatgacgaacaaatgtttgtcgatgacaacacttaaaccggtccacccttcacgcattccaactggcataacctcccagcggtcaatctttggatcataaacctgacctctcggcgaggagaagaaaggccatgcacagccttcagtgacataaagcctaccactgatgacagcagaatccgaggatgccatgttcatgcccatactagcaactggttgccacacacccttaaccggatcaagaacctctgctgaattgagctcaaactggtcagtactataacctccagctacataaacccgtccatcaatgacgccacccgcaaagaaagaccgtgcagcaagcattcgagtcatcacggtccatcggttcttataaacatcatacttaaggaccaagtgcaatgggcaatccatgtccgagaccaacccgccgcaaacaaggagggtgccgtcactggggatagcaacgcaaccgaaacctcgggggcaagcccgatcccgacacggcatggcaggaattgtatgccaggtcaagtagttcaggtccagcaccttccactgtatcttaccagtgcaacggtggaaagccagggtgaacaacaacggtgaccgaaaacccatcaccttcctctgcatgaagaaccgcgccttgtcagctaggaggtgatgccaccggcgacacacaagcctgcatgcctcatgggtctcaacaggtagccggaggagacagttgagagcagcatcatcaggaaggccaggtatgaggggtgtctcccatgaggcttgctccaaatcagaggccggcatcgacgacggcaatgcggaggttgtggcaagccggaatttgggtgtcaatttcatctgtgaatcaccaagcttgtggactggagattggtgggatgagacccggacgcggcgcatactcgtcacagatttagcacaactgaagaggacaccagcaatgccctgaattcctgcagaaagaaaggatctttcctccaaagatctatacaggaagcctttgattccctggtcccttttctgcttgctgctgttctccaacagaagatagtatggaggagaggaaaagctcctccccccccgtcggctccaaggcggtggctcgtgcacggagggaaggagtgtcacagcggtggcttggtgcagaagaaggagagccatgacaacggcttgatgaggaggaaggagctccat

SEQ ID NO: 96048 - DNA, 437 bp, Oryza sativa
  Clone ID: PAT_MRT4530_94181C.1
gcacttatttttgggacggatgaaataatgtgttttttagagaaaagaatcgagcgtcagtatgcttcgctgacaaggggatggcccacgtgtcagtgaatcgaggagtatggtaccacgtgatagatatactgatatacatatatagaggcgtatgagaagagagaagtaaaaaaatacaataaatactggaaacattattgtaaatatacactttgttttattctttttatatttcttgtttggtcatggatttgtttcatttttgtaaaatgtagaacggtgctatgtgatgtgtagtttcccatagtttgtaatgttgaactactggatggttgaagctgttgtattttgtcccactttcacatgaagcctggttaaataataaataaagaaaagggtaacaaacatttttcatgccaaaaaaaaaaaaaaaa

SEQ ID NO: 96049 - DNA, 541 bp, Oryza sativa
  unsure (1)..(541): unsure at all n locations
  Clone ID: PAT_MRT4530_94182C.1
cggacgcntgggtgccacacgcgtccgcccacgcgtccgatctcttgctatcttgcaattgcaaattagttatactcgtagctactgcgcgcgcactaattgactacacaagcaaatatgggttctccttctgccaagtacttgctgtttagccttgcaatcctgctggtcctgagtagccagcagcaagctctgctgccttcggcattcgcccgccagttggttccgatgcccacgaacactgccgccggccacgcagatgtcacggaggaaaagcctagcgtcccgccgtcgagcgtaacaaagatctgccgagttttacgtatctgcaaacgatcatcgtcggccgcaacatcggccaagccgtgatgtgtcaacgacggcaaatgcatgcacgcgggaataaataatggaggcaccgattaggatcaacaatatggttagtccattaaatatgtgtgtaagctcgatcgatatggaataatgagaaacaaataaacaatgagaaacaaaaaaaaaaaaaaaaaaaaaaaaaaaaaaa

SEQ ID NO: 96050 - DNA, 361 bp, Oryza sativa
  Clone ID: PAT_MRT4530_94183C.1
aaggtataccctctatccttggatatacgttgtatactaatacggtatacccgcgcgtatacagatagttcccgtatacattaaggaaatctatcacgtgatagatatggtatctacggatggaaagagttctgctcagacaaagactgggtctttaccatatcgtgagaggtccgatatctccgagtcctacttggagatcaactgacccgcggtataaaagggaccccctgggcaggacctaaggcatcgaatctcaccgccaacacacccaccacagcctacgaagccggagcgcataggagccaagtcgccgggagatctagttggacctactcgactacggtatcgtcggtatcat

SEQ ID NO: 96051 - DNA, 2491 bp, Oryza sativa
  Clone ID: PAT_MRT4530_94184C.1
ggtgggcggagaggccgatgggttcgtggcgtacctgccgcacgacgaggtggtcgcggccgggctcggcgggcccgacgcccaggagtcgcaggccgtcgtcgacctcctcaacgatgccctcgccgcgctcctccgcgctaagccccgcgagttctggcgccaggtggcacagaatacttccctgcatgagttcctggacagttacctacaattcaggcatcggtggtatgacttgcctcatcgtgcacccaaagggacagttgctggcttagttgtcggggagcttgagctttgccgtcgagtctttatggtcctgtaccgcatatcttcaaacaaggatcctggagcattcaggggtgaatcccttagcatgaaggagcatgcagccctcctgcaggagaaaagattgcttgatttacccaagttgttggacatttgtgctatttatgggcatgacaattgcaaattgacaagttcactggttgaaaacgctatcaatgtccagccaaatattctggatggcattaatattgtccttccccaattcctgggcattttccacacaatgcaggagaggtgcatgaaatcattacaggtgttggattttgtaaacgatgcaattgtcactctggatgcctttgtcgatgcttatcaacctgctgctttattattttgtacctcttttgagacgagctatggagttgaggaactactgaacactcttccaagattgtatgactcattgttgccatctttgcttcatgggtttcaagttatgtccagttcccaaagcaatggagagactgcatctgacattatactgagtgacatagttcttggtataaggatgctgtcaaggagaactgtcagtttcggatggagattattggagttctgctatttgaacaatcaacttgtggagcgtgatgttgaagcttgtacaaagatgtttccagctaaagtcgaagatcctatgatcaggggtgacatcataattcaaacactcaaggatatcaatagagaagccacattttcacaagatcatcctggaaagacattcctccaagctcttgaaaaggagttcaagttgatgaaccggattggagatattcgaaagaaaggatggatacacatggatgatgagcagttccagttcattgcacgcttgtgtggatctactctgacatcttggaatagtgtgcctgatttgcctgtctcttcctatggtggtgaactacaacataagaatgaggatactgccatcactgagtccaagattactcaaataagggacctctttcctgattatgggaagggtttcctcgctgcatgcctggaagcctacaaccagaacccagaggaagttatccaaaggattttagatggaaccctccatcaagatcttctagctctggatacttcattagaagagatgccgcagctaaagcctgcagccactgttgggaaagataagggcaaaggaatacttgtggagactgagcctcaaattatgaacaaaccccataaggttaatactgagatgcatcgctatgttgaacattcttcatcttcttcagttccatcagcatcccagggaccatcctcatctgtaccatcagtcccgcaaggtagatttacaaggaagaccaatgacgacgtgcctgactctgcaactctagactcacagaaagcaaaagatgctgttagatcagctgtgcttgaatcccagtatgaatatgatgatgagtatgatgactcgttcgatgatcttggcttcagtgtggtagaatcaagttatgaggaaactgatggtgccaatgatgccgagagttcctcacagggcccacggtggagctcacaaaagaagacacagttttatgttaaggacgggaagaactacagctacaaggttgctggttcagttgctgtatctagtgcccgagaagcggctgtcctgcgcaatgttcagaaagataccattcatggtcttggccgtggtggaaatgtacctcttggagttcccaacaggcaacaacacagagacatggaggaagaggagggtagcaatgcaaacaacttcggcagaggaggctccaacataggcagaggaggctcatatccccgtggcgatcatggcagaagaggtggaagggatcacggcgacccaccgccggagggcgagaacccaaacgggccaccaggatttggccgtggtggaagaagagggggcagaaatcacggcaaccagccagaggcaaacgagaacccgaatggccaacgtggatttggccgtggcgcaacaagaggaggcaggaaccatgaccatccagcggaggaccatgaagatccagatgcagcacagggcttcgctcgaggagggcctgcacctcgtggaggcagaggtggaaggagaggtggtggccgggataaccatcaccggagagaccgtgcgatgaagaagcatatgcaaggattgacagggctttag

SEQ ID NO: 96052 - DNA, 1479 bp, Oryza sativa
  Clone ID: PAT_MRT4530_94185C.1
ccgcacgacgaggtggtcgcggccgggctcggcgggcccgacgcccaggagtcgcaggccgtcgtcgacctcctcaacgatgccctcgccgcgctcctccgcgataagccccgcgagttctggcgccaggtggcacagaatacttccctgcatgagttcctggacagttacctacaattcaggcatcggtggtatgacttgcctcatcgtgcacccaaagggacagttgctggcttagttgtcggggagcttgagctttgccgtcgagtctttatggtcctgtaccgcatatcttcaaacaaggatcctggagcattcaggggtgaatcccttagcatgaaggagcatgcagccctcctgcaggagaaaagattgcttgatttacccaagttgttggacatttgtgctatttatgggcatgacaattgcaaattgacaagttcactggtgttggattttgtaaacgatgcaattgtcactctggatgcctttgtcgatgcttatcaacctgctgctttattattttgtacctcttttgagacgagctatggagttgaggaactactgaacactcttccaagattgtatgactcatttgtgccatctttgcttcatgggtttcaagttatgtccagttcccaaagcaatggagagactgcatctgacattatactgagtgacatagttcttggtataaggatgctgtcaaggagaactagaagccacattttcacaagatcatcctggaagacattcctccaagctcttgaaaaggagttcaagttgatgaaccggattggagatattcgcaagaaaggatggatacacatggatgatgagcagttccagttcattgcacgcttgtgtggatctactctgacatcttggaatagtgtgcctgatttgcctgtctcttcctatggtggtgaactacaacataagaatgaggatactgccatcactgagtccaagattactcaaataagggacctctttcctgattatgggaagggtttcctcgctgcatgcctggaagcctacaaccagaacccagaggaagttatccaaaggattttagatggaaccctccatcaagatcttctagctctggatacttcattagaagagatgccgcagctaaagcctgcagccactgttgggaaagataagggcaaaggaatacttgtggagactgagcctcaaattatgaacaaaccccataaggttaatactgagatgcatcgctatgttgaacattcttcatcttcttcagttccatcagcatcccagggaccatcctcatctgtaccatcagtcccgcaaggtagatttacaaggaagaccaatgacgacgtgcctgactctgcaactctagactcacagaaagcaaaagatgctgttagatcagctgtgcttgaatcccagtatgaatatgatgatgagtatgatgactcgttcgatgatcttggcttcagtgtg

SEQ ID NO: 96053 - DNA, 433 bp, Oryza sativa
  Clone ID: PAT_MRT4530_94186C.1
cgtcttgtagccgacgcctgctctagctagtctctgcccgacaccctacttacgctgtgactatatagtactgttcatgtccaccacccagtaaattaaattagcccgaagtaaaaattagtatccaaaatccagtcgctgatttagttgtatggaaagtagctcccaggcttgagggtcttcaacccagtcgccacaccatgggggattattgagaccttgtttgttgtggtttgaacccattggataccacggaataccacggtgtggaattgtgggagaggttccaaattctgggtggaaaaccctctgatttcttttatgtcggtcccagaagattttcgggaccacactgtaatttgcccagtttcccctgcgtgaatgatatatctcccaaatattattcccttcataaaaaaaaaaaaaaaaaaaa

SEQ ID NO: 96054 - DNA, 344 bp, Oryza sativa
  Clone ID: PAT_MRT4530_94187C.1
gacaaaaataagcccggtttatagtccatgcctatttccctttgccttgatcctacactggactggctaaacctgcacggaaacacattacaccatcactggtgacatcacgactcttgacttacgtgaaactacagcgtcgtccaacaagagacgagataggttatactattgttactcgcagctgactagcctatacgagtgcgccagcagacgaatttgtacgacccttacatacataggccaagacgaaacctatctaaagcccacagatactcttcaacattggcgaccttaccgagcgctggaagactgaaccatagcttgtaatcaaagcaccacag

SEQ ID NO: 96055 - DNA, 1352 bp, Oryza sativa
  Clone ID: PAT_MRT4530_94188C.1
agaatccatgatttgaaacaaacacatttattttcatgacttcgtgcagcaacgtgagctcggcgtccaagaagtcgtcgttgtcatcgccggcgaccgggcacggcggcgcgaaggcgagggccgggcgcggggcggcgaccgatccgcaaagcctcggtgcctcggtgccggtgcgttcgtggcgtacctgccgcacgacgaggtggtcgcggccgggctcggcgggcccgacgcccaggagtcgcaggccgtcgtcgacctcctcaacgatgccctcgccgcgctcctccgcgctaagccccgcgagttctggcgccaggtggcacagaatacttccctgcatgagttcctggacagttacctacaattcaggcatcggtggtatgacttgcctcatcgtgcacccaaagggacagttgctggcttagttgtcggggagcttgagctttgccgtcgagtctttatggtcctgtaccgcatatcttcaaacaaggatcctggagcattcaggggtgaatcccttagcatgaaggagcatgcaggtgagaccctcctgcaggagaaaagattgcttgatttacccaagttgttggacatttgtgctatttatgggcatgacaattgcaaattgacaagttcactggttgaaaacgctatcaatgtccagccaaatattctggatggcattaatattgtccttccccaattcctgggcattttccacacaatgcaggagaggtgcatgaaatcattacaggttattttgtctgctgtcctttcatctgatttttctatattgttgtaaatccaacttccttcaggtgttggattttgtaaacgatgcaattgtcactctggatgcctttgtcgatgcttatcaacctgctgctttattattttgtacctcttttgagacgagctgcgctgctgcgcatccaccgcactctcttccaagattgtatgactcattgttgccatctttgcttcatgggtttcaagttatgtccagttcccaaagcaatggagagactgcatctgacattatactgagtgacatagttcttggtataaggatgctgtcaaggagaactgtcagtttcggatggagattattggagttctgctatttgaacaatcaacttgtggagcgtgatgttgaagcttgtacaaagatgtttccagctaaagtcgaagatcctatgatcaggggtgacatcataattcaaacactcaaggatatcaatagagaagccacattttcacaagatcatcctggaaagacattcctccaagctcttgaaaaggagttcaagttgatgaaccggattggagatattcgaaagaaaggt

SEQ ID NO: 96056 - DNA, 1750 bp, Oryza sativa
  Clone ID: PAT_MRT4530_94189C.1
tctccccccgatccgccgccgcctctcccgattcgccgccgccgttgacccgccacctatggcctcagggccgccgtcgtcgccctccagcaaggcgttctcccgcaaatcccacgcccacgcctccggccccaactcctccaaggcggcggcggcgggcggtggcggcgggggtgtcgcggcggccttcgatgctcacaacgggacgcacgtccgcaccgtcaccttctcgctgtcgtcctcgccggccgcccgcagggagctccgccgccggctcaccgccgagctcgcgcaggtgcgcgccacttgcaagcgcctcagctccctcccggcccccgcgccttcctccgcgctctccgccaccgacccttccaccccgctgcccccgcacccgccggtctccaagcacaagtcgaagaaggggaacccctcctccaacccgggcctctccgcggaggcgcggcggaagctctacgcgcccgtgttcaagagctgcggcgcgctgctcgctaggctgatgaagcacaagcacagctgggtgttcaacacgcccgtcgacgccagcgcgcttggcctccacgactaccacaccatcatcaccaagcccatggacctcggcactgtcaaatcgcggctggccgctgggcactacaagtcgccgcgggagttcgccggtgacgtgcgccttacctttcagaatgccatgaggtacaaccccaaagggcaggatgtgcacttcatggcggagcagctgttgaacatgtttgaggagaagtggccagaaattgaggccgaggtagcacagctgtcaccacagccgccaacgccatcatcggctgcacccaggaagccgaaggagatagataattctaaggtgttagagaggtcggactcaacagtacatgctgcggggatggaggccactccaaagcagaacactggtcggcccccagttttaaagaagcccaaggcaagggagcctaataagagggagatgaccttctgggagaagcagcggcttagtaataatctccaggagttgccaccagagaaacttgacaatgttgtgcagattataaagaagagaaacttgtcactcagccagcatgatgatgagattgaggttgatatagatagctttgatgttgagacattatgggagctcgataggtttgttacaaactacaaaaaaagtataagcaagaacaagcggaaggctgagaatcccgtggcagggcaggatgagatgaatcatgatatagagctagagaagacagagcatgcaaggttggatgaagtagagcaggatcagatgcctccagtacaagagacgttacataatcctgagccagaatcaattgatatcgaaccacctaaagaaaacacagcagatgataatgagaggtatgtaggctcatcatcacctgttcatttggaagatcagaagggggagaatgcgggtagatcaagtagttctggaagttctagtagcgattcaggctcttcgtctagtggtaaatgctctcatcctttgcagaaatttatattagcagcatttctgtttgcaattaactctataaaggatattttcatatacatctgcataacatatgaaatttaccgtgagaagcatatgcagatacagacacagatagttcatcagcagatggctctgatgctgcacagtcacccagaacgtaacatctataggccaggggatggctttggtacggtttatttggttttttaa

SEQ ID NO: 96057 - DNA, 236 bp, Oryza sativa
  unsure (1)..(236): unsure at all n locations
  Clone ID: PAT_MRT4530_9418C.1
gcgacgcgttctgcttgctgttctcatgtaccgatacagtgatcgatatggcgttccatctgtcaatgcagctcagcacaaggagcagtgcagtcatctctgctgcatgcgtttctgatgccttcaaagacacatgcacagcaacatgtacacgantattgctatgattgtggatatgatcgggtatgtactccggttatgatgatgctaatggacatgcgaagtgacatgcttng

SEQ ID NO: 96058 - DNA, 384 bp, Oryza sativa
  Clone ID: PAT_MRT4530_94190C.1
aatgatgccaggccaacaccggtaccaacaggggctttttgagagagagcttcgtcttttgccacacgaacaacaacaagcccacgtacgacaccgcatggggctgtgccacggtgtgccgggctatgatgagttacatcactgcaggagcgtatcccaccacgaggaaggacccctccgcaggctccggatgccagagcagcctagccgcagggagggagggcaccaaggcagacacgaggagccgatgcgggacggacacccagggctggaccgaccgtcacgagctaccagacagatggagcccaagggagacaagaagatcaaggccatggataccaagaagcacgcggacgtgaacgagcacccatacaccaccaaagt

SEQ ID NO: 96059 - DNA, 536 bp, Oryza sativa
  Clone ID: PAT_MRT4530_94191C.1
gaagcgccccccaaaggggcacacttttttttttaaaaaaaagggggtttgggtcccatccccaggccccccaaacgggggggggggggtttcccaaaccccccttggtcagtttaaaacaggggaataaaaggggatttttcggggggggggaaagggcctttttttttttgggaccgaggggccggggaaattaacagggggtggcacaaaaacgggggctttccttaggggtgccccctaggggatcggcctttttttaacccccccgaaaaattttccccccgggaaaaggtgggggacaaaagaaggggaaaaaaaaaaactttttaaggggggggggttccctcctttcctaggggacaaggcttcaccaaaaaaaagcgcgggactttggcttcccccattttttagtttttcaaagaggaaaagccgggatcaaaaaattttcaggaggaaccaaccacccgggggctttatgctaagccggcccttttaacttccaaaggcttttggcggacagaaaaacccccccg

SEQ ID NO: 96060 - DNA, 440 bp, Oryza sativa
  unsure (1)..(440): unsure at all n locations
  Clone ID: PAT_MRT4530_94192C.1
gcaggnctntggccagcctgacagcaagctggtgagtttgccggacgaccgggcagacatggaaatcagcttcaagccactccaagtcaagcttgtcagagaatcctggtaaatcttcagtgttggatagtgtggtggggatggatttcttactaagtgattcaggcatctattatcttaaaaaaaaattataggtatcctcagccattcatcataggtggtgcaacctgcagcaagagatttatagattttttattatcaatccagtagctgattcctatgttggtcaaccgatgaatttgaggcttgcgtgctagtggcagagtaggttcttgtcactgtcaagatgacaggcnatgcgaagaaaggcctgatgagaagaggagcatgccagctacattgccttggttacatgtatgaattggaanctccgaaagggt

SEQ ID NO: 96061 - DNA, 372 bp, Oryza sativa
  Clone ID: PAT_MRT4530_94193C.1
atggcgtcgatccgcgcggccggcgcgtcgatccgcgaccgccgtctcgactcggcggcgccgccgctcgatccgctgctgcccccgtcgatcccggccaccgccgcctcgatccgccgccgctactcgaggagccgaggagaacacctcgctgttgccgaagcaacgccgccggccaccgccttgaccgtcgccacggacggcatcaccaacgcccctccccgcgggttgtcgtcggcctcctcccccacccctccccgtggagccgttgccggcgcacccggcggcaggtgggagggagggcgttggagcagtagcgacggtgaggtcatcaggcacgggagccgggaggtggtggctcgaggggggtag

SEQ ID NO: 96062 - DNA, 201 bp, Oryza sativa
  Clone ID: PAT_MRT4530_94194C.1
atggagttcggtcacttgacgattgctgtacatgaggagaaggaggaggaggaggctgatcaaagagagctgcttactcttaagaacctgatcaacatcatcatcaatgtcttcttcatccagagcttgctcaatagatggatccaggacaggcagatcatcgggaatagatctgtcatgtacattgaggccgattggtga

SEQ ID NO: 96063 - DNA, 549 bp, Oryza sativa
  Clone ID: PAT_MRT4530_94195C.1
atggtcccggcgatccagccgcaacagtggagagaaaggagtgaagggaggcagcgcaagggatgtgaggtaccgccgatccggccgggttcgcgcgacgacgacaacctggagcggtggttgcgcggtggaggagtgacgggggaggggggatggggcaccggcggcctgggtcgcgatggatgccggaggtggcgcgggcgcttgtacgacgggggcgagggggcgacaaatccggaggttggggcggcgtcgatggatggaggcgtcgagggcggtgacagcgggatagggctgctgttcgaggcggcggttggacgaacacggtggtggcagggcaagtggggagcggtggcggcggtgaaggaagggggtgcgggaggaatgatgcgtgagggccagggggaggagcgcgatattgcgggcgcgggcggaggggggcgtcgcgagtttggatgccgaggaagggggcgcagcgatgggggcggatcggaggagtcgcgcgatggttgttttgggttgcgagggcgccggatgccacttgaatga

SEQ ID NO: 96064 - DNA, 824 bp, Oryza sativa
  Clone ID: PAT_MRT4530_94196C.1
ccggccgggatgcaaccaaaggatgccaacctttacagagatgtgctagtgaccagtttggcagaatttccaggtctggttttggcggctctattggttgacagaattggtcggaaagtgtcactggggatcatgcttttgttgtcctgtgctttccttgcaccacttgctgtacatttgggacaaggttcagtaactactcttctattctgtgcccggacttgcatcatgggaggctttgctgttctatacgtgtatacccctgagatctatcctgcatcatctcgcaacacgggggtaggaatcacatcttcctttggccggattggcagtatagtttcacctgtggtgactgttagtttgtcagagaactgccgccagaaagaagcagtgtttttcatggacctgatgctctttctagcagcagtggcatgcgccctcatccctctagagaccaagggccggcaaatccagtgaggcagtgatgctttcttcagtttgatgtacagaatcacattacattttggtcaattggagactagggcattctttcttatccagcacatatttacacctgccaaaattcactgacattttggattcaacaaagatgtgttcacctttcatgtgcaattgcagtgttgcaacaactgaaatgcaccagctagctctcaattccatacaagggtgaagactgaaaaaggtagcagcaacaactgtattaaattttgaaactcatgaaagggttggattaaattttggattaaagtggcatgcttttcaaaaaaaaaaaaaaaaaaaaaaaaaaaaaaaaaaaaaaaaaa

SEQ ID NO: 96065 - DNA, 874 bp, Oryza sativa
  unsure (1)..(874): unsure at all n locations
  Clone ID: PAT_MRT4530_94197C.1
ggctgcgtatcaaaggcttgcggcggcgagggcaccgaggcggaggcggaggccagcggcaaccacaccaggggagagagggatggcgaggcggttgtggagttcgtacgcggaccgggagattcaacaggtggtagaagacngtgctctgggacatggtggagccgtaccgcccgccgcgctcgttcgcgccactcatcggcacctacgtcgccgccttctacaccggtccggtcgcctccgccatcaccgagcagctttacaaggagaagtactgggaagatcatccgggcgaggccgtgccgctcatgccgcccaaattctactgggggccatggagggtgatgaacggagaagttccacgctttatgcagacaccagaagaggcgaaaccggcataaaatcttcaatgatcactgaatcttttaaatgttgcgtgtctgtaaggacacgatatgtagtgtttgttgcgtgaataaacagtttgcccccatcgatctcaaggcaagtagagttagatacgatctatattatacggtataaacggtttatttccccttatccccttataatgagaaattggaagtgttcatgagtcataaaaaaaaaaaaaaaaaaaaaaaaaaaaaaaaaaaaaaaaaaaaaaaaaaaaaaaaaaaaaaaaaaaaaaaaaaaaaaaaaaaaaaaaaaaaaaaaaaaaaaaaaaaaggggggggccgttttaaaggacccaagtttacttccgcgggcttgcaaggtaatagtttttttttagggcccccaaaattaaattcacgggccggggtttaacaacggggggacgggaaaaacccgggggtacccaaattaaatcgcttggaagcaaatccccttt

SEQ ID NO: 96066 - DNA, 222 bp, Oryza sativa
  Clone ID: PAT_MRT4530_94198C.1
atgggggctcatagtccttggagcgggtgccgcaatgtgagaatgactgaaaagccgggccgtgacgagtctcatgtgttaggtctaggcccatgtgttgggcaagtcacagagtgcgggattaaaggcgtacatccactgcactgtcgatatgatgaaagaggatataaaacagaatgcgagggtaaacctgacctagcgaggcttggggaaggtggatga

SEQ ID NO: 96067 - DNA, 354 bp, Oryza sativa
  Clone ID: PAT_MRT4530_94199C.1
atggcgaggcggttgtggaggtggtacgcggaccggcaattcaacaggtgggagaagacggtgctctgggacatggtggagccgtaccgcccgccgcgctcgttcgcgccactcatcggcacctacgtcgccgccttctacaccggcgtcgtcgcctccgccatcaccgagcagctttacaagttgcttttgcctgattgtgaccgcattttggagcaggagaagtactgggaagatcatccgggcgaggccgtgccgctcatgccgcccaaattctactgggggccatggagggtgatgaacggagaagttccacgctttatgcagacaccagaagaggcgaaaccggcataa

SEQ ID NO: 96068 - DNA, 811 bp, Oryza sativa
  Clone ID: PAT_MRT4530_9419C.1
tttttttttttttttttttagtcaaccactcatgttcttactccttaatagttgctttcattatcagttggaattttctttgtcaaaaggggaaaaaggacttgtaaataactagctcgtgcaagtgcaactcatttttgaacatgttggcatgaataattgtttgtgcttgcttggtatgacttgggaccttggtattcagaaaagaaatacaaagaagatacacaaaattacaatttgatgaaacgaaacagaagcatgtttgcaagacctaggagatctcattctgcattcctgttcactttgaggtagggcagtgcgcccgtcacgttgttgtagtcgctcttgttaacttggatcatcttggatagcctcttcctgcgcttggtgttcttcttgctgagaaggtgctgcttcccggcgcgccgccgcacgatcttccccctccccgtcacccggaaccgcttcgccgacgccttgtgggtcttcatcttgtaccccttccccgccgcgacgacggcggaggcggacgacggcctgcgacggagcggcgacgccgccgccgccgacgcgggggagaccgcgacggccgccagcggcgcgccgaagaacgacttggcggggaacgcgagggcgccggggtggagcttcctgggggcgcccccctgctgctgcagcagaggcgggagcgcgacgcgcgcgagggagagggacatggccatggctcgagggcactttgctcacgcttcggcttgcggtggattggacgcgtgggcgcgtgccgcgagcggatggagaggatagcgtcgcc

SEQ ID NO: 96069 - DNA, 3728 bp, Oryza sativa
  unsure (1)..(3728): unsure at all n locations
  Clone ID: PAT_MRT4530_941C.1
aattgtaagcctcccaaaacaagtccacatcacgcggcctcattctgtcatcgacaattatgtatgtacagtactgatanccgctattgcattccagtgtccatctcccatcaatccatctccgaagcatcaaccccgatctcttcgccagtcctctctgaccctgcaactacaacatctgcattgtcttgcacgatcttctctgacactgctgcatcagcaacctcctctgcattgtcttgtgcactagccttgtctgaccctgctgcatcagcagcaatctcagtcctaagatcatccctctgaacaagtatgggatgagccatctccttgtcatggtcaactgcaactgcatctgaattctcaataggcataccatcagtccctgcaaaacgcgactcgagtgcctccaggcggcgcctcatgtcgccaagctcctgctccatcaaaaagagcctctccttcaaggtgaggttctcctcctcgaggcgagccacatgggcttcctggtcatactcatagtcatcctcctcctcgaagaagacaccgtcacccctggcagggtagaccatctcaaacctgctgagatcgtggtcgaggcggcgctccacctcgacatgctcctcgacgtcactgccgctggagttggcatcatcgtcgtcatcggaggggttggcggggtgaggggaggtgcggaggcggatgaggcccttcatggagccatagccatcgacgccccactgcgcctgagccatgtcggagaggccctcgcgggagggggagaggcgtggggtggggagaacggcgggggtaacaggggagggggagacgagggaggcgatgccaccggcgcgcttggcacggatgatgaaggaggtggtgttgcgtggggcggcggccttgggccgggggaagaagtgcttgcggggcccaccgcctccgcctccgcctccgctttggttcttgaaccagcggcgagccttggcgcggttctgcacctggaggtcgccgagggcggggggctggtagccaccggcggcggtgctagggttcttacgcttccagccgcggttgggcggagggaggaacggcggtggctgggcggaagggtcgtcggcggcggcccacatggggaagcttcggcccatcatctgattaggatccatggaggcggctctgctgaaggcctggttgaagagcattctggtctggaactcggatacaaacgggaaccaagcgaggaacgcgatcggggtgaagagcaggagccccatgatgatctcatatcccctcgcaagcgccttgatcgatccccacaacccgatgcgcacaattactggcttgatagcttgcgcaaccaacagcagaccccagccagttggcatgaaggcaagaatgcaaacaaagatgtcctggactgtcatatgagggattgctatcaagattataatgatggagataaatgttataaatatcaaccccttaatcaaccggaacacaagttggaagtccgcgctgaatttccgcctcccaactgacacggtcttcatcacaagcagaattacaaagatgacaacccatgacaggcaatagaccaggacactctttgtgtgtttggttatgttcaagtgataaacaagaccatattggtagataaagaagcgcaatgcaagcactatttcgagaacaattccacgcttcccagaatattttataggctcctgctctttctcccaccatgactcccaacttttctccggtggtacaccaataccaccacggttgctgatccacttattccaatcagtccaatcatccacaatcttctgccactcgaacccagaaggattaaataggaatggtgcaaagagccaggttacaaccataaaccacatcgaaaatgtaatgaagatgtacgcgatagctcctcgatatgattgcccaaagatttcatacacaattagcaaaatcagcaactcaatacccttgacaaaatggctgcgtgagtatagtcgatagttctccgcaaatttggcatggaacaccacaaatccacgcccagtagctctatactcggctcctccatggagcagcgttgttccatagtagtgagttttggtcccgagagagaatgtaaagaaaacagatgctaactgcagctgcatcagtacaaagtcgctcaatgcggttctaaatcctctctccagaccaatttccatcatcataggcaacgccatcaaaaacccaagctgcacaaaagactgtgaagcaagagcaacctggagaggttcattgtgtataaacctttttccagtagccaaggcttcatcaagaccactgaggacaagatagagacgtccatagaggaatacatacactgtccacactgtcatctgatcaagtttctgaccaggatcgtcaggcttggttacagctgccttcaccaacgctgagtagtaaaccttttctatcttcttgttcctgtctttgcttggctcttcaacttcatcaatataggcaacccgaagtgatggataagttgtcatcagtctaagaatatcttgtgcacggtgatcaccagaacgtttctggataccgtattgttggcatgatacaacgtatgtaaacttcatgtcagctatagctttgcattgagtcagtaatggtgattcatcatttaagaggtcagctgctctgaagccttccctaagatcttcatctctagccatatcaagaaaagcctgaagcaccaaagcttgtctgtagtacatcatccctctgacagttctcgtcaaagtttggcccctgtatgatgcccaaaggcgaagctcatcttccaactgctctgtctcacggagttcctcttcagtattgcaatccaccctttgaaggaaatgtttccattcatttggcatgtccatgaaaagagaattagcaaagaatgatatccgccttctagcatccaggtttgtaggaacatccatagcagattccttcactgtgagcagaaggtgaagtctttttatcttttcagtccatgcatgtgattcctttacaggaaaatcaatagctttagtgaataactggtcttgctgatcaagtggtgtaatcccttcatatcttctattatttccaccatgtactgattcaagtagtccactgagttgctcgtccattatatcccttgtaaccacttcaagcatatcctggaacaaaatgatgacctgaccctggtcctccttgttattcttttgcagcaattcaagcagctcaataaacttcttgctcagggtaggaaggttactcatgttgagctcctttattaaagtatcttgtgctatatggtcgtcaaccactgtaaaaatcttctgtatgacgtctctctcttttgcaccaaccaccaaagtatatatgatgttcttgaatgaagcatagcattccttgatagcataagtaaaatatgggtctgatttcaccctcttcttaagatcacgatcttttccttcactgtctgcagccatatccaacgctatcgggatcttgctagcaagcaagaatggtggccactggattatatccatgtcacgatctttgcagtatggcacaagtaacagatccttctctctgttgtctatcagatcttcctcacgaaagcttgtgataattagattccaaatctgagcaaatcttgctgctattttttcctcttctttgctatcctctggtgt

SEQ ID NO: 96070 - DNA, 837 bp, Oryza sativa
  Clone ID: PAT_MRT4530_94200C.1
atgggcagcagccacgccggcggcgagatgtgcatggaaggcggcggcggcggcagggcgaggcgcgcgggggggaagaaggcggcggcggcggcggcggcggagcagcagcacaaggtcgccaagcagccgcagcgcgggctcggcgtcgcgcagctggagaagatccgcctccacaaccagatggtggccgccctccgctccgccgccggcggcgacgcgccgtactctccgccgccgccgcagccacagccgttcgcctcgccgcccttccacttgccgccgttgcagcaggattgctacgaggcggcggatcaccggaggatcgccgccggcggcggcgtgcagccgtactacgagggcatgctgccgtacggctccggccggctggcggcggcgtcgccggcgttcgtggcgtatgaagtgaagggtgatcatcaccacggccagtatggctcgtcggagcagcagaggcagccgcagtactactcctggatgagctccagctacgacggctactccggcggccggagcagcgccgggagctcgtcggaggagctggatttggagctgagattgtaccgtgacgggccgaggcagcgggcggcgccgagcggaggcggcagccggcgccgcacggaggccggcggccgcgacgagccgaggcggcgggaggcgctgggcggaggccggcacctggcttgctgcggcggcgagcggaggccggcggtcgccgtgacgccgtgctcgtcctcatgctcgtgctcctcccgtgcctctgcctgttgttgtgtggggatgggaggaggttggctatgtgagcccaccattggctag

SEQ ID NO: 96071 - DNA, 744 bp, Oryza sativa
  Clone ID: PAT_MRT4530_94201C.1
atgcaggtcaaccggcaccagactcagacgggggtaaaaaaatcacaacaggccacggccccggtagggacggctggcaacggaaaggagcagcagcaggccacggagtcaaagccgccgagcaagaacagcaggtcgtatgaggagcaacgtcaagacatagagcggcatttgaatgcaatacgagaggaggtgttggcgagatcgttcatcaaaacccatcaaggagttactcgcaagcctggacctcttcccaaagtcgtttttgataagatcgggtctcccatggccggtctgaccgcagcactgaccaccggtcagaccgggctatctatagccggccaggccgatgccctggaacctcttccagcttttaatcccacgactaatattacacctatgcctaagaccgaaattgttagtaatcctctccctattgctcctattgactttgacaacaagaaaaatcggtccggtggatcaaaagtgaaaaatgtgaaaaaggtgtgggtgagaaaggaagccaaaactctggaggtcattactatcaaggaagagtttcaagatgttcaagtacctcttggagatgcgacgaaaattatacatgtggacaagactaaagccgatgtcgttactgtcaacatcggcggtcttaccaaggcatctggccggtctaaccgccagcctacggccggtctgactgagccatcagaccgaggaagctacaacgtcttcgagccatag

SEQ ID NO: 96072 - DNA, 156 bp, Oryza sativa
  Clone ID: PAT_MRT4530_94202C.1
attgcacaaacataatcttgttttacatcacatgagcgaacacagccccaccgggtgcatcatatgcaccaactaaagccatctacttctagctaaccacaccgaactctctggccacacatgcatacaaccacacttgactactgatatgataca

SEQ ID NO: 96073 - DNA, 1647 bp, Oryza sativa
  Clone ID: PAT_MRT4530_94203C.1
atggagcacatgttgaaacttaaagagcaaggcctgcaaggggagcaaatcactcggcactttatcaacagccagctggcacctattaaagagagatcccgcacagtcttcgaatttgatggcaaaactgaccccaatcgtgaagatccaaaatctcttgagttcaagattatgaaggagaagatgtacaaaatcttctctaacgctattgtggtctgctattcacacctgctgccagtggtgccatataacactttcaaccctcctccatcgtcgggctctcagaaaaggaaattaattctttgtgacgacgaaggtgacaatgttgggaaagctggcagcaaagaggtgaccggaaaacagccaaggcaggctaacccgaaaaagaaaacatccagtcgtccaataccaaaaatcaggaagtcatccaggaagccatttgacatcgattcctctggaaaagaccctgaaccgactgacaaggagactgatcctacgaccaccacagaaaccgggctgactgttgaaaatcgcccgactggtagtcaaccggcgaccgacaatgtagaggccggaaatgaacccccgactggaaaccagtcggccgaagctgaagccggtgctaatcaggagcccccgactggaaacgagtcgggtactgaacaaaataaggacatcccggaaacagaggctcgggcaagcagccctcccccaaaaaataccaacaccgacccggagtccaattcatctgataaggtgcaagggcctgctcgtcctcaaccgaagattataacagtgttcaaaggcccaatgatcggcgacgaagaagatgttcttcggattcagtcagctgaagattctcgcccacccatcttagttaaatggtgggatgatgaaatgcagcctcaagggatcataataaataagcagaaagaagatgaggaagtgtccttgcttgcaaagacgctcaatcaggccactcatctcgtaaatagaattcatcttaggaatgaagcgaaaactacaaccctcgagaaactggttccacatctcgaaaccctggaagcgactagagcccaactccatgaaactagggagcttgctaggaaaaccgaacaagatctcagggaccaaatcaccgagctccaagattccaatttcgagctgagtggttcatccaaagtggaatatattacagtacaagctgccaagatcaccgagctagaaaagcaaatcaaagctctggaaaaagacaagggtgaactaaccaaaaagagggactcggctctaaaagatgtcgaagatcgcaaaattaaatctcaggctcaattcgaagtcctggtcaacaagattaagaagcttgaaggagctagggatgaagttgccaacgccgccacaccactcatccaagccatgttttttaataacaatggtccgagttcgttcgacgctgttgaaatcttcgacaagctgagagctgctccagatacatactttaagaacatcaaagaagctggatgcatgggagcgagcatggcattggcaatgaccaagtccctgtacccgaagattgatattgacgctgtcgacggctttgcaaatgggaccagtgaagaagatgcccttgacctcatcaataatgcatag

SEQ ID NO: 96074 - DNA, 697 bp, Oryza sativa
  unsure (1)..(697): unsure at all n locations
  Clone ID: PAT_MRT4530_94204C.1
acgtcagctcggaattcggctcgagcacaaaccatcaacatagatacgtnataccacctctgatgtcttcatannannagaacactctctctctgggtctctgaatttcactcaagttattaccaacaaaataaaatagcgaagatgtgtgaaagtggtagtagagtcacatgggaaggttgcagcgtcttgctcgatatcaacgatggtgaccgtctcgttttcgctcgtctctccccctctgcgaaattgaagattgggaataagaactgctctctgcaaccgttaatcggtcgtcccttcggtactgcttttcaagtcgatggaccttatctctctcccgcacaagttaatggtaataatgctgaagaattaagagatgttcaagtaagtgtcaagtcgagggacaaagttgaggataattatcctgaagaagagagagatgttcaagcaaatgttgattcgagggacaatcgagagttggttgacaataatacggcacaaagactgactggtgaagatatagaagccatgcgaaggcagggtgcgggagggaatgaaataattgaagctctcattgccaatagcgtgacatttgaaaagaaaacatcattctcacaggagaaatatagactcaagaaacagaagaaatatgcgccaaaagtacttatgaggcgccctggtgctcgaagtatat

SEQ ID NO: 96075 - DNA, 202 bp, Oryza sativa
  Clone ID: PAT_MRT4530_94205C.1
tgagctcgctagctaagctgtcactacctatcacaacaatgcttaacaccctagatgaggtccgagatgcaactggagcaggctcaaccatctgggttgtgtgtacaagatgatggactggtgaagagatcaggcgtggcgatctttttaagaagctcatgctctgtactgctcgtgtggagatgatacacactgagaagac

SEQ ID NO: 96076 - DNA, 969 bp, Oryza sativa
  Clone ID: PAT_MRT4530_94206C.1
tcagttgggcgtgattgaatgcgtgggtcgatcggcgacaacgttggccggagatgcgaggtggtcagtggcagtgagtgatggagtaaaacctgatgattgtgatggctggaggcggcacacggtgggatctcgccaaagctgcttgccaagggatgtcgaggaggtcaacaaccggaacaaaatgacctggtggcttgctgggaggttgggggaggatggcaatgacgcgcgagggatgatgacgatggcgtgccatcgagaatttccctcaccaataaaaacaagaggatggggcatgtaaggttgagcctccgggacttgtagtttggagaggtgatttaggggcttccccatattgagggctctagtagggaccctgctggactgcctgcttctcgtgccggaagccccgttgccgtctgcctcgccgcgccggaagccccacggccgcacaggccatcgccacgccggaagctccacaaccgtcgcctgccattgccgcgcaagtgagatggaagcctgcgactgccgcttcctgacagaactgccgcgcacgctggaatcgacaccatcgcggcggttcccgccctcgccgcgcatgtcggaaccgccaccgtcgccgagcacaccgaagccgttgccggtcgccgcctcaacacaactgagctcagcgaaggaatgggcttgggtccttatccattcactcaagggtacaatagtaaattaaatcctttttctgtttcaatttgtatttttttaacccaaagccatgggtgtcatctaacgggtgtcaagagtgagggcaaacggcgtgttcgttttcaaaaagaggtggcaaaaatgcaaaccctaaaaagtaggggtaaaatagcagttgacattcaaaatgagggcatggatgcaattgccccttaaaaatataagtaaaaacacttcaagcaaagtcaaagtactctgctacttgct

SEQ ID NO: 96077 - DNA, 1494 bp, Oryza sativa
  Clone ID: PAT_MRT4530_94207C.1
atggcaatgcaggtttcgaagaagtcgcgtttggctgcgccgagcgctctgcttctccttcttgtggtggccgctctgctgccgccgccgcgcgcagaagcggggcacgatggcgccggcggcgacgacgaaccgcctccgacgccgtgctcgccggccgaccgcgccgcgctgctcggtttcaaggccggggtcaccgtcgacacgacggggatcctcgcgacgtgggacggcgggaacgactgctgcggcgcgtgggagggcgtgtcgtgcgacgccgccacggggagggtcgtcgcgctgcagctggaggcgccgccgctgccgccgccgcggcggagctacatggagggcgccctgtccgcctcgctcggcgggctcgagttcctggagacgctggtgatccgcgacatggcgcggatcggcggcgccatcccggcgagcctgtcgcggctgtcgcgcctcaagcagctctacctcgagggcagcatgctcgccggcggcgtccccggcagcgtcctcagcggcatggcctccctccagtacctgtcgctcgccggaaaccggttcgaggggaagctgccgccggagctcgggtcactcccggggctggtgcagatcaacctcgccgggaatcggctctccggcgaggtgccgccgagctacaagaatctctccaggttggcgtatctcgacctgagcaacaacctcctctccggtgcaattccggcgttctttgggcagcagctcaagagcctggccatgcttgacctcagcaacaacggcttctccggcgagattccggcgtcgctcaatctgctcgtaggctcgatcccagagtcactgtttggtctgcagaagctgtggaacctgaacctgtcaagaaacgggttgtcaggttcacttcctcccggaatccgccatggattgccgtctctcgtgtccatggacctctctcacaaccatctcgtcggcggcattgatcacttcttcagaagcatatcaccagcaaggaggctgaccaagaatgcaagctcagacatgtcagtgatctttcttcctcggcaactacaacacctggacctgtccaagaacagtatcaccggagccttgccggagttcggcgccggcgcgagcttgaggtggctggacgtgtcgggcaatgccatcggcggccagataccaagctcggtgtggaggctggtcgggctccagaggctggacatctcccggaacaagatcaggggcaccatcccggcatccgtggcgtcgatggcgagcctccggtggctggacatctccggcaacgcgctcgtcgggaggataccggacagcttcgcccggatggcgaggctccggcacgcgagcttccggggcaacaagctgtgcggcaagataccgcaggccaggccgttcaacctgctccccgccgccgcgtacgccggcaacctgtgcctctgcggcaagccgctgccgccgtgcaggcagatttga

SEQ ID NO: 96078 - DNA, 464 bp, Oryza sativa
  Clone ID: PAT_MRT4530_94208C.1
taggggaaggagaagtcccagaagctgctcaagctgttccgggagcaaaggcagcgagatggggcacagcctgtgccgcagcaagctcagcagcagcagcagcagcagcagcagcaggcgggaaagaccggtaacggcaccatggtgtgccgccgcgactcaaaacagctgtgcaagtctaaatcgaggaagctaggaaggactctgagctcactgtggaagaacaggagcttctccctgtaccaatgctagcagatttttgagctgagtttgatcagtggatatgtacatcttttcttgttccatgtttctcttgatctttcttttttttttttttgccttcttctttgttgtttccttgtgtaaagtaaaactatcttcccccccttctcggtcgggtgatgtaggccatttcctctttgtttttctttgccaaaatatgtgcatagctcatctttccctct

SEQ ID NO: 96079 - DNA, 1605 bp, Oryza sativa
  Clone ID: PAT_MRT4530_94209C.1
atggcaatgcaggtttcgaagaagtcgcgtttggctgcgccgagcgctctgcttctccttcttgtggtggccgctctgctgccgccgccgcgcgcagaagcggggcacgatggcgccggcggcgacgacgaaccgcctccgacgccgtgctcgccggccgaccgcgccgcgctgctcggtttcaaggccggggtcaccgtcgacacgacggggatcctcgcgacgtgggacggcggggacgactgctgcggcgcgtgggagggcgtgtcgtgcgacgccgccacggggagggtcgtcgcgctgcagctggaggcgccgccgctgccgccgccgcggcggagctacatggagggcgccctgtccgcctcgctcggcgggctcgagttcctggagacgctggtgatccgcgacatggcgcggatcggcggcgccatcccggcgagcctgtcgcggctgtcgcgcctcaagcagctctacctcgagggcagcatgctcgccggcggcgtccccggcagcgtcctcagcggcatggcctccctccagtacctgtcgctcgccggaaaccggttcgaggggaagctgccgccggagctcgggtcactcccggggctggtgcagatcaacctcgccgggaatcggctctccggcgaggtgccgccgagctacaagaatctctccaggttggcgtatctcgacctgagcaacaacctcctctccggtgcaattccggcgttctttgggcagcagctcaagagcctggccatgcttgacctcagcaacaacggcttctccggcgagattccggcgtcgctgtgcggcctacgcaacctcactgatctctccctgcgccataacaagctcaccggcgtgatcccttctcagatcggcagcatttcttctctgaattctctctccattgacagcaatctgctcgtaggctcgatcccagagtcactgtttggtctgcagaagctgtggaacctgaacctgtcaagaaacgggttgtcaggttcacttcctcccggaatccgccatggattgccgtctctcgtgtccatggacctctctcacaaccatctcgtcggcggcattgatcacttcttcagaagcatatcaccagcaaggaggctgaccaagaatgcaagctcagacatgtcagtgatctttcttcctcggcaactacaacacctggacctgtccaagaacagtatcaccggagccttgccggagttcggcgccggcgcgagcttgaggtggctggacgtgtcgggcaatgccatcggcggccagataccaagctcggtgtggaggctggtcgggctccagaggctggacatctcccggaacaagatcaggggcaccatcccggcatccgtggcgtcgatggcgagcctccggtggctggacatctccggcaacgcgctcgtcgggaggataccggacagcttcgcccggatggcgaggctccggcacgcgagcttccggggcaacaagctgtgcggcaagataccgcaggccaggccgttcaacctgctccccgccgccgcgtacgccggcaacctgtgcctctgcggcaagccgctgccgccgtgcaggcagatttga

SEQ ID NO: 96080 - DNA, 506 bp, Oryza sativa
  Clone ID: PAT_MRT4530_9420C.1
gggggcaaggcaaaaaaaaaaaatcattccccccaaaaaaaaagttacaaggggcccatttaaaaaaaaacggggggggttttttcaacaacataggggtatataacaaaaaaccccccccggggaggaaaaaaattcctattccccgagggggggggggaacaaacacatgcccccccgtaaaaaaaaaaaaaaaaacagggggaaggaagtattgggggtgctaacctaaaaagatttatttgaaagggaaattctgggaggggggggggaaaaaaaaagggccaacataaaaaatggttccagggggggacccaacgggggggctagggggactcgagtcccccctatcccgggggacccccattggtaaaaggggaaatgaaagggggaaaaatagagagaaaatgaaaagttgaggggcctgaacaaggaaaaaagagatcacgagccccccccttaaatctgggtagggaccccccccttaaggatttaggactttgggc

SEQ ID NO: 96081 - DNA, 289 bp, Oryza sativa
  Clone ID: PAT_MRT4530_94210C.1
ggggaaaaaaaatttgggaactaaacaagggcttcttttttacaaaccctggcccaaacacacaatgcctgggcccggaatttacagggctggccctacaaaagggggttagccccccattgggaaatttttttttccttccacacccgggaaggctggattatttgcactggaccaaagtttttaaaaaaaagggaacaccaagggccctacataaatggtgggggggtaccaaaatttggaacccaagcgttcaggatgttatgaaaagccaaagggccctttccct

SEQ ID NO: 96082 - DNA, 462 bp, Oryza sativa
  Clone ID: PAT_MRT4530_94211C.1
aggaacaacgcgtgatctttttatcacaatacacaaaatggctgattggggcgttgcctttgagaaaaaagatttctacaaagcatccctggctgtcgaaacggtgagaataggcccataccgacattcccaaggccgaaaattatttttattataacccccggacccaaaaaattcatcaaaattgtacaggaatcatttcatttgctgcagaatttttttaaaaatgctccgctggaaggaggtcttgcaagacaacggcgtggctaataacttctaaaataccccgacatgggagctggaacataaacactgtatataaaaacgatgaacgttgacctgcgaggggtcttcatgggaaagacatccccattaatgagccgcctcaaaattgtaggagccctatgaataatgccttcatacgactgcatggtatagtaaaggccccacgggtgtgacttt

SEQ ID NO: 96083 - DNA, 907 bp, Oryza sativa
  unsure (1)..(907): unsure at all n locations
  Clone ID: PAT_MRT4530_94212C.1
ccacgcgtccgcatcaattaatatgtcacattcacgaggtttgttacttcttggttgattttatttcttaatactagaaaagagaaaaatttatacttccacctgttgtttgtggtgatgcactactttccaatattgcagtataaaaaacctgatcttatccagtaaaaaaagggggtgcaacgtaatgtaaagtgaatcaaaactgactggaccaccactctgctgctgaccgacaagtatcagctgtggtgctcgtaatattgtctgcagattcttttttttttattcatgtatgtattgctgctgccaagatgcaaggacaacgattttcctccatatcgctaacacccataacaatcttagccattgcctattgattagatttctggctatgattaactttctgttcctttacactgtgcctttattgaatatagttgaccnctaaccaattcctttattgaataatggacactgggggaactaatgaagctgacaagtcatatacccttaatgctgaaggttgtaaaaggatagttccaccctgtgaaccaagcagcaatgacatacaaaggactgaaccaaggaaggacatcctaagtactgaagcaagcaggaaggacttgcaacccccaaacaaatcaatcgcgaatcttgtttcgacgtcaaagccccgattggcaagcaattatgaatgcaggaggcagctttgtgctcttgctgcgatgtctcttaaggtgttgaggcgcacgcttggtaaagacgaaagtatcggcggcatgagagtagctgtgctagaatctgtgttcgtgttcttttgaccttcgtggccgtgttatattaacatgtatgtacttgtcatgaaaataagatatatatatatataccagatgtaatgtatttc

SEQ ID NO: 96084 - DNA, 1921 bp, Oryza sativa
  Clone ID: PAT_MRT4530_94213C.1
ccacgccgtccgcaacagtatcaatctacactgcgcaaccggcaaccaaaccccaagtcaggcttccaattccaactaccaccgcttcaccatggccgctcctctcttcctcctcctcctcctcctcctcgtctcctccgcctccgcgggttacgaggaggaggcgctgctgcggcgcgcggaggaggagcgggactggatggtgggcgtgcggcgccgcatccacgcccatccggagctcgcgttccgggagcaccacaccagcgccctcgtccgcgacgagctggagcggctcggcctcaccgcccgcgcggtcgccggcaccggcgtcgtcgccgacgtcggctccggcctcccccccgtcgtcgccctccgcgccgacatggacgccctccccgtccaggaattagtggagtgggaacacaagagcaaagtggatggtgtgatgcatgcctgcggtcatgatgtgcacaccgcgatgctcctgggagctgcaaagttgcttagtgagcgcaaggagcagatcaagggcacagtgagacttcttttccaacctgccgaggaaggtggtgcgggtgcatcttacatgataaaagatggtgttcttgatggcgttgaagctatattcgggatgcatgttgactatcggatgccaacaggtgtaatagcagctcatgcagggcctacacaagctgctgtatgtttttatgaagcaaaaatagaaggtaaaactggaaaggctgaaactccacacttaaatgtggatcctattgttgctgcatcatttgtcatcctatccctgcaccagcgcatccccgggctgcaggatcctcttcacagccaggtgctctcagttacctatgtcaagggtgggaacactattgatgccacacctccagttattgaattcggaggtactttgaggagcctcactactgaaggtctatatcgtctacagaaaagggtcaaggaggtggtagaagggcaggcagctgtgcacagatgcaagggagttgtccagataaaaagggacgactacccaatgtatccagctgtctttaatgatgagaaactgcatcaccatgtagaaactgtgggcagacgattacttggtccagacaaggtgaagccgggagagaagattatggctggcgaagacttcgctttctaccaacagttagttcctggagttatgtttggcattggtattagaaacggggaagttggttcagttcacactgttcataaccctaagttcttcgttgatgaggatgttatcccaattggagctgcactgcatactgcccttgcagaaatgtaccttactgagcgctccacagaaggtgaagacggaagccagcattcgcattgacattcgtgcgttgaacagttcgagtgtacaagtatccaagagaataatcatgcttcaagaatccagatgatcattttagtagcgtgcaaggcgttcttgtactcaggtatgctcgagtaatgacaagaaatatatacactgtattactcaatgatcactgtacaacatccaacatacaaaaaccgaactggaactgacaatctcaacagaggcatcaatacatacacaaattacgactgaaccaaacctgacggatcacgagatgagagacccattggaagagcaatgcaaaagcgtgcacgaacaggacatgcctacgctacgccgaaggaggtggcgcgaggaatggcaccggcacgttggcggccggaatggcaggcatcggaggcaacgccaccttggggatcccggctggaattgggggcatcgtcaccttcggcacaacgacggcgggcacgggcggcaacgtgaccttcggcaccgccggcatgggtggcaccgtgaccgtggacacggtgaccgccggcacggctggcatcggtggcaagg

SEQ ID NO: 96085 - DNA, 715 bp, Oryza sativa
  Clone ID: PAT_MRT4530_94214C.1
tcgctcctccttatattgctctggatccagccttttactctttatcttcaggacagacctcatcgtcagttcctctgagggaatctattgctaacaagggggcttcccctcctcgaaacgatattgtcaatgaagaggttgatcagcgtcagaacaagcctaggagatactcagagatgaacttcagtcagtgaagcaccatgtaaggtgaatagcatctgaataagctgcttatggctatatttttaagcccttagtgatctcctgttttgatctggagcactttgggtggcttcttgtcctaagttatgttaggttataaacgcctgtttgtgctggtgtcacttcacagcagactcaggggtggcctttgttgcttgaattgtggttttgctcggttgtgatgcgttgagaaatgtcaaattcgttggttgcgtctgaagatgtgggcggttcttgaagagagcttggaataatgatctgcgttggttgataaaagtttgggttttttagtacatctttttagcgactgtactttgtgtcgatctgatatacctatcctcttatagtggtatttgttagcacaagtggctttatagctgcagtttgtatctcttgaacaatgtgtaaacctgggtgcgatttgtgacaagtttacagcttgaatgagtcagttagtccggttccatcttggtagcaaaaaaaaaaaaaaaaa

SEQ ID NO: 96086 - DNA, 346 bp, Oryza sativa
  Clone ID: PAT_MRT4530_94215C.1
agttcctatgatggcatatttataattgcctatatggacaatgctgccagccatctaattcatgctggacacatagatgtgctttacaccatccatgaacttcttatttctggttgtaaaggtctgaccatttcatgccattggtcttacctggaggtgataatagaagtggaaaaatagaagtcatctattagtttgtactgaagcaacactaagcatttagtaattaatgatcctgtttgtagccacaccaccgggtacatgtgacttttctagccgcacacttttgctcttggacatctatgtgttgactggtttgcaaagcttggaggtctttctggtgttc

SEQ ID NO: 96087 - DNA, 2098 bp, Oryza sativa
  Clone ID: PAT_MRT4530_94216C.1
tgctttataagctgccatctccttcctgaaaagtggggctcatttaaagggacggggggcaagcaaatcactccaaaccttgcttctcctcctcctcctcctcctcccccatctccggcgccgcgcgccgccgcccggaggagagcttctcgccggtgctgctactgctactaatccccacacccacctgctctcagctcagctcagctcagcttcccagctcggcgaagaagatgaagacgaggagctcggggaggggaggaggggagccgaggaggaggctgaggaatgcggctgtcatggcgctcatgctctcctccctcgtcgctctctccctcgtccgcgccaggttctcccccatcgctagtgatggaggcgaggccctcaagctcaaggccgacgaatccaagctcgtcgtcaccaccaatcacgccgtcgtcaacaccgaatccggcgactcctcctcctcctcgtcgtcggcggctgcggaggaggaggaggaggtcgccgctccggcgaagcccgccgccgccggcggcggcggggccaggccggtgtgctacgagacgagccgccgctccgacacctgcgaggccgccggcgacgtgcgcgtggtggggggcagccagaccgtctacgccgacacgcttgaccgcgagtggaagacgaagccctactgccgtaagcacgacgcgttcgcgctgtcccacgtcaaggagtggacgctcaggccgctcccctccggcgatggcggtggcggtggcgcggcggtggcgccgaggtgcacgacgaacagcacggccacggcgttcgtgctgtcgaccggcgggttcacggggaacccgttccacgactacaccgacgtgctcatcccggcgttcatcaccgcgcaccggttcggcggcgaggtgcagttcctggtgagcagctacaagtcgtggtggatgaacaagtacatccagatcttccagcagatgagccggcacgacgtggtggacgtcgacgctgacggcgacgaggtgaggtgctaccggagcgcggtggtcgggccggaattccacagggagctcggcgtcgacccgaccaagacgccgtcgggctactcggtgctcgacttccgcaagatgctccgcggcgcgttcgggctggaccgcgccacagcgacgccgagcggcgaccggtgggacatccgccgccgaccccgcctcctgatcatctcccgccgcgccgcccgtggccgcgcgttcatgaacgagcgcgccatggcggacatggcggcgagcctgggcttcgacgtgcgtgtcggggagcccgacgcgtccacggacacctccaagtttgctcgcctcgtcaactcctgcgatgtcatggtgggagtgcacggcgccgggctcaccaacatggtgttcctacccgccggcgccgtgctggtgcaggtggtgccatacggcaagctggagtggctggcccggaacaccttcgctgagccgtcgtccgccatggagatccactacctggagtacgccgtgcagcttgacgagacaacgctgagcgagcagtaccccgccgatcacccagtgctgcgagaccctatggccatccacaagcaaggctgggaagctctcaagaccacttacctcgacaagcagaatgtccggccgcatctcggccgcctcaagaacaccttcctccaggccctcaagctgctgccccatgacaaggaaaccatgaattagcttagctcatcagaactgttgatcgtcatggattgtcatcggcaccgtcatcgccatcgccatgccatcgtcatggtgacttgaatttgtggtataaatagatagataggtagctaattttttttcttttttcaaaattattagtattttgtattgatccctagcaagttgccaagatcaggtataatcagtagcttatctgaaataatccgttgcaacgcacgggtatttggcaatgtctatagaaacaatggtgatattgtttgtatgcaccatatttcttaacatatcaagtaagccaaattatcttatactagcagaaacccatattttcaaggatttcttccaaaaaaaaaaaaaaa

SEQ ID NO: 96088 - DNA, 558 bp, Oryza sativa
  Clone ID: PAT_MRT4530_94217C.1
atggagaagccgacgcggcacggtggtctccggacgaaaccgagggcaggccggggtggaggtcgacgcttcgacgccggaggaggagacaacgacgtcggccggcgctctggcgcggcaaccagagcggctggaggcggcacagtggcggtaacgccactggacgtcaacgaggacaccgttccggcgagcttagggcgaggggacggtgaggccggcagagggggtggcgtcgcagagccgaggaaggtggtggcgacgtcggccggtgcacaggcgaggcggcacaggcggctagaggcggccggcggcacgggagagagaaagaagggcggcggggagaggtggtgtggccacgggggagctcgggaagaggcaaaaacgagagaacggaaggaggaggctccattttatagtggaagggagcgatccggccatgggagaggcggggaacggcggcgggatttggggccgacggccatggaaggtggccgggaatggcgcggctgttccgggcggttgagagcacgaagcaagggggaaattagggggaattga

SEQ ID NO: 96089 - DNA, 220 bp, Oryza sativa
  Clone ID: PAT_MRT4530_94218C.1
gtctttttttccacagtgcatctagtgtcaaactcgggggggactgttattaacccgctggtcccacataccgtgtccctcgtaatgtctatgaaccaacctccggaacctgtatctagacagagagcctccacagtaaatactacgtaacaaaaaagtatctagtacatctagtgctacagtactgagatatcctacacgccttttcttcctgagtgca

SEQ ID NO: 96090 - DNA, 577 bp, Oryza sativa
  Clone ID: PAT_MRT4530_94219C.1
aaaccaaaacccgggaaggggtccacccaaaaagggggggggcccaacacagggggctaattaaaaaaaaaattaacaaacccgacaaagggaacaggggtttaaaaggggggaagccccccgcacacattgggggaaaaaaaagaggcggggcccccccacccttagggggggggggcccgggggaaaaacggggggctggggggaaccgaaacccgggggataaggccccggggaaaaaaaaaatggggggcccaacaagccagggacccggtgaccctgagtctctaaaaaaaaacggggggggggaactgtttgtactggggcccccgggaaagcaacttggcgaagggggccgggacaaacaaccccgagggggacaccttctcctttgggttcccctgggcccacttttttttttttggggggccaccgccggactgggccggtttaaacaagggggggggggccttgtcctttttgggggccatttggggggcggggggggcccgaaaacggggggggggggggggcaaacaaagaaaaaggcggacccgggggccaacccggaaattcc

SEQ ID NO: 96091 - DNA, 1183 bp, Oryza sativa
  Clone ID: PAT_MRT4530_9421C.1
gcacgaggcctacttccaccttagctcaccctctccaccgtcgcagcgacatcgacggcgagctcgagctcgagctctggctggttcttgttggcaagctagctagctagctcagctctcgccatgggcaagtacctcaggagcagctgcaagcagcagcagcagccgtcgtcgccggccgccgtggcgagcgtcgccgccgcggcggtgtcgtcgtactcgtacctgacgctgcggagcgggcggcgcgtgccggcggcggcggcggcggcgggaggcagcgcctgcaggcggcgtcaccgccgcggaggacgccgcgggtgcgccaagaacggcgccgggagcgcgcgcgcgtgcggggcgaggtcgccgacgtcctcggcgtcgtccgggcagcggcggaggtgtgaggcggtggagtgctctcacggcggtgggcgggcggagctctcgcggtcgccgccgctggggaattccgtcgtcgtcgtctccggtgacgtcgtcagtggagaaagaaagtctttgaagccaaattcttgttcccgcgaagtggcggcggaacacgccggcgagcacaagcacaaccctgcagccgccgcggcggccggccgccggccaccgctgtcgccgccggaagcggagatcgaggcgttcttcgccgccgcggagctcgccgagcgccggcgattcgcagagaagtacaattacgacattgccctcgaccgcccgttgcaaggccgctacgagtgggagccaacagtgccaaattttgatgtggccaaggatgtcactgacatgtgacacccatgtctgcaactcacacagtgatgccaagctagcttaatcatcagcagctaattatctgggagaggctggggatcgagttagtgaccttgtttctcctgctaattctcacattgagggaattaattaattactcctcaatcctcatctccaccctgttgtcagttggatctcactaccatatatatctcagctctgtcaattaatcttttgtatagttggtaggaaataatcaaggataatccacggtgatttggaggatgcttctgatgagctcccctcttgctaattactaatatgtatcttccacataatttccgcctaatttactgtttattactacttattaacccccttccaaaaaaaaaaaaaaaaaaaa

SEQ ID NO: 96092 - DNA, 570 bp, Oryza sativa
  Clone ID: PAT_MRT4530_94220C.1
atgaccggtttcaacttgccggaaaacttcaaagaaaatccagaagatttcttccggagtgtcaggccgcgagtcgttgttccgcagaaaactctaccaacagacaaaccagccataccagcgccaccgaccttcaagactatggctgacaagaccttccgcgagttcgttgctccctctgctgaaaatgtggccattgggccgcagatcaacattggagacgtggatttcgacctgaagtccagccttatcacgatggcgcatgctagcccgttctatggcaagcctaacgaggatgccaacactcatctgcagcagttcctggagatctgtagcacgtacaccatcaagggcgtcagtcaagaagccgtcaggctgaggctgtttccattctccctcctcgggagagcgaagcagtggttttacgccaatcgtgctgctgtcaacatctgggacaagtgctctacgacattcctcttgaagttcttcccgataggcaaaaccaatgcccatcgtggacgaatttctagtttccaacagacgagggacgagtctattcctgaagcatag

SEQ ID NO: 96093 - DNA, 152 bp, Oryza sativa
  Clone ID: PAT_MRT4530_94221C.1
gtatctggggctaggcgcgctttgggcagccgggtggtaccttccgtggtcgggggtcgccagcagctcaggagattgctcgatccaagcctgcagcctgcaggtctcatatgcaatgagctagtcaagatgatccatcgctgtcttgctgt

SEQ ID NO: 96094 - DNA, 845 bp, Oryza sativa
  unsure (1)..(845): unsure at all n locations
  Clone ID: PAT_MRT4530_94222C.1
ccacgcgtccggccgtttgtgacggagctcatgctcgccgagtacctctacctacagaacgacgactccgagaagcccatgtacctgtacatcaactccaccggcacaaccaagaatggcgagaaattgggctatgagacagaagcttttgcaatatatgatgctatgaggtatgtcaaagttgcaattttcaccttgtgtgttggcaatgcatggggagaagctgctttactcttggctgctggtgctaaaggtaaccgtgctgcgcttccatcgtcgacgataatgataaagcagccaattggtcgctttcaaggacaggcgacagatgttgacatagcaagaaaagaaatccgaaatgtgaaaatagaaatgattaagctgctgtcaaggcatatcggtaaatcaggagaagagattgctcaggacatcaaacggcccaaatatttcagtccaagtgaagctgtggattatgggatcattgacaaggtgctgtacaatgagaaaagccaagaagacggtggtgtcgtatcggagctcaaaagatcaaatttgatatagtattacgctagatacaatctccctgtaagttggtaataggtcagacacncgacatgctttgtagtgccatggagtagctgccattcattagctggcctggttgtagaacatcgagctggattggcaatgcaaatatgcagtacacgctgatacttttttttttttttgatatgggctttttccaatntggtgcctgataacttgtacggtggcttggtgcagaaacttctattttttgtttagttttctgaatggcgattcaaatggttaaaaaaaaaaaaaaa

SEQ ID NO: 96095 - DNA, 520 bp, Oryza sativa
  Clone ID: PAT_MRT4530_94223C.1
gtttgtggtagttgtatttctgggattgattaataagatcaatactcaatgtcctggcttgtgcgaagacgccaacactaacatttgtgcctccggatttgttcagggtctctgtcctggtgcttctaattttgagtgttgtgaaatgagtactcctaactgcaacggacaatgtcaagataactctctaccttgtggcggtatttatattgctggagattgtcctggtcctaataatgttcaatgttgttcttcttctggtcctactccccctcctccccctccttctggaagttgtgcttcttttgctaattctcaatgggattgtactaccccttcatgtagtactattgtccctgctggtactgcccaacctgactatgaatgtgctgagtttgtatcacgatctcttgcttctgcaggattaattcctcttgatccaatggcagatcaatctgagtttagttctttctcagctaatggaaagacctatgatttactttgggtatcttctaaaaat

SEQ ID NO: 96096 - DNA, 383 bp, Oryza sativa
  Clone ID: PAT_MRT4530_94224C.1
aaaaaaacaaaaacaggtttattcattaattcgtttatttgggataacccaggaggggggcccccttacataataccccagattcaagccccgggcctgggcctgcagttaattaaacaacccctggggtggggtcccaattaaaaccctggaacccaggccgtccggccggagtaaaacccatcacgcccattttttttggggggctccggccatagcacagcccggccgtataataggccgtttaatccggggcttattaatcaaggtccggggggaattaattaacccgggtcggtggcctaacacagggggggggccgtaattaaataaccggttaaataattacccggggaaaaggggggggcacccgccaaaataat

SEQ ID NO: 96097 - DNA, 318 bp, Oryza sativa
  Clone ID: PAT_MRT4530_94225C.1
atgaggaagatgcagagtggaaggagtcgaaaactgcgagtggtgaaggccattgcgttccactggaatcgaagcgaaggctgcgaggctaggggccagcaaccgagagacagcggcggaacccgcatcctgtcgtgcggcgccatgaggacgggcgcggccgcgcaggccacgcggcgcagcgcagatggcaagcggctgactcacggcagcacggcgcacaagcggcggtggcgtggtgcggcgcacagcgtcacctcgtcggcgactcggcgacggcgcgtggggcgaagccgaaggaagggaaatagggagtag

SEQ ID NO: 96098 - DNA, 392 bp, Oryza sativa
  Clone ID: PAT_MRT4530_94226C.1
cggacgcgtgggcggacgcgtgggtgaagcctttggtttcttccattgacatttttgacaagaatattgatgccgtcggctctcggctgttcttttgcaaaaaaaaaaaaaaaaaaaaaaaaaaaaaaaaaaaaaaaaaaaaaaaaaaaaaaaaaaaaaaaaacccaaaaaaaaaaaaaaaaaaaaaaaaaaaaaaaaaaaaaaaaaaaaaaaaaaaaaaaaaaaaaaaaaaaaaaaaaaaaaaaaaaaaaaaaaaaaaaaaaaaggggggccccttttaaagaaccaaattttcccacccgggggtgggaacaataaaatttttttttggggcaccaaaattaaattcaacgggcggggttttaaaaaacggggaatgggaaaaacccggg

SEQ ID NO: 96099 - DNA, 343 bp, Oryza sativa
  Clone ID: PAT_MRT4530_94227C.1
aaaacgggccccccgcacccgggggggaatccccccgggggggggggaaccaccgggggcccccacctatatggggtgggccccccataaaccccggacaaaaaaaaccggggccagggggggcaaaaaccagggggaaaaccggggaaaagggcccaccccaaaatctaccggctttttccaaaaccagtcggggtggaccagccccaggaaaaaaatctttaaagttctttggcccccggcgcctttatcctaaaaagcgggcgcccgggaacccggggccccaggggccagggagaattccccccagaggggggggcaatggatgagatggttgaagggg

SEQ ID NO: 96100 - DNA, 630 bp, Oryza sativa
  Clone ID: PAT_MRT4530_94228C.1
atgctccattcagaaaacgccacggtaggggtgctttcggcaggaagggctgtagggcttgagcacgggctgcctcttcctgagcgcacaagcagcctcctccttcagtcgtgctatttcgccctagcaggtacgaagctcgtcgtgaacaactttaatctacccttcacctacatccgccttcttgagaacctgctgctccttattgagccgatcgacctagtccatagtcttgcattggcaaagtttgagcttgtcaagccaaaaggaacaatgatgatggtgtgtggacccaaggaggccttggggttgatggcggccaaaggagttcacatggcaagataccacatcaccatggctggaatctttttctttgtatgcaccaatgaatctgggtcgacaaccccagtatcagaggacctgttacctattgtcagtttttattatgaccacagaataatctacaagcgcatagataccgttgtagccttcacccaagagtatgccagggagactccggcctacagcactatgatttacccgaacatgaacgattacaaaggacggacatggttgtcaccacctgccgcctacctctacgcgtcgtggtgctcatggtatcagcggtga

SEQ ID NO: 96101 - DNA, 272 bp, Oryza sativa
  Clone ID: PAT_MRT4530_94229C.1
gtgttagaggtggattcaatacagtggggccaggcgtcagcgacggtgggttaaatggggtgtacgctttgccggagtcaatggtggcagctggcagcaacagctcagaggacaccgtacacggctcagattacaccaggaggggtttcttctccggggacagcaacaggaggagagatgacaaaattaagcgggttttcaaagatgactttgaggtattaggagaaatgtcgttgtttgatggtcatcggtttttgcgggtggggcactag

SEQ ID NO: 96102 - DNA, 6384 bp, Oryza sativa
  Clone ID: PAT_MRT4530_9422C.1
atggatacggatgggaagcttgatgtgttgctcaagttggtggaggggaacgagaagaagcgggtggaagcggatgagtgtacgagggcggagtaccaagagctcaagaagacggtggaatccagaattcctgtggttgagaagaaggtggagaggacagttaaggaagaagttcctcaaggcaaggttgctgatccgaaaccgaccacaccatctggtatgcgagatcttcacctgttttcctctgcttctactttcggaaacaattctaggaagtctgatcaaggaggtgaaattcccatggacattagtgctaacggtccacccatggtttgtccacaattcaatggtgataaccctcagatgtggaaatcaaattgtgagcaatattttgaagtttatggcacacatcctatcaattgggtaaaaattgcaaccctgaatttcgtgggcaatgctgcgttctggatgcaatctgttaggtctcaactgcagggaattacttgggtggggttatgtgaattgaggccccaggatttagattctgcttgtgccatagccctgctgcaggaggaagctttagaaggtgttaaggccagtcattacaggaggtcagacccaggggttatgctcaaaacaaatagaactggacctattgtgggagttactcagcatactaagaacaatttgaatcaatctgaagacagaaggggcactgaatctgctagagctaaagatgataaggtggctgctctgagggcttataggaggtccaagggactatgctttgtctgtggagaacgatggggtaaagaacataagtgtgcaactacagttcagcttcatgtagtggaacaactgttggcagtgttacaacctgaaattgacagtgattctgataacattgaattgggaacatcaccagaacaacatggcactttattgaccatatctcaacaagctctgtggggaactgaatcaaatcagtctatcaaggtgaatggttgggtgcagggaatggaactgatcatgcttattgactcaggcagcacacattcgtttgtggatgaacaaattgcacttaagttgatgggagctagaaggttgcaacaacccctaactgttagaattgctgatggaggtgtcatgcagtgcactagggaaattgctgactgtcgttggtggatgcagggacagagtttctgcagtaatttccgactgctacccctgggaaattatgatgccatattgggtatggactggctcacaatgcacagcccaatgaaggtagactgggttcaaaaatggatggaattccaatacctgggaagggatgttcgaattcaaggaattactaatcagccagcacagtgttctcatataacacacaaccagttatctggcatgaacaggaagggttcactgttgtattttatccagttacaaaatatggccatacaggagaatagcactatttctgattcagtcaaacctatgttgttagagtttgctgacctctttgaggaaccaactgaattacctccgagaagagcttgtgatcacagcattaacctcattccaggggctaaacccattaatctgagaccttataggcacaatcctgctctcaaggatgaaatagagaggcagatagctgagatgctcaagtctggggtgattcaacccagccaaagtcctttttcttccccagctatacttgtcaagaaaaaagaccacacttggagattggtaatagattacagaaagttgaatgccattacagtcaaaacaaaatatctagttccagtgatggaggaactactggatgaactatctggttcaaaatggtttaccaagctggacttaagatcaggttatcaccaaattagaatggctgagggagaggaacacaaaacagcctttcaaactcattctgggcactatgaatataaggtgatgtcttttggcttgactggggcacctgcaacatttttgggggctatgaatgacactctaaaatatgtacttagaaaattcgtcctggttttctttgacgatatcctgatctatagtccagattttgagtcacatttgactcatgtcagacaagtcttacaactacttcagcaatatcagtggaagtcacagttatcttatttgggccacatcatcggtgcaaatggggttgcaactgatccacaaaaggttcaggatatactcaattgggagattcctaccaatgttaagaagttgagaggatttctgggattggctggttattacagaaaatttgtacaaggctttggtctgaaaagtaaacctctgaccaatcttttgaggaagggtgttccttttgtttggagtacagaagcagattcagccttccaggctcttaagacatctctggcctcagctcctgtcttggctttaccaaattttcaaaaaacctttgtggtggaaactgatgctagtgactatggaatcggtgcagtactatcacaggagaagcacccaattgcctatataagcaaagccctgggtcccaggaccagaggtctgtccacttatgaaaaggagtgcctagcaatgatcatggcagttgatcactggaggtcttacctgcaacatgttgagtttataatactcactgatcaccacagtctcatgcacctatcagaccaaagactccacaccccctggcaacataaggccttcacaaagttactgggtttacaatacaagatttgttacagaaaggggagtactaatgctgctgcagatgctctttctagaaaaccacagcaatctgaggaagagttcaatgctatttctcagtgtgttcctcaatggctgatggaagttttgcagagctatgatactgatccacatgctactcagttagttgctgccctgacacttaaccctaattctaagcctcatttttcacttcagcatggagtcttgagatataagggaaatatttggataggcaacagtcctgacttgcaacttaaaatcattaatgagatgcatgccagtccagtaggagggcactctggatttccagtgacttacagaagaatcaaacaattatttgcctggaatggaatgaaatcccaaattaaggaaacacttgccaattgtcaaatttgtgctcaagcaaaaccggatagatcaaggtatccaagactattgcagcctttaccagtccctaaaggtgcttggcagactatatcattggatttcattgaagggcttcccaggtccagtcactacaattgcatcttagtagtagtggacaaattttctaaatactcccacttcatacccttgagacatcctttcactgcaattgatgtagcaaaggccttcatgagtaatgtgtacaaactccatggacttccacaaattatcatctctgacagagataaaatttttacaagccaattgtgggagcagttatttctgagatctggcactaaattacattacagttctgcttatcaccctcaatcagatggacaaacagaacgaggaaatcaatgcctggaaatatatttgaaatgctttgtccagtcagcaccttccaaatggccttcttggttgcatttagctgagtactggtataacaactcataccattcaactattgacagaactccatttgaagccctgtatggatatccacctcgccattttgggatcagcatcagggactgtgacaacagtgagttgataacttggatgcaggatagaaaattgatgcaacagttagttcaacaacatctgcatcgtgcacagcaacaaatgaaactttttgctgataagaaaagaagttttcgacagttccaggtgggtgagtgggtctatctcaagttacagccctatgtgcaaagttcagtggcccccagagcgaatcacaagctggctttcaaatattttggaccatttcaaatcctggagaagttgggtactgttgcttacaaacttcagttgccagccacaagttccattcatccagtctttcatgtatcacttttaaaggaagcaaaggggttccagccatcagtgcatacaccattatctccaacttactctgctgtccagtatcctatagcattactggatcatcgtcttaccaaaaaagcacaagctacctgggaggatctgcatgacttgaaggccagatttcctaatgctttggcttggggacaagccaaaactcaaggggaagggattgtcagatcgtcatctgacagtgctgaggaagatactgaagaagaactgagcttggaagcagagcaggacgatgatgagaagatgcaagctgaagctgaagatgcagagcagggaggagttatggaccatcaacccgtgttgcggcgcacttcaaggactgtcaagcccaacccactgtaccatgggccacaattagatcctaacatcttcttcttgtccgtcttctgcgacgatctctactcgccggctctagtcgtcgtggccttgaccttcaaccacaccaacttcggcccggacgagcagacgaacatcaggcttgaaggcgacgcggccttcagcgccgacgtctccttcagcggcgacggtggcgggtgggttgacatcagcgccaacaggctcgacggcaacatcgaccacagccgtggcagggtgtcgtacgcccttccggtggccgccggcgacgaccggttcgtcgccatggagttcgacaccttcaacgacaccatcgtgcacgaccccgacgccacctacgaccacctcggcgtcgacgtcaactccgtcgtgtccaagaggatcttgaccttgccaagcttcaccctcgtcgggaacatgaccgccgtcgtcgagtacgacaacgtctccagcatcctggccatgaggctgcacctcggctatgggcttagtggcccccgtcaccggccggattacaaccttagctacaaggttgacctcaagagcgtgttgccggagcaggtcgccgtcggcttctccgccgcgacgtccacatccgtcgagctgcatcagctacgttcatggtacttcagctcgtcgctggaacccaaggccacaccgccaccagtggcgccgccgtcaccgtcaccaccgcctacctccggttcaggaagtggcggggttgtagcgggagccatcgtcggcgcagcactgttcgtcgtgctcctctttgccatggtagcagtcgtcgtactcgtacgacgacgacatcagaggaagaagatgagggaggcggaggaggcgaacgacgacgacgatgacacggaaggcgatcccatcatggagatcgagaacgggatggggccgaggcggttcgcgtaccatgtgctcgtcaacgcaaccaagagcttcgcggcggaggagaagcttggccagggcggattcggcgcagtgtaccggggctatctaagagagcagggcctcgccgtcgccattaagaggttcatcaaagattcctccaaccaagggaggagggagtacaagtcagagatcaaggtcataagccggctgcgccaccgcaatctggttcagctcatcggctggttccatggccgcaacgagctcctcctcgtctacgagctcgtccccaaccgcagccttgacgtccatctctacggcaatggtaccttcctcacatggccaatgaggatcaacattgttattgggctcggatccgccctgctctacctccatgaggagtgggagcaatgtgttgtgcaccgtgacatcaagccaagcaatgtcatgctggatgaatccttcaatacgaagctaggtgacttcggcctcgcaaggctcattgaccatgctgatggggtacagacaatgacgcacccctctgggacgcccggctatattgaccccgaatgtgtgatcactggtaaagcaagtgccgaatctgatgtctacagttttggggttgttttattagaagtggtatgtgcaaggagaccaatgagtctactggatgatcaaaataatggtctcttccgactagtcgagtgggtctgggatctatacggccagggagccattcacaacgcagctgacaagcggctcaacaatgactatgatgtggttgagatggagcgtgtcattgctgtcgggctctggtgtgcgcatccagaccgatgccagcggccatcaatcagagctgctatgatggtcctccagtccagtggaccaatgccgatgctaccagccaagatgcccgtggcaacatatgcaccgccggtggcctcatcggaggggcagctctcgtcatcgacggctccgcctgcccatcgcctcactcaagaactagggttttgggtcgctggaaaagacatgagaggaaaggatgagggaaattga

SEQ ID NO: 96103 - DNA, 627 bp, Oryza sativa
  Clone ID: PAT_MRT4530_94230C.1
atgtcgtcgtcgccggcgccggtggagtccccgtggctgacgatgcgcgccatgcggcgcgttggcggcgcggacggcggcggcgggcagcggagcgcgctgatggtggcgtcgtacccggtgctgctgctgctcgtcgtcctcgccgcgttcgtcaagtacgtgtggatcgcgctggcgctctacagcgcgctcctgctgctgttctcgtgcgcgtcgcgccgcctggcgctggcggagcggctgccgtcgccgctgggaggaggcggaggaggaggaggagtccccgcggtcaccgcggcggaggagctccagggcgcggcggcgcggggcggggtgtccggggagacgctggcgtccatcccggcgttcgcgtacgacgcgtccgcgcacggcggcggcggcgaggcggcggcgcagtgcgcggtgtgcctggaggcgctgcgcggcggcgagacggcgcgccggctgccgtcgtgcgcgcacacgttccacgtcgcgtgcatcgacatgtggctgggctcgcacgccacctgtcccgtctgccggcgccgcgtcgagcgcaagcacaagggcggcgtgctgccgccgatgccgccggagccggagacggagccgccggtgtag

SEQ ID NO: 96104 - DNA, 249 bp, Oryza sativa
  Clone ID: PAT_MRT4530_94231C.1
atgtctgcacctggagccgccgccgccgcacctggagccgccgccgctgccgccgtccctggagatggcgcgccgggagccggagccgctgcgaacgtcaacgtcaacggaggcagttctgcctcacaatccagcggagggatattctcggggtatatctttctcctactgttaactcattctctgatacctctgttagtcgtgttagtcgcaattctattgcgttcttggggcggatctacccattag

SEQ ID NO: 96105 - DNA, 344 bp, Oryza sativa
  Clone ID: PAT_MRT4530_94232C.1
agaaacaatggtagatcgagcaaacaaataaagaaggaaatgacataagtaagggtagcaactagcaactggtgtgacttttaaaaactattaaattagaaacataaggatgatataaggtttggactttcaaactcttaagacatgtagatagctatttaataaattttaagtaaaatcatataaaaaatatatataattttgtatgggtgctagccttgcctgggccatcaagctagttgcaaattatttaggtataatttcgttcgatgcaacttgggcattgttgtcttgctgatccttgagctttttgaacagcttgcgttgcacgttcttgtttgaat

SEQ ID NO: 96106 - DNA, 1043 bp, Oryza sativa
  Clone ID: PAT_MRT4530_94233C.1
ttgtttttaacagtgccaagtgtcacaatcttgccattcttgaaagaattatgattcacaggctggttctcagacaataatgtggtgcaggaaaaaataattcgcacagcaggttaccgaccacttggagtaccacagaaagatttcaacggttgaagtcaagttaatcgataacatcaaaaatgatttctgaacttgttgcacaaaaaaatgatagttgagaaaacaataaaagttccaagcagggaagtctctagaaattcgaggagcatgaagaaaaccatttagaacacccggatcacttttcccatagtgctcttcaggtacaagcatctcacgttctgccaattcttcttcaaaagagagacaaggaagttcacgctcatttgcacattttggaaaatttgcttctcctccatagcacagttgcctacagcaacacccatgcaaagaacctttttcagttggaacttcactgtagccttagtctcgttaaccttggactcaagtgattcctggtgagtcaccaacgttgggaatttgcctgccttgttaagaccaggtccaagaagtcgaggaatctgcttaatgatggcctcagatgcaaggaaagcgtgatatttctttgcaagcttcttaaccagcttcttgtttttgttcatcttcttgagagcttccacatccatatagtctaggcccattttctctgcctcttcaacatgctgggcatcaccaagcatgcacaccttcatcttagggcgggggatgtgaggcaacttaacagatccactgaaacgcttatccttttgagggtcatagttcttcagtccaatctgcagttcaatggtttccacgaacttgcgctgcttctcgcgggattcactagtaatttgtgagattgcctccctaagagcatcactctgcaacttactcatggcgccggcggtgcgagcacactgttccgcaacgaggaaggtggcggcggcgcggcggcggcggaagcggagggcgaagtggcggcggctgtgcgctagcccggccgg

SEQ ID NO: 96107 - DNA, 1439 bp, Oryza sativa
  Clone ID: PAT_MRT4530_94234C.1
aacagtgccaagtgtcacaatcttgccattcttgaaagaattatgattcacaggctggttctcagacaataatggggggcatttatttttttttttttttgcaggttaccgaccacttggagtaccacagaaagatttcaacggttgaagtcaagttaatcgataacatcaaaaatgatttctgaacttgttgcacaaaaaaatgatagttgagtttggcttatcacgttttgtttttttttttttttgttttgtttttttttgggtcatcacagaatgatctcgatggataaaatgtaatgatgttcaaccaaagagagaggcaacttagtacaggacaattaaatccgaattccttaatcctcagctgttgcacaaaatttgatgactgggaaagtagcaaaagtttcaagtagcttagtctccaaaacatctagaagcctaaagaaaataacttagaacactcggtacacctttcccatggtgctcttcaggtacaagcacctaacgttctgccaattcttcttcaaaagggaaacaaggaagttcacgctcatctgcacattttggaagatctgcttctcctccatagcacagttgccaacagcaacacccatgcagagaaccttcttcagctggaatttcactgtagccttagtctcattaaccttggactcaagtgattcctgatgcgtcaccagagttgggaatttgcctgctttgttaagaccaggaccaagaagtcgaggaatctgcttgatgatagcctcagaagcaaggaaagcatgatatttctttgcaagcttcttaactagcttcttgtttttgttcattttcttgagggcttccacatccatatagtctaggcccattttctctgcctcttcgacgtgctgagcatcaccaagcatgcaaaccttcaacttaggccgagggatgtggggcagcttaacagaaccactgaaacgcttatccttttgagggtcatagttcttcagtccaatctgcagctcaatggtttccacaaatttgcgctgcttctcacgagagtcattagcaatttgagagatcgcttctctcagagcatcactctgcaacttactcatggcgccgccggtggtgcgagcacagatccgcgacgaggtacgagggaggcggcgcggcggaggggaagcggagggcgaagtggcgggaggaaaccctggagctggagtccaaccaaacagtccagatctgttcaaagctggagcggagcgcatggaatcgctctgagaaattgaactggagggttggagcggcattttggtcgctcctgaactccaacggctggaaatagccggtgcatgggcttcccctttcagtgtcgctccccctccttcccatcccggcgcacagcggctgagggcgagcacggcggcgcattcgaccggacgcgtggg

SEQ ID NO: 96108 - DNA, 318 bp, Oryza sativa
  Clone ID: PAT_MRT4530_94235C.1
atgacggcgtggatctggcggcggcggcgcgacctcggcgtctggcggcccgtccccgtgcggatccgccgcctctacctccctctggcgtcaccgtcgacttcctcgccctcccccgcggcgcgacgacggcgtggatccagcggtggcggcgtgacctcggcgtggatccgacggcggcggcgggacctcgcgtggatccggcagcggcggcgcatcccggcgtggatctggcagcggcgcgacgacaacatcgatttgacggcggcggctcgtccccacgcggatccggcgccgacgatgacggacgacggttag

SEQ ID NO: 96109 - DNA, 1063 bp, Oryza sativa
  Clone ID: PAT_MRT4530_94236C.1
atcggtatctctaaaattccattgtgatgtgtgcatccaataattttctttaacaaacaggcaagaaagatatgagcacctaatgttctcactaactcatgctgctaagactaataaagatcaggacaataaaaggtctgcacagcaggattttgggtcatcatataatgatctcgatggataaaatgtaatgatgttcaaccaaagagagaggcaacttagtacaggacaattaaatccgaattccttaatcctcagctgttgcacaaaatttgatgactgggaaagtagcaaaagtttcaagtagcttagtctccaaaacatctagaagcctaaagaaaataacttagaacacccggatcacttttcccatagtgctcttcaggtacaagcatctcacgttctgccaattcttcttcaaaagagagacaaggaagttcacgctcatttgcacattttggaaaatttgcttctcctccatagcacagttgcctacagcaacacccatgcaaagaacctttttcagttggaacttcactgtagccttagtctcgttaaccttggactcaagtgattcctggtgagtcaccaacgttgggaatttgcctcgtttggacacaattatgtagctgcttttcaatatagacctcccataaacaagtaaaatcttgcctgccttgttaagaccaggtccaagaagtcgaggaatctgcttaatgatggcctcagatgcaaggaaagcgtgatatttctttgcaagcttcttaaccagcttcttgtttttgttcatcttcttgagagcttccacatccatatagtctaggcccattttctctgcctcttcaacatgctgggcatcaccaagcatgcacaccttcatcttagggcgggggatgtgaggcaacttaacagatccactgaaacgcttatccttttgagggtcatagttcttcagtccaatctgcagttcaatggtttccacgaacttgcgctgcttctcgcgggattcactagtaatttgtgagattgcctccctaagagcatcactctgcaacttactcat

SEQ ID NO: 96110 - DNA, 1167 bp, Oryza sativa
  Clone ID: PAT_MRT4530_94237C.1
cacgactcaaaacattgaacagtagatcatattaaattcccgttgtacgttacaaaaccgtgatcccccaatagacaaaattgttcggaaggatcttcttctgtatcattactggtaagctacaaaggttacatagtttaaccaaagaattttacaactttcggagcttgttttacttttgccttagtgttggtattcttgtcaccatcgcctgtctctgtggtagattttgaactagattgtttagccttctttgccttggtgtgtcttgtttcttcttcttcaataaaatcgtcatcaaggtcatctccaccccggagaacagcattgtcttccaggtgatgctcctccgtattgaaagcatcatccccagaagatatcaagtcttgcctccctctgtttggacaatgcttggccaggtgtgtaacttcaccacatatcttacagcaacctccctttggataaatgccgtgtttgttttcaggacaattcttgctcaaatgtccctgctgtttgcagacaaaacagcttgcgaactttgtacccccattttcaatgggtttggggcacttggaaagtgagtgcccagattcaccacaattataacagaatttcttcaaattttcatcatttttgtcagggcaattcttcaggctatgacctcgttgcctgcagagcaagcaaatcttgttcttctcccagagggacttctcggggcagaccttggcgacgtggtccgcggccttgcagatgaagcaccgctccccgggccgcatcccggggacccggagcgggtgcttcgacctccccgcgcctcccccacccgccttactcgtcttcttgaacatgctcttcttgttgttcttcttcttcttggtgccgtcggcgggaggggtcgggttggcggggaagaggcccgggttcgcctcgcggaagcgcttccgcgcttcccgctgccgcttgttcgccatcgccttgggctacggacgctctctcgccgtcgcgcgtggtgctgtcctcgagcttggtatctcactctctctctctctctctctgggcggcggcgcgcggcggcgggggacgggagtcgggaggggagcaagggaacagccgagcaaggagggcttcgttttgggaggcgctgacgctttgagattccccggccgg

SEQ ID NO: 96111 - DNA, 1681 bp, Oryza sativa
  Clone ID: PAT_MRT4530_94238C.1
tcaccgatcggtggcaatggcggttttttttgtcatgaccgtgggaacacgccggagcatcttgcccctggcgaggcagtcggcgagcttcttggcaccgtcgacctccgcggcgaggagggcctgcaggaagccgcacgcgccggcggccaccatctgcttccggcaccgccgggacggcgagacggcgagcagcacggacaccgggaaccgcgcgtcgacgccaccgggggcggtgcttcggtcgagctgctggccagcattcacgatgccctccacctccttcttgaacaacttcctgtagccactcgccgcgacgagcgcggcgagcgccctcgccgcggcgtccctctcggcggcgggcttggcctcgagcatccagatgaggcgcgggatggcgtcgccgacgtccctgcgcgtcttgccgtggctggtgacgttgcagagctcggcgagcgccatggcgctcagctatcgtgtggcggccttgtcgctgcccaccacgccgaggccgtggtggacgagacgggccgggacggctatctcggcgatgtagcggaaggatgccatgttgcggaggaggccgaagcgccggggcgaggcccggctcgtcgccgacgcaggactcgaggaagtccttgacgcagccgagcgcgccgtcctggaacgcctcgaccttgaggcgctggcactcgtcgccgtcgccggaggtgaggttctggaggcagcccagggcgagctcctgcgcgcgcggggtgccgagggagacgagctggatgagcgacgggagcgcgccctcctcgcggaacgtcgggaggaggtccgggaacgcggcgaggttgcggagcacgcccgcggccgaggcctgcgccgggggggtgcccgcggcgcacgcgccgaggagcgccgacaccccgccgcgcgccgccacggccgccgcggcgtcccgcgagtccgcggtgagagggcgcagcgccacgcacgcctgttcggcgccggcgccgccggactccagcgcgcggcagaggtggggcaccacggcccccgcctcctgcgccaggagccggcacgtggcgtccgaggacgcgaacgcggcgagcacggacacggccttctcgcgcgacgccggcaggatctcccccgagtcgagcatcgcggccacggcggacaccgccaccgccgccgccgacggcggcagcgacccgacggagtcaacgagcgcgtccagcgccgccgcgcgggaagccgcggacccgaggcggagtcgcgggatcagcccatccacccccgccgccaccccctcacccccaccattccccggcgacacgagcagccgcgcgtcggcggcgagctgggacagctcggcagccgacgacgacagcagcgacacggtgtggaggtgcccgaggctgctcgcggcgtcgttcccggcgacggacacgagcgcggagagcgcggaggcgaggggcgccaggaggcgcggcgcggagggcgggaacgcggggtgggacagcgacgccgagagcgcggcgagcgacgccgagatggatggccagtggcggcggaaggccggggaggccgccgcggcggccgggagcgcgtcaagcagccggaggcactccgccttctgcaggacgtcgtccccggctggctcgccggactccggcggcggcggcggcat

SEQ ID NO: 96112 - DNA, 377 bp, Oryza sativa
  unsure (1)..(377): unsure at all n locations
  Clone ID: PAT_MRT4530_94239C.1
ncacacatcaccaaaaagggggccaggttccaagcttgtttgcacaaaaccactatctacctncttcatcagcttcacaagttctgttcttgcacaactccatttgctccaatcctgtntcttctcttcttcctggtcaaatttttcctagttcccctttgatatcctcctgcattttggaagttcttggttgccattttcagtttgtgttcttgatcctcctgagtggaattagttccaagatctcccctgggtgaaatcaagaaagggggaaatctgtccagaatccagcaataccaagttcaagatcagagatatattccttgcaagaaacttcaaatcagnctggtgagagcaagaaattactcctcatcaga

SEQ ID NO: 96113 - DNA, 1291 bp, Oryza sativa
  Clone ID: PAT_MRT4530_9423C.1
atgaggctgcacctcggctatgggcttagtggcccccgtcaccggccggattacaaccttagctacaaggttgacctcaagagcgtgttgccggagcaggtcgccgtcggcttctccgccgcgacgtccacatccgtcgagctgcatcagctacgttcatggtacttcagctcgtcgctggaacccaaggccacaccgccaccagtggcgccgccgtcaccgtcaccaccgcctacctccggttcaggaagtggcggggttgtagcgggagccatcgtcggcgcagcactgttcgtcgtgctcctcttggccatggtagcagtcgtcgtactcgtacgacgacgacatcagaggaagaagatgagggaggcggaggaggcgaacgacgacgacgatgacacggaaggcgatcccatcatggagatcgagaacgggatggggccgaggcggttcgcgtaccatgtgctcgtcaacgcaaccaagagcttcgcggcggaggagaagcttggccagggcggattcggcgcagtgtaccggggctatctaagagagcagggcctcgacgtcgccataaagaggttcatcaaagattcctccaaccaagggaggagggagtacaagtcagagatcaaggtcataagccggctgcgccaccgcaatctggttcagctcatcggctggttccatggccgcaacgagctcctcctcgtctacgagctcgtccccaaccgcagccttgacgtccatctctacggcaatggtaccttcctcacatggccaatgaggatcaacattgttattgggctcggatccgccctgctctacctccatgaggagtgggagcaatgtgttgtgcaccgtgacatcaagccaagcaatgtcatgctggatgaatccttcaatacgaagctaggtgacttcggcctcgcaaggctcattgaccatgctgatggggtacagacaatgacgcacccctctgggacgcccggctatattgaccccgaatgtgtgatcactgtcgagtgggtctgggatctatacggccagggagccattcacaacgcagctgacaagcggctcaacaatgactatgatgtggttgagatggagcgtgtcattgctgtcgggctctggtgtgcgcatccagaccgatgccagcggccatcaatcagagctgctatgatggtcctccagtccagtggaccaatgccgatgctaccagccaagatgcccgtggcaacatatgcaccgccggtggcctcatcggaggggcagctctcgtcatcgacgg

SEQ ID NO: 96114 - DNA, 612 bp, Oryza sativa
  Clone ID: PAT_MRT4530_94240C.1
atgtggaaggagctggactacttcaaggagtacgcggcgaggcttcaaagcttccggggggacgacgacgcggcggcggcggcgacgctgtcggaggcgctctacatcgtcagcatgggcaccaaagacttcctcgagaactactacgccatggcgcgcgcccaagcggcggagtactccacggcggtggcgtacggcgactacctcctcggcatcggcgcatcgccgagtcgtcggtggccgccggcggcgtacggggtggagaacgtaggcaacaacaccgtgcccacgcgggtcaaccggcggcggctcacctgtgccatctgcttcgacatgttcgcccccgcgaccgttcctgaggagggcgcgggggcggaaggcggtgctggagaacggccaccggaggccgaggcaagggggaagcggcggcggcggcgggaacatgcggaggcggcggaggcaggcacggcaggcgacaaggagagggcagcggcagccggcgtgatagaattgacacgtaagcgccacgtcaaatgccacgtaggtgccacgtcagccaaaaccaccatcaaactgccgagggacctcatctgcaccggttttaatagttga

SEQ ID NO: 96115 - DNA, 771 bp, Oryza sativa
  Clone ID: PAT_MRT4530_94241C.1
atgtggaaggagctggactacttcaaggagtacgcggcgaggcttcaaagcttccgggaggacgaagacgcggcggcggcgacgttgtcggaggcgctctacgtcgtcagcatgggcaccaacgacttcctcgagaactactacgccatggcgcacgcccaagcggcggagtactccacggcggtggcgtacggcgactacctcctcggcatcggcgcatcgccgagtcgtactcattcgtccgcgagctgcacgcactcggacatgatcgcgaggctcaacgacgagctcggcgacgacgagatgatcgtgtacggcgacgtgtacaggccggtggccgccggcggcgatgagatcgacggggtgctcccacagtcccactacaactgcatcgcttcggtgcccggacccctcctgctcggtcgccggtggaggcgagcgcggcgacctttcctgaggagggcgcgggggcggaaggcggtgctggagaacagccaccggaggccgaggcaagggggaagcggcggcggcggcgggaacatgcggaggcggcggaggcaggcacggcaggcgacgaggagagggcagcggcagccggcggtaggcccatgggggcgggagtggaggaggccgcgcctcgacgctgtccgcatctccgccgtgatagaattgccacgtaagcgccacatcaaatgccatgtaggtgccacgtcagccaaaaccaccatcaaaccgtcgagggacctcatctgcaccgattttaatagttga

SEQ ID NO: 96116 - DNA, 923 bp, Oryza sativa
  Clone ID: PAT_MRT4530_94242C.1
ctgcaggaattcggcacgaggatacacaagaatgcccttcccgccttgcccgtaacatccgctggtaattacgaaattaccctcccgcctccgggattcccatggacgccagcctccgcacactgcctccggcgagcttccccggcgaggtccgctccgccgtctcctccctcctcctctctcccggcggcagcgccctcgacaccgtgttctcccacctcccgccgcccgtcaccatcccgcctctcggctccagcgtctactaccgccagagcgagctcctgcgccacttcgccgcgtcgcaggcggcgcaggcgcagagcgccaccgccgccgccagctcttcgtcggccgccgcggcgggtctcgacgatggcgcgccgcggaagctgtaccgcggcgtgcggcagcggcagtgggggaagtgggtggccgagatcaggctgccgcagaaccgggtgcgcgtgtggctcggcacctacgactcgccggagaccgccgcgcacgcctacgaccgcgccgcgttcaagctccgcggcgagtacgcgcgcctcaacttccccggcgtcatggacggccgcgactgccccgacaacctgcgccaactccgcgacgccgtcgacgccaagatccaggccatccgcgtccgcatggcgcgcaagcgcgcgcgcgcgcgccgccagcgcgaggagagcaagaagagccaacgcgccgaggacgcgaaggcggcgacgccgtctcgccccgtggcctccgagcgcgccgcgtccgagacgacgacgacgacaaccacgacgtcgtcgtcgtacgggtcaccggacggcgtgctctccatgagcgcggcgtccgtcgacggcgactgcccgctcgagcggatgccgtcgttcgatcccgagttgatctgggagatgcttaacttctag

SEQ ID NO: 96117 - DNA, 152 bp, Oryza sativa
  Clone ID: PAT_MRT4530_94243C.1
gcgcccacgcgtgtgagcacgcgttcgctcacgcgttggcaatcacgtgagggccgtatagcttataccttggttataacctgatgcatgtaaaagcgaaccatgtgtatcgtgcaattacattctcagggtgactttgatgaacgttgggg

SEQ ID NO: 96118 - DNA, 1330 bp, Oryza sativa
  Clone ID: PAT_MRT4530_94244C.1
atggcgccgtgcgcgggtatggcagggaggggggatatcgagtctgatccggtggtgcggcgtggtctgcgggccacgcgaaaggtacggaaccggactgttccagagaagctagtagcgactagcgacgggctccgcctgacacgggcaacacgtgggaacggggcgagcgcctccggaacggaggagcagccggccgtgagacgcgtcgcgcgagcgaaggcgcggacgcgccgtgccgcgggcgtgggcgtgccgcgtgcgacggccggctgggcgaccggccgttttctgtttttcgacgggatcaggctgcccggtttccgaggcccgacgggagaagagtccggggagccacagatgtttttgcttcagcctagctatcaccaccgtaccaccatgtcccatgttgtccacatggttcaccggctttgctgccacgaacgtaacagtcggttacatggccaggcgccgaggtccggggaacatgtgcttcaaccaacagagagcttcacaaaattcccacagtcggtgctgccgctgtggaaggagctggactacttcaaggagtacgcggcaaggcttcggagcttccggggggacgatgacgcggcggaggcagcgacgctgtcggaggcgctctacatcgtcagcatgggcaccaacgacttcctcgtgaactactacgccgtggcgtgcggccaagcggcggagtactccacggcggcggccttcacgcgactacctcctcggcgtcgccgagtcgttcgtcgaactcaacggcctccagcccatgggctgcctcccgctggagcgcgccacggggagcggcgacgcgtgcaccgacgagtacaacgccgtcgccgagcgcttcaaagccggcctccagcaccgtggagaatgtcggcaacagcaccgtgcccacgcgggtcaaccggcggcggctcacctgcgccatctgcttcgacatgttcggccccggcgggatgaagttgtcggggtgctcggtgctcccactacaactgcgtcgctccggtgcccggacccgtcctgctcggtcgccggcggaggcgagcgcggcgaccgtttcctgaggagggtgcgggggcggaaggcggtgctggagaacggccaccggaggccgaggcaagggggaagcagcggcggcggcgggaacatccagaggcggcggaggcaggcgcggcgggcgacgaggagagggcagcggccgccggcagtaggcccatgggggcgggagtggaggaggccgcgcctcgacgccgtccgcatctccgccggtgagaggagagaggaaaggggagagatatga

SEQ ID NO: 96119 - DNA, 340 bp, Oryza sativa
  Clone ID: PAT_MRT4530_94245C.1
attggtcttcttattctttgctcaggggagcggacgagactactgagcccaccgcggacggcgcggcggcagagcgcggcgacagcgcggacagccgagaggaccacgagctcaaccacagctaaaggggagcagcatgacacaccgcggggcactcacgccgacgagtgggagcaccacactccccgcaccattggctgtgtgatcaccgcaacaccgacggcgctgccgttcaccaactcagaattcacttgcacggcgacctgcacaagcctcctacgaagacgacaacaccgggtcctgggcgttcgcttacgcacgactgagacacacgccgacg

SEQ ID NO: 96120 - DNA, 513 bp, Oryza sativa
  Clone ID: PAT_MRT4530_94246C.1
tcagcaagctctctcgtgacctcggctcgggtggcatagcgacgcacggggaacggggtggttgcactcaagcccaggagttgtgggaacggaaagtagagatcgagccaaggaatggtgcggacgaaggacgaagttgagttgggagcggtgctggcggaggatgctgtcgagcggaggaggtggcgctgggtacttgtggagggtgaggtcagtagtacacgaaagatttccctggacgtcggccctggtagatttcaggtgggcctgggtggagttgaggatggcactagtggagatcgtgatcgatgtagggaggtggcacatgcggagggtaagatcaagttgagagaggcgccagcggaggatgcagttgagctagggaggtggcataggcagaggcgcgaggtcgagttgggagcgacacccgacggaggtcactgtggagccaaggaggtggtgtgggcaaagaatgtggatgagttagggtggcgccaatttgtgggccactag

SEQ ID NO: 96121 - DNA, 132 bp, Oryza sativa
  Clone ID: PAT_MRT4530_94247C.1
ctgtgacaacacattatcacccaccctttccatgtgcccgtcctcacgtcacgccggcatagccgccgtcgtcgattatagccttggcgcatctcaggaggcatcggcgatggcggtgaccgcctcggaggg

SEQ ID NO: 96122 - DNA, 453 bp, Oryza sativa
  Clone ID: PAT_MRT4530_94248C.1
tcacatccgctcaaattcttcacgatccgtaagtgtgtatgagttcttgcggaccaggtccttgtgacagatctcgaggttgaagacgatactcgaggagtactggccgtccttgtactgcggctctttctcgaccccttgggcctcctcgcccccgcccacaaggaccgggcctcctctgagaagaaccgccgccgtcatcaccgtgtcgtctccttcgcccccgctggtaaccgcaatgcagaccctctttgacaccagcagggaggtcttccaggattcattgccgggcttcgtgccgccgccctcgttggccttgcactggcattgccgcagccggagaagagggagggtctgttgcagcactggacgacgtagttggcgggcaaaaaaccgaatgccaagcccatcatagcccaaaaaacccagaacaacatctcctggacggcccat

SEQ ID NO: 96123 - DNA, 1952 bp, Oryza sativa
  Clone ID: PAT_MRT4530_94249C.1
ctcgtgccgaattcggcacctactccaccactccactccccaatccaaccaccccccgaacaaccggagaagagaggctgcactccactcgccgccggcgaccgatgctccgcgccgccctcctccgctcaggctccggcctccgccggcctcccatggccgcgccgctctccaccgccgccgccgcctcgtggctctccgacagcgcctcgtctccgcctagggtgcgcctcctcatcggcggggagttcgtcgagtcgcgggccgacgagcacgtcgacgtcaccaatccggcgacgcaggaggtggtgtcgcggatcccgctcaccaccgccgacgagttcagggccgccgtggacgccgccaggaccgccttccccgggtggcggaacacgccggtgaccacgcggcagcgcatcatgctcaagtaccaggagctcatccgggccaacatggataaactggcagagaacattacaaccgaacaggggaagacactgaaggatgcttggggcgatgtattccgtgggctagaggtggtggaacatgcttgtggaatggggacactgcagatgggtgaatatgtatcaaatgtttctaacgggattgacacctttagcattagggagccacttggtgtatgtgctggaatatgtccattcaattttccagctatgatccccctatggatgttcccaatagcggtcacttgtggcaatacttttgttctaaagccatcagaaaaagatccaggggctgctatgatgcttgcggagctagcaatggaggctggtttaccaaagggtgtgttgaacattgttcatggtacccatgatgttgtgaacaacatttgtgatgacgaggacatcaaggcagtttcctttgttggttccaatatagctggtatgcatatatattctagagcatcggcaaaggggaagcgtgttcagtctaatatgggtgcaaagaatcatgcaattatccttcctgatgctgaccgagatgccacactgaatgcccttattgctgctggttttggtgctgctgggcaaaggtgtatggcattgagcactgctgtttttgttggaggttcagagccatgggaggatgagctagtcaaacgtgcaagcagccttgtggttaattcaggaatggctagtgatgcagaccttggtccagtgatcagcaaacaggctaaggaacgtatctgcaaattaatacaaagtggtgctgataatggtgctcgtgtgctgcttgatggaagagatattgtggttcctaacttcgagaatggtaattttgttggtccaacactccttgctgatgttaaaagtgaaatggaatgttacaaggaggagatttttggtccagttcttctcttgatgaaggctgagagcctagatgatgctatccaaattgtgaacagaaacaaatatggcaatggagcatccatatttacaacatctggtgtgtctgcaaggaaatttcaaacagacattgaagctggccaggtgggcatcaacgtgccgattccagtacccctgccgttcttctccttcaccggcagcaaagcctcctttgcaggagacttgaatttctacggcaaggcgggcgtgcagttcttcacccagatcaagacggtcacgcagcagtggaaggagtcgccggctcagcgcgtctccctctccatgcccacctcgcagaagtgaggtgaaaaaaaagaaaggcatcttgtacgttcttcatttgcccatccatggaaatagacacatgcaccaatgcgaaatgaacagaagaataatcgataggcgcgggatgccatgccatgccaataaaggtagctggtctcgtatttgcataagcctcaaaacaagcatttgcgaaatgaggttttctagatttgtatggctcatttcaagcatttgcgtccgatcgaattcgaatatgaagct

SEQ ID NO: 96124 - DNA, 633 bp, Oryza sativa
  Clone ID: PAT_MRT4530_9424C.1
atggccggcgttttgcagatcacatcgtcgacgaccaccacgaggtacaatattgtcggcctcatcttcttcttctccgtcttctgcgacgatctctactcgccggctccagtcgccttggccttgaccttcaaccacaccaacttcggcccggacgagcagacgaacatcaggctggaaggcgacgccgccttcagcgccgacttctccttcagcggcgacggcggcgggtgggtcgacatcagcgccaacaggcacggcagcatcgaagacagccgtggcagggtgtcgtacgcccttccggtccctctctgggacgccgccaccggcgaggttgccagcttcaccaccggcttctccttcgtcatcaacccgcccaaacaggacggcggcatcgacaacaagggcgccggcatggccttcttcctcgccggcttcccgtcgaggctccccggctcctacccctacaacctcggcctcaccaaccagaccgcgaccagcttcaccctcgtcgggaacatgaccgccgtcgtcgagtacgacaacgtctccagcatcctggccatgaggctgcacctcggctatgggcttagtggcccccgtcaccggccggattacaaccttagctacaag

SEQ ID NO: 96125 - DNA, 441 bp, Oryza sativa
  Clone ID: PAT_MRT4530_94250C.1
atggaaaatcccggcgtggaaaggataccggcccacgcaagtataggcgttcggttaagccgaggcgagattttatcccggcccaccccggtgttttcccctcgtcatcggccgggaaatattcagcttctttggtggcgaggaaaaaatcctcttgacgcggcgacacaacgagagggggcgctgcggcggggacggctgcacggcgcggtgcgactccgacgcgacggcgacggcacgctctctcctccggcagttgactcctccggtggccaccttcttcccggtgagttccttcccttcccattagcctcctcttccagtgttagggtttcttgcgctcgtggcctcgtgctactgcggcggtgcacgacggtggcaggcatggcgggggacgccgcagcatcacaccccctcaccatggcgccgttgaagctctaa

SEQ ID NO: 96126 - DNA, 459 bp, Oryza sativa
  Clone ID: PAT_MRT4530_94251C.1
atgacggcgaccaatccccgggcatcgatcccggcggtgacctcctcggcggtggaggcgccggagaagccggagggccctttgcggttgaaccgccacatcgccgactccgtatggcgtactggtgtttgcaagctgagttcagcttcggcaccagatggcctgaaattatatggtcagactctgacagtgataccatgtgatgtggccacagcagtttcagcttgttactctaccaaagtactaaagatattgtttttatgccaaaaattcccagaagacttcaataagataagaacaccacacacagccgatgaacagagcagagaagtaaagccgaggggggtgctggttttctgttcagctaccaccacatccgcggttccggcgagctcttggaatcaggcgtttgcaatccaagttggggctaaaaatactactaatgttaatgcatgcctc

SEQ ID NO: 96127 - DNA, 1827 bp, Oryza sativa
  Clone ID: PAT_MRT4530_94252C.1
aacgccaaaaacaggttccagtttttgtgataaaccattggaaacttttacaacagtttttatttttaacaaaaactttggaaactgtacaggggttctgaaataaaaggcccgaactcctataacttgagcttattggaatgcttaaataggcattctatgcgtacattcaatagttacaagcatttcacatggctaaatcatatcaatctgtcacaacatgatatcttgctccgtgcacagacacttatttaaccatgtccgcgtgtagcctcttcaacatatcatgttgggctagtgctacatgaaagagacaccaaacgtacacatcatgaataaatctaacggaattcaaacaacattttcagagttattatgtatcgatgatacagcggttgacacctccctatgttcttgggtcaccagttccaatgctagtgctcggggatcttctcgaacaagaagagggagaacaccagctgagctccaagctttggcttactgcacgtgagacgactacaggatcgtaaaacagattcataggcttcccagtgatcttcagcaagtttgtttaggttcctcagttggttctcaagcactgaattagcaatccccaatttactccatgtctccttggatttctgagggtctgacttctgccactgtttcacagatccaaccattgatggagtggatgatcctccagttccaggttccccagtgccaccacatctgccatgcagtgcccacctgtaacctgagccgaggataatatttctggagaaaaccttgtgtaacgttgactcccatagacagcagcactaacatcaaacccactgccaatttttccttgtgctatacaatgtgcactttgagcaagcgctgctgccacaatcccagcaaatgatcaatgacttgccttgaagacgtcaactggagcgttgatttcttcagggagagcttgtaggtggcctcccgggagagctgaggagaggtcactttcacatccgtccacgcccatgcccaggagtcgtggctgagctcgtcgcggagcgggcggacgatggcgtagaagcgcgcgctggtgctgaggacgaggccggcgttgggccgctccagcacgaggtagcctcccgcgacgagcaccttccccggcgccgacgccaccacttccatgctcagctggggggacgcgatccggagctgcgggaaggccgggtggcgcgcggcggagagcagcacgacgacgcgcgccgccgccttccgaggtcgctgacggaggcggaggaaccgaggaggatcgcgagcgtggccgccggaacgccgcgcgtgcaggtggcttgcgccgccgaagtaaagccaagaagaaggccgtccctcgctgacgtattgggccctgcgcgacacggcgcggcgcggccaggccgcgcgccggccggctggccgggcaagcgagcaacagtagtacgcgcgcgcgcttgggcggcgggggcagcgtgtttctttcagctcgtagcgactggactggacttgggggtcgcccgcggcccagaggtcgccacgttcatacggcacgcactgattggcgtcgcgcgacgtggtgggggcgcggcgcgcggcgcgcggcgcgcggagacctggccggaccgtgcagctgcagtcgtgcagtcgtgctgcgttgcgttgcgtggcgtggagatcggtcgttgccgtgagcgagcgcgggtagcggaagcgcacgcagcgtcgcgggagcacgtgacagtcgtacgacctgtgaaaatttatactcgtcggacactgcggcctccaattcaaggccgccat

SEQ ID NO: 96128 - DNA, 1644 bp, Oryza sativa
  Clone ID: PAT_MRT4530_94253C.1
gcatcctatgcgtacatttcaatagttacaagcattttcacatggctaaatcatatcaatctgtcacaacatgatatcttgctccgtgcacagcacttatttaaccatgtccgcgtgtagcctcttcaacatatcatgtttggctagtgctacatgaaagagacaccaaacgtacacatcatgaataaatctaacggaattcaaacaacattatcagtttatttgtatcgatgatacagcggttgacacctcccttgttcttgggtcaccagcttccaatgaaacacctcggggatcttctcgaacaagaagagggagaacaccagctgagctccaagctttggctacagcatcacttgcttcacccaaaatcactgagaaaactgcatcaaagccaccggccccaggaactccagctagtagaacaccctccatattcatagtggcatccagaagttgagtttgtgattctggctcaattggaacaccagctgctatgcccatctctcgcatatgaagccttatttcaaggaaagcatctcttgcggccagtaatgatctaacaattagttcttgatgttgattggtagccacctctgtccacttactgcacgtgagacgactacaggatcgtaaaacagattcataggcttcccagtgatcttcagcaagtttgtttaggttcctcagttggttctcaagcactgaattagcaatccccaatttactccatgtctccttggatttctgagggtctgacttctgccactgtttcacagatccaaccattgatggagtggatgatcctccagttccaggttcccaatcaacgaacagaacacaatctccaagggacattagaggaggcaaggaaaacttaaccttctcatgatcccaactctgtgtaacaatatctgccaccacatctgccatgcagtgcccacctgtaacctgagccgaggataatatttctggagaaaaccttgtgtaacgttgactcccatagacagcagcactaacatcaaacccactgccaatttttccttgtgctatacaatgtgcactttgagcaatagcatgcagcaagtcaagatctcgtccagctgcgttgccaccggaagattggcccaaacatgaaaggttaacagttccaagatagtgaagaagagctgcaactactgatgtggtcatggcagctgatgacccaagtccagttttggcaacttcaggtttgcaattttctccagtcattgttccattagcaacttctgaattaaatgtaattgaacagaatggaggcaacgaaagcaatacctctggagttagaggaaggccacgtgcttcaatctgttttctataagaatagaaatcattgcagcccaaaattgtaatgtgcaaaccttgcaaaagcaacttgtccagtgcctccttcccctctttgtcagtgacagtcactttagcagctgctaccgagaattgcactgcccatgcccaggagtcgtggctgagctcgtcgcggagcgggcggacgatggcgtagaagcgcgcgctggtgctgaggacgaggccggcgttgggccgctccagcacgaggtagcctcccgcgacgagcaccttccccggcgccgacgccaccacttccat

SEQ ID NO: 96129 - DNA, 536 bp, Oryza sativa
  Clone ID: PAT_MRT4530_94254C.1
ctttgtttttctttttctttttctttttctttttttacttttttgtttgttttttttatttatatttgttttcacttttttggtttttattcttgttttacatctatgatgcatgattttattttttttttctgaaaaacgaaacggctacaataaaaaaccagagaccaccgacgggggaaaagcgacaaaaaaaaagggggaagacttgatatgttccgcagggggccaagaaggggaggaaacaaaaaacccaaaaccccgagcggggggaagaccaaaggggagcgagggaacgggggggggagaacccgaagaacaagggccggaaaagggcaaaaaaacggggggggagaccggcgcgcgaacaaacagagccgctgaaaaaacgggggccgcaagacgggggaaaaaaccaggaaaaacacgaaaggacgggaagaaggaaatgggcgacggaaccacacggggggggggacaaacccaccgggggggcaaaagggagcagttgctgaaagaaaaaaaaggcgggtggg

SEQ ID NO: 96130 - DNA, 350 bp, Oryza sativa
  Clone ID: PAT_MRT4530_94255C.1
aaaccacataaatgttacttcctccgtttcatattataagattttttagcattgcccacattcatatttttgtaaatgaatctagaccgcatttatttgaatgggggtaatgctagaaagttttataacatgaaacggggggggtatctcatattatctatcaaaaaaccaactgtttttaatacagcattgagaatatttagaggaggtatcaaactctttcaagggccagggcaaaaaaatgttttacacctcacactacaaccttattttaactatttgcaacccagcaaaggacttcattttcactttagaaaaaaacttttaaaaaaggaagatgcccatggatt

SEQ ID NO: 96131 - DNA, 2421 bp, Oryza sativa
  Clone ID: PAT_MRT4530_94256C.1
ttacactgtgcggggggtcgcctgcaaatgggtggcgagggggcctggaattttgcaggcggcccccttgccgccctggaggagggcgattttgaactgggcatatgtttctctgttcaacctcacttggacagcggtgatatcggcactgatatcctgtgcggcatcggcccccatgaagtagtctcggtcacggtgcgtgggatacgcgtccgtgacagcggcaacgtgcagctctggggcgtctggagtgaaggtcacacgcgcacgagtgcgaggaaggtaccagcggaggtagtcatggtagttctcctccgtatgtgggaagagctcgttgatcacctcctctgtagctaacacccaatcgtcaatgtactgctgtacacgtggagcccaaagtgcgcctgcttgctgtccccatcgagtcaacgagtggtcggcagggaggacggtcggctccacattgcctaggaacacctgcctcaggccgaactgtctcatcatacgctgcggccaatgaggctcgacgaaagtgtcgaacaccatcagcaggatggttagccagtaagcctggacgtgagcgtaacgacgcccacgtcgacaccagtaagtccccatcgtgggaccgtcctctggccactgcacgctgcgaccaaccccgtagggtgcggtgtccaccactggtcgacctatggcaaacctctcggctgcccaaagctgaagcaacattgggcaaccagcaaagatcgctcccgcgtcggtcttcgtgcaggcctcgtagaggccacggtacgtggctgctagcacggcagaaccccagctccactgcggcacgtcctgtggctcagcatccgtgatggaccgtgcgtagtggaccagccggaagtccacagcgtgcccgtgcgtgctagtgaacatcacccacccgaacaaccacagcaggtaagtttcaagggcgcatcggaccgagtaatcattagcgtcagggtggagatggtccgccttgctaggcccgacggtagagtacgggggaagggtgttgggcactcctaggtgtggaaggcgcatcacgtgcttgaagcgtgcggtgatatcctccttccagccaacaacaccgtccacgggaccaactggggctcctgccagtggtagcctgagcaggtacgacacgtcctgcagtgtcggagccatctccctacagggaaggtggaacgtgtgcgtctcaggtctccagcggtctaccagagcggcaaggagtgaccagtctgcatcccaccgcttcgccaggtcacggtcgtgcgcccccgcctcaacaagcctacaaagtggtagaaggcctgccgcacgcaacgtaaaattgaacatacgcgtaccaaggaacgagcctggctgtgcaccctggattgctgacaggaacgagcggtggttcctatcaatcccatggttcaacaacgccggtgtgtcgtacgtcataccaggtggtcgccttccatcacttgcctgtccagatggatcagcatccgcgccgcttggaacttctgcattctttgaacatttcttgtaagtatggccgcgcagatcacacttgctgcagcgtaaagtcctcccacctgcttctgactcatccatatcatttctgatgcatcgatgcacttgtgtgcattgagcaacaactctatgtctccgtgcctttctgattttatcttccatgtactttgttaccacgttgccaaacactatgttgttatcggccattgacggaccaattttcttgtatcgatccctaaagtaggcctgcgtgccgtgaaggatgaattcaacaatagcaaccaatggaagtacccgcactcctcgcattacccagttgtacacctctgccaaattggttgtcattatgtcataccaagatccatcagtgtcgaacaatagagaccacttctccttaggctcattctcaatccactgagtgaaatttctgatggacgaccccgacctccttctcattgttggtgggtcgtcatgtaatgcaccaagaggtatgggaggctcgtcacccgcatgacgatcatgtataaggcaaatgttgggcctcatacgcaccactgcaatgtgcattctctctaggaaccagtaccagctttcagtgttctcactctctacaaatgcaaaagccataggtggaacctcgttctccttatattcccagggtacatgatcaccctctgatataacaagtccagaaaaattctcatttgtccaatcagtggccattacatcaccttcctcatcggatgatgcgtcatcctccgcttgctcattatccgaatcttccctctccatttcatcaacgattatactgactctctccccctcatccgccatgccaatggcctgctcctcccttagtttgattttcctcat

SEQ ID NO: 96132 - DNA, 512 bp, Oryza sativa
  Clone ID: PAT_MRT4530_94257C.1
aaacaagggaaaaaacaaaacgggggccctttttattaaaaaacaacttttataaaaaaaccggggttttggcctcggcccccgcgggaaaaacccggggggggcggctttccccttggaaaaaaaaagaaacaaggggtcccccccccccccaaaaaaaaaaaacccccccgggggtttccccgggggaacaaaatgggggcctcccaaaagggcccccctgggggaaaaaaacccccccctttgggaaaccctgggccagctcctttttaaccttttccaaaccaactttttgaaattctttcaagggccccagggaaaaaatcccctgggggccccagggacccaaccccccttgggaaccaaaaaaaggcccccccgccccccgaaaacccccaaaaaaacccccccctttcccaggggggccacccaatcctttaaagaaagccttgggaaattaaaaaccgcgcccccccctggaaaggggggcaaaccccgccccaagtttaacc

SEQ ID NO: 96133 - DNA, 5010 bp, Oryza sativa
  Clone ID: PAT_MRT4530_94259C.1
atgtcaaataaggtcacatttcagatagttcacggtgaaggaaatattagatttggtccagatggtgttgatctgtcagattttgtaatgacatctaagggcatcgataggcctgcggagagaacatttcagtcaatttatagttggttgttgagaggatttagaatagaccaagaagtctacacactgtcagtatcagttgtagtgagtcgtgcaacagaaggttatttttgggaactaatgccgatggacagcactgctgcttggagacggtatgtggaaatggcttttgaacggtcatggcccctcgttatatttgtgtcggtacaagagaaagatataaatgtttcaatgcaaaccgaagatgtagagggtcctatcaatgcaggggatgttgttggaccatcaatgcaaaatgaggaagatcaaccaagggaggagcaggccatgggcatggcggatgagggggagagagtcggtataattgttgatgaaatggagagggaagattcggataatgaggaagcggacgacgacgcatcatccgatgaggaaggtgatgtaatggccactgattgggcaaatgaggacttctctggacttgttatatcagagggtgatcatgtaccctgggagtataaggagaacgaggtaattgagggtgcaaggtatgctcataaggatgagatgaaggaggcggtgaagcattgggcagtttccttgcagagagagtttagggtggtcaagtcaacaaattatgtgtatgaagtgaggtgcatgaaggaagattgtccgtggcgtgtccatgcatataagggtaaatggaatgattactggaaagttagcattgtgatcgagcacaagtgctacttacaaggggtggagaagtatcaccgaaacatcacttcagcttttgtggcaagtgagatgtacagcagtgttgttggtaacattggctttgaaccaaaatcaattattaggcacatcgagaacaaattcaagtacaccataagctatgcaaaggcctggagagccaaacaaaagattattgagatgaggtatggcacatttgaagcttcttatgataatttgcctcgtttgttagccaccattgcccagaggaataataatacgtactatgacctacatacatttacatcggttgatgatcgaacaaagagtgtgctgcaaagagcctttttctcattgggtgcttgcatcaatgcttttgtgcattgtcgacctgttctatgcatagatggaacttttatgacaggtaaataccgaggtcagatattgacagcaattgggtgtgatgggaacaaccaggttctacctatggcttttgcatttgtagagagtgagaacattgaaagctggtactggttcttagagagagtgcacattgcagtggtgcgtatgaggcccaacgtttgccttatacatgatcgtcatgcgggtatgttgcgggctattgactacttgcagaacggttgggatgagaagggacttccagctaagtggcctgatgttcggagtcggtggtgcatgcgtcacatgggtgcaaatttctacaagcaattcaagaacaagcatcttatggagctctttaagaggctctgtgcacagaaccaagagaagaaatttaatgagttgtgggacaagttggatgagttgacaacgaagcaaacagatgagcaatctcgcagaccacaagttgaaggtgacgagcctcccatacctcttggtgcattacatgatgacccaccaacaatgagcaggaggtcagggtcgtccatcagaaatttcactcagtggattgagaatgagcctaaggagaagtggtctctattgttcgacaccgatggatctcggtatggcataatgacaaccaatttggcagaggtgtacaactgggtaatgcgaggagttcgggtacttccattggttgctattgttgaattcatccttcacggcacgcaagcctactttagggatcgatacaagaaaattggtccgtccatggccgataacaacatagtgtttggcaacgtagtgacaaagtatatggaagataaaatcaaaaaggcacggagacatagagttgttgctcaaggcacacaagtgcatcggtatgaaataatgtgtgttgataggagcaggcgtggtatctatcgcaagcaagccgtgcaggaatgtgtcttgaaggcggatggtggatgtacctgcagttgtatgaatccgaagcttcatcaccttccttgctcacacgttcttgctgctgccggtgattgtggcatatctcccaatgtgtacgtctcaaattatttcaggaaagaagcaatctttcatacatggagtgaggagatatatgggttcgggatctcaggatcttacacaacgccgagtgcccaagttttttatattccagatccatctaagttaagggtgaaaaagggtcgacgccaaactagacgcatcagaaatgatatggatgagtcagaagcaggtgggaggactttacgctgcagcaagtgtgatctgcgcggccatacttacaagaaatgcccgaagaatgcagaagttccaagcggcgcagatgctagtccatctggacaggcaagtgatggtatggcgtacgacacaccggcgctgttgaaccgtgggattgacaggaaccaccgctcgttcctgtcagcagtcgagggtgcacagctcggcaccttccgtccacgcacgtcgcgcgagtggttgcgtgtcgacccccgtcacgttccttggttgcgtgcggcaggccttctaccactttgtaggcttgttgaggcggcggcggacgaccgtgacccaacgaagcggtgggatgcagaccggtcactccttgccgctctggtagaccgctggagacctgagacgcacacgttccaccttccctgtggggagatggctccgacactgcaggacgtgtcgtacctgctcgggctaccgctggcgggagcaccagttggtcccgttgacggtgtttttggttggaaggaggatatcactgcgcgcttcgagcaggtgatgcgccttccacacctaggaccggccaacacccttcctccgtactctacagtcgggcctagcaaggcttggttgctccagttcactgcgtacctgttgtggttgttcgggtgggtgatgttcactagcacccacgggcacgctgtggacttccggctggtccactacgcacggtccatcgcggatgctcagccacaggacgtgccgcagtggagctggggttctgccgtgctagcagccacgtaccgtgccctctgtgaggcgtgcacgaagactgacgcgggagcgatcatcgctggctgccctatgttgcttcagctttgggcagccgagaggtttgccataggtcgaccagtggtggacagcgcaccctacggggttggtcgcagcgcgcagtggccagaggacggtcccacgatggggacttactggtgtcgacgtgggcgtcgttacgctcacgtccaggtgagacgaggttacccggacttcgtgttcgagtttgaccgtctccagccgagcgacgtcatctgggagccgtacacagaagaggccgtcgctgcgagagcaccgctaggactttcgtccttgtgcacacgcgaccaggcttactggctcaccatcctgccgatggtgttcgacattttcgttgagcctcactgcccgcagcgtgtgatgagacagttcggacttaggcaggtgtttccgggcaacgtgcagccgaccgtcctccctgccgaccactcgttgactcgacggggacagctagcaggcgcactttgggctccacgtgtacagcagtacgttgacgactgggtgttagctacagaggaggtgatcaacgagctcttcccacacacggaggagaactaccgtgactaccttcactggtaccttcctcgcactcgtgcgcgtgtgaccttcactccagacgccccagagccacacgttgccgctgtcacggacgcgtatcccacgcaccgtgaccgagactacttcgtgggggctgatgccgcacgggatatcagtgccgatatcaccgcagtccaagtgaggttgaacagaggtttgcacttgactgacgttgagcagagggtgaccttcgaccggatgcaggagaagatgcgtgcggtcatgcgcgtcttctcctgtcgcagcgccatggacgtcgtacctccagctggtccggtacaaccacggcctcgcgcgcctaccgtcggagcaggacctcgacctacggcacctgtttcgcacggacctcgtctgccttcgagcgcgttcgcaggcacgaccggcgcttccgcgagctccgcaggggcgttcgccacctcttcgggcgcgttcgccagctcttcctctcacggagcgtcgatccctcgcccacatgcaggatttgcagccgggatcttcggtactggggcctcttcgtctcaccccggtaggactggtcctactagccagttctacgacgacgacttgcacggtgtactccaccacgacgtactaggctcctctcagcttggaggagctccagaggcgcacactcaggagcagccagaggtcacacctgtacaggcaggacgggttggccgtgccgtacccccggaccgactcacgtactcccaggggcacattagggcgcagggtaggagggacaggggcaacctcttcatatcttctttcgcactagcacacaacacacgaaaatggaagcgccattccttgagcgtctcaactggcgaagcgatccttttgctggttggtttccaccatggtgtgaccgtcctctgtcaggtcataaggatgtgtggatttactcgatggatcgacaatgtcactccatcatatcatggccagaagataacagagtcagaaacacaagtagagtatcaacgattgaaggaccacgagaatgcaatgcattctgaccgacctagaaggggccgatag

SEQ ID NO: 96134 - DNA, 786 bp, Oryza sativa
  Clone ID: PAT_MRT4530_9425C.1
atgaagaacgcagagccaaatattgccataggttcctcgttagatttcgcaggtctagacccacacattcgtgtcccgtactctagctccaccagcgagctcagtagcgccgtcgtccagagaggtggtgccaccccgctgctagccgacttcggatccggcaaggtccggtgcccctacaagaagtgctccgcagccttctccgccgcgtcgacctggggctcatcgtgggcttcctccgtgtcatcgttgccgttggtgcttggtctggctcgccgccctctcatcgacggtggatggggcaacataagtggaagtggaccacgagaattgctggcgcaggggcacaaggtggtgagcctggcgcagcggcacaacaagcggccgccggcggcgacggggctccgcctcgacttcgacgacggcgggtcggagcacgtgtcgacgacgaccacctcctccgcgttgtctctcctctctgacgagctcgccacgcagttcgaccggtacaagaacgagatggcgcgtatgttccaggatcatgtgaggatcgtcgacgtcgtcgatcgtgttgattcgttgcttgctgctggtgcgatcatgtcggagtttgacatcttctcctctccctggaggtcgcggagaacgtcgacgaagtcgcccaagacgacgctcatcttcgtggtcgtcctcgccgcgctcctcctgtggctctcgccgggtggccccgcgtgggcgctgtcccgttgccgtggcacgacgccgccgccgccgagctgcccctga

SEQ ID NO: 96135 - DNA, 399 bp, Oryza sativa
  Clone ID: PAT_MRT4530_94260C.1
atggcgcaagcggcatgctcctcgattccaagtgaactcccttctaggactgaccatgatgtggagtttagcgtgcacgttcagttcggtcagtttacaactaaacttgatgatggtacttgtgttgaagtggcgcgtaaatggcttgaatgggttgtggactatcatcagtgcacattggagagcttggaaaaggaccttgcagcaagggtcaatgaggtagcaatgggtgaagttgtgataggcagacaaggtgatgctcaagaatgtagcagttgtattgattgggatagtctagagatagctccaattctacataaccaagttcctcagcttgctattgattgggatgcattcgagatagaaccaattccacaacatcaacttggaggaaaatga

SEQ ID NO: 96136 - DNA, 3474 bp, Oryza sativa
  Clone ID: PAT_MRT4530_94261C.1
atgtcaagtaaggtcacatttcagatagttcacggtgaaggaaatattagatttggtccagatggtgttgatctgtcagattttgtaatgacatctaagggcatcgataggcctgcggagagaacatttcagtcaatttatagttggttgttgagaggatttagaatagaccaagaagtctacacaatgtcagtatctgttgtagtgagtcgtgcaatagaaggttatttttgggaactaatgccgatggacagcactgctgcttggagacggtatgtggaaatggcttttgaacggtcatggcccctcgttatatttgtgtcggtacaagagaaagatacaaatgtttcaatgcaaaccgaagatgtggagggtcctagcaatgcaggggatgttgttggaccatcgatgcaaaatgaggaaaatcaaccaagggaggagcaggccatgggcatggcggatgagggggagagagtcggtataattgttgatgaaatggagagggaagattcggataatgagcaagcggaggacgacgcatcatccgatgaggaaggtgatgtaatggccactgattgggcaaatgaggacttctctggtcttgttatatcagagggtgatcatgtaccctgggagtataaggagtacgaggtaattgagggtgcaaggtatgctcataaggatgagatgaaggaggcggtgaagcattgggcagtttcattgcagagagagtttagggtggtcaagtcaacaaattatgtgtatgaagtgaggtgcatgaaggaagattgtccgtggcgtgtccatgcatataagggtaaatggaatgattattggaaagttagcattgtgaccgagcacaagtgctacttacaaggggtggagaagtatcaccgaaacatcacttcagcttttgtggcaagtgagatgtacagcagtgttgttggtaacattggctttgaaccaaaatcaattattaggcacatcgagaacaaattcaagtacaccataagctatgcaaaggcctggagagccaaacaaaagatcattgagatgaggtatggcacatttgaagcttcttatgataatttgcctcgtttgttagccaccattgcccagaggaataataatacttactatgacctacatacatttacatcggttgaagatagaacaaaagagtgtgctgcaaagagcctttttctcattgggtgcttgcatcaatgcttttgtgcattgtcgacctgttctatgcatagatggaacttttatgacaggaacaaccaggttctacctatggcttttgcatttgtagagagtgagaacactgaaagctggtactggttcctagagagagtgcacattgcagtggtgcgtatgaggcccaacgtttgccttatacatgatcgtcatgcgggtatgttgcgggctattgactacttgcagaacggttgggatgagaagggacttccagctaagtggcctgatgttcggagtcggtggtgcatgcgtcacatgggtgcaaatttctacaagcaattcaagaacaagcatcttatggagctctttaagaggctctgtgcacagaaccaagagaagaaatttaatgagttgtgggacaagttggatgagttgacaacgaagcaaacagatgagcaatctcgcagaccacaagttgaaggtgacgagcctcccatacctcttggtgcattacatgatgacccaccaacaatgagaaggaggtcagggtcggccatcagaaatttctctcagtggattgagaatgagcctaaggagaagtgggctctattgttcgacaccgatggatctcggtatggcataatgacaaccaatttggcagaggtgtacaactgggtaatgcgaggagttcgggtacttccattggttgctattgttgaattcatccttcacggcacgcaagcctactttagggatcgatacaagaaaattggtccgtccatggccgataacaacatagtgtttggcaacgtagtgacaaagtacatggaagataaaatcaaaaaggcacggagacatagagttgttgctcaaggcacacaagtgcatcggtatgaaataatgtgtgttgataggagcaggcgtggtatctatcgcaagcaagccgtgcaggaatgtgtcttgaaggcggatggtggatgtacctgcagttgtatgaagccgaagcttcatcaccttccttgctcacacgttcttgctgctgccggtgattgtggcatatctcccaatgtgtacgtctcaaattatttcaggaaagaagcaatctttcatacatggagtgaggagatatatgggttcgggatctcaggatcttacacaacgctgagtgcccaagttttttatattccagatccatctaagtttagggtgaaaaagggtcgacgccaaactagacgcatcagaaatgatatggatgagtcagaagcaggtgggaggactttacgctgcagcaagtgtgaccttcgctggtaccttcctcgcactcgtgcgcgtgtgaccttcactccagacgccccagagccgcacgttgccgctgtcacggacgcgtatcccacgcaccgtgaccgagactacttcgtggcggctgatgcggcacgggatatcagtgccgatatcaccgcagtccaggtgaggttgaacagaggtttgcacttgactgacgttgagcagaggtcgaccttcgaccggatgcaggagaagatgcgtgcggtcatgcgcgtcttctcctgtcgcagcgccgtggacgtcgtaccttcagctggtccggtacacccacggcctcgcggtcctatcgtcggagcaggacctcgtttgtcttcgagcgcccctagcttcggagcagtgcgacctacagcaccggtttcgcacggacctcgtatgccttcgagcgcgttcgcaggcacgaccggcgcttccgcgagctccgcaggggcgttcgccacctcttcaggcgcgttcgccagctcttcctctcacggagcgtcgatccctcgcccacacgcaggatttgcagccgggatcttcggtactggggcctcttcgtctcacgccggtaggactggtcctactagccagttctacgacgacgacttgcacggtgcagaccaccaggacgtactaggctcctctcagcttggaggagctccagaggcgcacactcaggagcagccagaggtcacacctgtacaggcaggacgggttggccgtgccgtacccccggaccgactcacgtactcccaggggcacattagggcgcagggtaggagggacagggttcttttcattcgtatggtgcttgaacaacttatgctcacaacaacacactttcggcgcttcacggtagtgccatatccagtagcgcgcacagtccacaacagcacacatgaaaagcggcagctcgagttatcactatcaactttcggcgctgcctgttga

SEQ ID NO: 96137 - DNA, 363 bp, Oryza sativa
  Clone ID: PAT_MRT4530_94262C.1
atgacgataacagccaacatcatctccggtgcgctcgtggagatcctggcttcgcgcgtgagcgccgccgtcgtgctccacgagcttgcctcctccggcgactgccatgccctagaggccatcctgaaatcccacagcatgtgcggtgcgctcgtcggcctcgtcagagcctcatctcctcgcaaagccaccaaggcctccctgttcacggcctactacctccggatgagcccggtggtggggcgccgtgtcggcgaagttgagacccctggtggcgggatggtgccgatggacgatggtgtagagcaaaggatggcaccggcggacgtcgatgacagtcagagaggagctgaaggtggctga

SEQ ID NO: 96138 - DNA, 1644 bp, Oryza sativa
  Clone ID: PAT_MRT4530_94263C.1
atgtcaagtaaggtcacatttcagatagttcacggtgaaggaaatattagatttggtccagatggtgttgatctgtcagattttgtaatgacatctaagggcatcgataggcctgcggagagaacatttcagtcaatttatagttggttgttgagaggatttagaatagaccaagaagtctacacaatgtcagtgtcagttgtagtgagtcgtgcaacagaaggttatttttgggaactaatgccgatggacagcactgatgcttggagacggtatgtggaaatggcttttgaacggtcatggcccctcgttatatttgtgtcggtacaacagaaagatataaatgtttcaatgcaaaccgaagatgtagagggttctatcaatgcaggggatgttgttggaccatcgatgcaaaatgaggaaaatcaaccaagggaggagcaggctatgggcatggcagatgagggggagagagtcggtataattgttgatgaaatggagagggaagattcggagcctcactgcccgcagcgtgtgatgagacagttcggacttaggcaggtgtttccgggcaacgtgcagccgaccgtcctccctgccgaccactcgttgactcgacggggacagctagcaggcgcactttgggctccacgtgtacagcagtacgttgacgactgggtgttagctacagaggaggtgatcaacgagctcttcccacacacggaggagaactaccgtgactaccttcgctggtaccttcctcgcactcgtgcgcgtgtgaccttcactccagacgccccagagccgcacgttgccgctgtcacggacgcgtatcccacgcaccgtgaccgagactacttcgtggcggctgatgccgcacgggatatcagtgccgatatcaccgcagtccaagtgaggttgaacagaggtttgcacttgactgacgttgagcagagggtgaccttcgaccggatgcaggagaagatgcgtgcggtcatgcgcgtcttctcctgtcgcagcgccgtggacgtcgtacctccagctggtccggtacaaccacggcctcgcgcgcctaccgtcggagcaggacctcgacctacggcacctatttcgcacgcaggatttgcagccgggatcttcggtactggggcctcttcgtctcacgccggtaggactggtcctactagccagttctacgacgacgacttgcacggtgcagaccaccacgacgtactaggctcctctcagcttggaggagctccagaggcgcacactcaggagcagccagaggtcacacctgtacaggcaggacgggttggccgtgccgtacccccggaccgactcacgtactcccacgggcacattagggcgcagggtaggagggacaggggcggccccccgcacagtacaaaatcgccctcgcggagggcggcaagggggccgcctgcaaaattccatgccccctcgccgcccatttgcaggcggccccccgcacagtacaaaatcgccctcgcggagggcggcaagggggccgcctgcaaaattccatgccccccctcgccgcccatttgcaggcggccccccgcacagtacaaaatcgccctcgcggaggacggcaagggggccgcctgcaaatttcgttga

SEQ ID NO: 96139 - DNA, 1929 bp, Oryza sativa
  Clone ID: PAT_MRT4530_94264C.1
atggcttttgaacggtcatggcccctcgttatatttgtgtcggtacaagagaaagatataaatgtttcaatgcaaaccgaagatgtagagggtcctatcaatgcaggggatgttgttggaccatcgatgcaaaatgaggaaaatcaaccaagggaggagcaggccatgggcatggcggatgagggggagagagtcggtataattgttgatgaaatggagagggaagattcggataatgaggaagcggacgacgacgcatcatccgatgaggaaggtgatgtaatggctactgattgggcaaatgaggacttctctggacttgttatatcagagggtgatcatgtaccctgggagtataaggagaacgagaacggttgggatgagaagggacttccagctaagtggcctgatgttcggagtcggtggtgcatgcgtcacatgggtgcaaatttctacaagaaattcaagaacaagcatcttatggagctctttaagaggctctgtgcacagaaccaagagaagaaatttaatgagttgtgggacaagttggatgagttgacaacgaagcaaacagatgagcaatctcgcagaccacaagttgaaggtgacgagcctcccatacctcttggtgcattacatgatgacccaccaacaatgagaaggaggtcagggtcgtccatcagaaatttcactcagtggattgagaatgagcctaaggagaagtggtctttattgttcgacaccgatggatctcggtatggcataatgacaaccaatttggcagaggtgtacaactgggtaatgcgaggagtttggatacttccattggttgctattgttgaattcatccttcacggcacgaaagcgtactttagggatcgatacaagaaaattggtccgtccatggccgataacaacatagtgtttggcaacgtagtgacaaagcgtggtatctatcgcaagcaagccgtgcaggaatgtgtcttgaaggcggatggtggatgtacctgcagttgtatgaagccgaagcttcatcaccttccttgctcacacgttcttgctgctgccggtgggaggactttacgctgcagcaagtgtgatctgcgcggccatacttacaagaaatgcccgaagaatgcagaagttccaagcggcgcagatgctagtccatctggacaggcaagtgatggatttgcagccgggatcttcggtactggggcctcttcgtctcacgccgaggcgcacactcaggagcagccagaggtcacacctgtacaggcaggacgggttggccgtgccgtacccccggaccgactcacgtactcccaggggcacattagggcgcagggtaggagggacaggggcaaggtgttgggggagtggctccggattgaggagccatcctccgaagggttgaagcgctccggagaccatcctcccagggagatgaccgtggatcggggccatgtcggtccccgaccgaggtggccgctccggaggctaccaaggatcccagataatcggatcccgtggacggcgagagccccggagcctggaagggatctggagatcgccggaagggctccgggaggccgtaacatccgtgggctccggagccccaggaagcatctcgagctccggaactcagagggtttccggagcctagcaaaagaactccggaggcggccagggacttcggagctccggaggcctccgaagctcgagatgctgcccggggcgaatcgagcctcaatatgccctcaacggctcaagttaggaatcaggcgactagtgggttggaataaatgcacactttgcgccccaaccacctctgagactgtcgatgatgaccagacggagcacgatattacccgggggatgcctttatccagggctgacccattggccagcacctcagattcctcatag

SEQ ID NO: 96140 - DNA, 578 bp, Oryza sativa
  unsure (1)..(578): unsure at all n locations
  Clone ID: PAT_MRT4530_94265C.1
atcccaccgccgctgctccacctccccacacgtcgtccacgtccggccgccgcctgccgcgccgcgctgccggcccgccatggccggggctccctccgtctacgccaatgtctcctgctcctgctcctgctccacgcgccgtcgcacaccgcgtgctgccttgcaaccgccgccgccgccgctccacctcccgcatcggccaccgtcgccctcgccgacatggccgacccggattccttcttccgccgctgccgcgtgctccgatgctctcgtggcgtggcgcacagctcgggcggcgagcccgcgagcgcgaggaggcgctantgagnaccccggaggnagngggtgaggctgtgattgtgcggcggccggagcagaagacgaagggggtggagctaagcgggccgacgacggcgagcccggcggcgcgtgggcctcaatgcagctcctcggggctcctccgcctgtactcccgagaggntcgggcggagcgaccaaataccccggctacggcggnggcggaggaggaggaggaggaatccctccttcgaagggccacaaggcagcgcgcgagtngn

SEQ ID NO: 96141 - DNA, 3732 bp, Oryza sativa
  Clone ID: PAT_MRT4530_94266C.1
atggccgaaggcggcggtggaggtggtgctcacccgaatgcgagggaacgagggctccggcgacgaacctcgacggaggaggggtggacggggtggatctcggccacgcgaacccgacggcggcgacggcgcggcctggcggcgaccctaacggcggctagcggcggccggagtagcggaaaaggcggcggcaaggggttgcacggcgcgggagcgatgggaggctcgagagagtgcggcgaaatggggaaaaaggtcatttataaaaattacaattttggcttgggaggaaaacttcggggtgtgacagggtgcaagagagagtttagggtggtcaagtcaacaaattatgtgtatgaagtgaggtgcatgaaggaagattgtccgtggcgtgtccatgcatataagggtaaatggaatgattattggaaagttagcattgtgaccgagcacaagtgctacttacaaggggtggagaagtatcaccgaaacatcacttcagcttttgtggcaagtgagatgtacaacagtgttgttggtaacattggctttgaaccaaaatcaattattaggcacatcgagaacaaattcaagtacaccataagctatgcaaaggcctggagagccaaacaaaagatcattgagatgaggtatggcacatttgaagcttcttatgataatttgcctcgtttgttagccaccattgcccagaggaataataatacgtactatgacctacatacatttacatcggttgatgatcgaacaaagagtgtgctgcaaagagtctttttctcattgggtgcttgcatcaatgcttttgtgcattgtcgacctgttctatgcatagatggaacttttatgacagagagtgagaacactgaaagctggtactggttcctagagagagtgcacattgcagtggtgcgtatgaggcccaacgtttgccttatacataatcgtcatgcgggtatgttgcgggctattgactacttgcagaacggttgggatgagaagggacttccagctaagtggcctgatgttcggagtcggtggtgcatgcgtcacatgggtgcaaatttctacaagcaattcaagaacaagcatcttatggagctctttaagaggctctgtgcacagaatcaagagaagaaatttaatgagttgtgggacaagttggatgagttgacaacgaagcaaacagatgagcaatctcgcagaccactagttgaaggtgacgagcctcccatacctcttggtgcattacatgatgacccaccaacaatgagaaggaggtcagggtcgtccatcagaaatttcactcagtggattgagaatgagcctaaggagaagtggtctctattgttcgacaccgatggatctcggtatggcataatgacaaccaatttggcagaggtttacaactgggtaatgcgaggagttcgggtacttccattggttgctattgttgaattcatccttcacggcacgcaagcgtactttagggatcgatacaagaaaattggtccgtccatggccgataacaacatagtgtttggcaacgtagtgacaaagtacatggaagataaaatcaaaaaggcacggagacatcgagttgttgctgaaggcacacaagtgcatcggtatgaaataatgtgtgttgataggagcaggcgtggtatctatcgcaagcaagccatgcaggaatgtgtcttgaaggcggatggtggatgtacctgcagttgtatgaagccgaagcttcatcaccttccttgctcacacgttcttgttgctgccggtgattgtggcatatctcccaatgtgtacgtctcaaattatttcaggaaagaagcaatctttcatacatggagtgaggagatatatgggttcgggatctcaggatcttacacaacgctgagtgcccaagttttttatattctagatccatctaagttaagggtgaaaaagggtcgacgccaaactagacgcatcagaaatgatatggatgagtcagaagcaggtgggaggactttacgctgcagcaagtgtgatctgcgcggccatacttacaagaaatgcccgaagaatgcagaagttccaagcggcgcagatgctagtcaatctggacaggcaagtgatggtatggcgtacgacacaccggcgctgttgaaccgtgggattgacaggaaccaccgctcgttcctgtcagcagtcgagggtgcacagctcggcaccttccgtccacgcacgtcgcagtggagctggggttctgccgtgctagcagccacgtaccgtgccctctgtgaggcgtgcacgaagactgacgcgggagcgatcatcgctggctgccctatgttgcttcagctttgggcagccgagaggtttgccataggtcgaccagtggtggacagcgcaccctacggggttggtcgcagcgcgcagtggccagaggacggtcccacgatggggacttactggtgtcgacgtgggcgtcgttacgctcacgtccaggtgagacgtggttacccggacttcgtgttcgagtttgaccgtctccagccgagcgacgtcatctgggagccgtacacagaagaggccgtcgctgcgagagcaccgctaggactttcgtccttgtgcacacgcgaccaggcttactggctcaccatcctgccgatggtgttcgacattttcgttgagcctcactgcccgcagcgtgtgatgagacagttcggacttaggcaggtgtttcctggcaacgtgcagccgaccgtcctccctgccgaccactcgttgactcgacggggacagctagcaggcgcactttgggctccacgtgtacagcagtacgttgacgactgggtgttagctacagaggaggtgatcaacgagctcttcccacacacggaggagaactaccgtgactaccttcgctggtaccttcctcgcactcgtgcgcgtgtgaccttcactccagacgccccagagccgcacgttgtcgctgtcacggacgcgtatcccacgcaccgtgaccgagactacttcgtggcggctgatgccgcacgggatatcagtgccgatatcaccgcagtccaagtgaggttgaacagaggtttgcacttgactgacgttgagcagagggtgaccttcgaccggatgcaggagaagatgcgtgcggtcatgcgcgtcttctcctgtcgcagcgccgtggacgtcgtacctccagctggtccggtacaaccacggcctcgcgcgcctaccgtcggagcaggacctcgacctacggcacctgtttcgcacgcaggatttgcagccgggatcttcggtactggggcctcttcgtctcacgccggtaggactggtcctactagccagttctacgacgacgacttgcacggtgcacaccaccacgacgtactaggctcctctcagcttggaggagctccagaggcgcacactcaggagcagccagaggtcacacctgtacaggcaggacgggttggccgtgccgtacccccggaccgactcacgtactcccaggggcacattagggcgcagggtaggagggacagggttcttttcattcatatggtgctagaacaacttatgctcacgacaacacactttcggcgcttcacggtagtgtcagatccagtagcgcgcacagtccacaacagcacacatgaaaagcggcagctcgagttatcactatcaactttcggcgctgcctgttga

SEQ ID NO: 96142 - DNA, 283 bp, Oryza sativa
  unsure (1)..(283): unsure at all n locations
  Clone ID: PAT_MRT4530_94267C.1
cccgaattccggttcaaccacaggcgtccgggcaaacatnccaaacacatgaacgaacacctcttcggacgcatggataatagctttgtgccattactcctanagattatttataaacctggccaggcttctcaaatgataccaaaaacaattccttaaattgatgctctattaaaatactttattcatatcaaaaaaataatgccacaagtatgttaaacttttaagcgattctcacctaattttatgattctctactaaaatgctttaactgttttgtttc

SEQ ID NO: 96143 - DNA, 3898 bp, Oryza sativa
  Clone ID: PAT_MRT4530_94268C.1
atgaggggcggcgcctcctcgggaccccagcgatggggctcggcggggacgacaccgcggtcgctgagcacgggctcgtcgccgcgcgggtccgacgaccggagctccgacgacggggaggagctggtcgaggtcacgctcgacctgcaggacgacgacaccattgtgcttcggagcgtcgagcccgcggcggcggcggcggcgggggtgggggcgggggcgggggcggcgtcggcgcggggggagctcacgggtggcccgtcgtcgtcgtcgtcgcggtcgaggtcgccgtcgatccggaggagctcgtcgcaccggctgctgcagttctcgcaggagctcaaggcggaggccatggcccgggcgcggcagttctcgcaggacctgaccaagcggttcggccgcagccacagccgcagcgaagcgcaggcgccgtcgggcctcgagtccgcgctcgccgcccgcgccgcgcggcggcagcgcgcgcagctcgaccgcacacgctccggcgcccacaaggcgctccgcggcctccgcttcatcagcagcaacaaggccaacaacgcctggatggaggtgcaggccaacttcgaccgcctcgcccgcgacggctacctctcccgctccgacttcgccgaatgcatcgggatgacggaatcgaaggagttcgcgctcgagctgttcgacacgctgagccggcgacgacagatgaaggtggacacgattaacaaggatgaactccgcgagatctggcagcagatcaccgataacagcttcgactcccgtctccaaatcttcttcgaaatggtggataagaacgcggacggccggattacggaggcggaggtgaaagagatgttggatcatgttgactcagctcgtgtttctcctttcacctacgcgcagattattatgttgagcgcgtctgccaataaactgtcgaggcttaaggagcaagcagaagagtacgccgctttgatcatggaggagcttgatcctgaagggctcggctacattgagcttgttgccgcaccatttacaaaggaatcatttacaatgccagaaatgttccatcacggttccatggctcttggtcgtgcattgctctgccttgcccgggtgcaaggggtgctcaccaagcagagaaacggaggcagcgaggtccagggagcggcggagacggtggttgatggccaacggcggcaaaactccggcgtcgacgtcgccgggtcgactcaaggcgcgaactgtaacttcgagagtacgggggtgttagagatgagccacagagggtgcatgcgcgaggaatccggcggaaactcaccggagcttggtgttgcttcggtggtgaggaacggcggccggagcggcgtcggcgggctaaggaagaagagttcaatccgcaaaataagcacctctttaagctactatttcgaggacaactggaaacgtttatgggtgcttgcattgtggattgggataatggctggactgttcacctggaaattcatgcagtatcgtaaccgatatgtctttgatgtgatgggctactgtgtcacaacagcaaaaggagctgctgaaaccctaaagctgaatatggcaattatcctcctgccagtatgccgtaacaccattacttggttgcgaagtacaagggctgcacgggcactaccttttgatgacaacatcaacttccacaagaagaacggggagaggattctaaggtgtgaaaccttccagctttactccactggcaccagctccagcgcctgctcctgcggctgctgcagcgaactccggtgtagatcacttggactccctgtttgctgcgaccacagctgctccgactgcggtgagtaatggtggtggggggggtgacatcccttctcaattacttcagcacctggggatgactaccccagcattcatgttcgacaacttggtgattggacacgagaactcaagagagtatttgctgcagcttgtgagcccccagcgggtggtaaaagcggccttcttagggcagatgagacaactaagaaaatcttacccaagcttctgattgatggaccgtatggttctcctgctcaggattacagcaagtatgatgttttattacttgttggattaggaattggtgcgacaccctttattagcatattaaaagatcttctgaataacatcatcaaaatggaggaagaggaggatgcttctactgatctttatccaccaatgggtcggaataagccacatgttgatctgggcacacttatgacgattacctcaagaccaaagaagatcttgaagaccacaaatgcttacttttactgggtgacacgtgagcaaggctcttttgattggttcaaaggagtcatgaatgaaattgctgacttggatcaaaggaatatcattgagatgcacaactacctaacaagcgtctatgaggagggggatgccaggtcagcactcatcaccatgctccaagctctgaaccatgccaagaatggagttgatattgtctctgggacaaaagtccggacacattttgcacgaccaaattggagaaaggtaaaaagtattctactgtggagctccagtcctggcacaagaactaagcaaactttgccatgaattcaacgggaaatgcacaacgaagttcgaattccataaggagcatttctgaaatcaagtaaatacttgaggggaaacaaggatagattatgttatgtgtatagcatttttgtcttcgtatattcttcattataatggacaggagatagcaaggtgaggaagcaagcatatagttagcccaacagttcttgctaccaatcaataaaaggagcaacaacaagagtgatttgggataatcatataaatttgtgcgatgtccatcatggcttttgcagcatgtcttatgcagtcatgaatgtacagagctcacttgaagaccttgagcttcttctgattttagttgagattataagtaggatggtatagcacataggaaggtcacaaggctaattaactgtatattattcatgcagctgagtgtctggctaaggccagaagcacgttttacttttgtatttatacataacagaaaacgagaaaaaaaaaataaaaaaaaaaaagaataatccaaaggaggcctcctaacctccttttgctacagtgcgtgggctcttctgtgggcccccggttcggccccccgcgctccgccctcttcgccatgattttaatggcagatgcacgtcaaaatttgagtttcacaaggagcatttctaaaatcaggtaaatgccagtgggggaaataatagaagattgtgctacttgtatgacaccttttcttttacacgatgccttgttcacaatggaattaatagcaagggcgagaagcatagaggtgctatcacaacgcaccctcctggctacggccagtttgcactgtacacttcttgcttgagatactcagaagatacaataagagtgccaagataagagttttggggatcatctggtacaaaatatataggacatcaatcatggggaaacataggttccaacttccaagtgcatcggcgagctgagtggtcaggctacaagatttgctctaactttgtaattatatacagagatgggaaacaaacaaatatagtgtgatttttgtaagtagtgtaggttggtagtgattgggtccagattggtggctcagattacattcaagcttgtttttttgttgtgccgggagtgtacaacgtgcattgttttagggatggttttacacacatccagatgatgtaatcatgtaatccttgtagcaaaggccttgttcttacgtttactttctgtctgtacatgtttggcttgtggattgtgtattggaaagaaaagatgcagt

SEQ ID NO: 96144 - DNA, 5586 bp, Oryza sativa
  Clone ID: PAT_MRT4530_94269C.1
atgtcaagtaaggtcacatttcagatagttcacggtgaaggaaatattagatttggtccagatggtgttgatctgtcagattttgtaatgacatctaagggcatcgataggcctgcggagagaacatttcagtcaatttatagttggttgttgagaggatttagaatagaccaagaagtctacacaatgtcagtatctgttgtagtgagtcgtgcaatagaaggttatttttgggaactaatgccgatggacagcactgctgcttggagacggtatgtggaaatggcttttgaacggtcatggcccctcgttatatttgtgtcggtacaagagaaagatacaaatgttttaatgcgaaccgaagatgtggagggtcctagcaatgcaggggatgttgttggaccatcgatggaaaatgaggaaaatcaaccaagggaggagcaggccatgggcatggcggatgagggggagagagtcggtataattgttgatgaaatggagagggaagattcggataatgagcaagcggaggacgacgcatcatccgatgaagaaggtgatgtaatggccactgattgggcaaatgaggacttctctggacttgttatattagagggtgatcatgtaccctgggagtataaggagaacgaggtaattgagggtgcaaggtatgctcataaggatgagatgaaggaggcggtgaagcattgggcagtttcattgcagagagagtttagggtggtcaagtcaacaaattatgtgtatgaagtgaggtgcatgaaggaagattgtccgtggcgtgtccatgcatataagggtaaatggaatgattattggaaagttagcattgtgaccgagcacaagtgctacttacaaggggtggagaagtatcaccgaaacatcacttcagcttttgtggcaagtgagatgtacagcagtgttgttggtaacattggctttgaaccaaaatcaattattaggcacatcgagaacaaattcaagtacaccataagctatgcaaaggcctggagagccaaacaaaagatcattgagatgaggtatggcacatttgaagcttcttatgataatttgcctcgtttgttagccacaattgcccagaggaataataatacttactatgacctacatacatttacatcggttgatgatcgaacaaagagtgtgctgcaaagagcctttttctcattgggtgcttgcatcaatgcttttgtgcattgtcgacctgttctatgcatagatggaacttttatgacaggtaaataccgaggtcagatattgacagcaattgggtgtgatgggaacaaccaggttctacctatggcttttgcatttgtagagagtgagaacactgaaagctggtactggttcctagagagagtgcacattgcagtggtgcgtatgaggcccaacgtttgccttatacatgatcgtcatgcgggtatgttgcgggctattgactacttgaagaacggttgggatgagaagggacttccagctaagtggcctgatgttcggagtcggtggtgcatgcgtcacatgggtgcaaatttctacaagcaattcaagaacaagcatcttatggagctctttaagaggctctgtgcacagaaccaagagaagaaatttaatgagttgtgggacaagttggatgagttgacaacgaagcaaacagatgagcaatctcgcagaccacaagttgaaggtgacgagcctcccatacctcttggtgcattacatgatgacccaccaacaatgagaaggaggtcagggtcgtccatcagaaatttcagtcagtggattgagaatgagcctaaggagaagtggtctctattgttcgacaccgatggatctcggtatggcataatgacaaccaatttggcagaggtgtacaactgggtaatgcgaggagttcgggtacttccattggttgctattgttgaattcatccttcacggcacgcaagcctactttagggatcgatacaagaaaattggtccgtccatggccgataacaacatagtgtttggcaacgtagtgacaaagtacatggaagataaaatcaaaaaggcacggagacatagagttgttgctcaaggcacacaagtgcatcggtatgaaataatgtgtgttgataggagcaggcgtggtatctatcgcaagcaagccgtgcaggaatgtgtcttgaaggcggatggtggatgtacctgcagttgtatgaagccgaagcttcatcaccttccttgctcacacgttcttgctgctgccggtgattgtggcatatctcccaatgtgtacgtctcaaattatttcaggaaagaagcaatctttcatacatggagtgaggagatatatgggttcgggatctcaggatcttacacaacgctgagtgcccaagttttttatattccagatccatctaagttaagggtgaaaaagggtcgacgccaaactagacgcatcagaaatgatatggatgagtcagaagcaggtgggaggactttacgctgcagcaagtgtgatctgcgcggccatacttacaagaaatgcccgaaaaatgcagaacgtcgttacgctcacgtccaggtgagacgtggttacccggacttcgtgttcgagtttgaccgtctccagccgagcgacgtcatctgggagccgtacacagaagaggccgtcgctgcgagagcaccgctaggactttcgtccttgtgcacacgcgaccaggcttactggctcaccatcctgccgatggtgttcgacattttcgttgagcctcactgcccgcagcgtgtgatgagacagttcggacttaggcagctagcaggcgcactttgggctccacgtgtacagcagtacgttgacgactgggtgttagctacagaggaggtgatcaacgagctcttcccacacacggaggagaactactgtgactaccttcgctggtaccttcctcgcactcgtgcgcgtgtgaccttcactccagacgccccagagccgcacgttgccgctgtcacggacgcgtatcccacgcaccgtgaccgagactacttcgtggcggctgatgcggcacgggatatcagtgccgatatcaccgcagtccaggtgaggttgaacagaggtttgcacttgactgacgttgagcagagggcgaccttcgaccggatgcaggagaagatgcgtgcggtcatgcgcgtcttctcctgtcgcagcgccgtggacgtcgtacctccagctggaccttgtttgccttcgagcgcgttcgcaggcatgaccggcgcttccgcgagctccgcaggggcgttcgccacctcttcgggcgcgttcgccagctcttcctctcacggagcgtcgatccctcgcccacacgcaggatatgcagccgggatcttcggtactggggcctcttcgtctcacgccggtaggactggtcctactagccagttctacgacgacgacttgcacggtgcagaccaccaggacgtactaggctcctctcagcttggaggagctccagaggcgcacactcaggagcagccagaggtcacacctgtacaggcaggacgggttggccgtgccgtaccaccggaccgacccacgtactcccaggggcacattagggcgcagggtaggagggacagggagagggggaagggggtgacggttcaggagatcatggcgcaagtggcatgctcctcgattccaagtgagctcccttctaggactgaccatgatgcggagtttagcgtgtgcgttcagttcggtcagtttacagctaaacttgatgatggtacttgtgttgaagtggcgcataatggcttgaatgggttgtggactatcatgagtgcacattggagagcttggaaaaggatcttgcagcaagggaagagtgatagaaagttgatttattttgttgatgtggaggacaagcctattcatttgatgactgactcgatagttttagaggtcaatgaggtagcaatgggtgaagttgtgacaggcaggcaaggtgatgttcaagaatgtagcaattgtattgattgggatagtctagagatagctccaattccacataaccaagttccacagcttgctattgattgggatgcattggagatagaaccaattccacaacatcagcttggttcttctatgcctttgatgaaggaagatgaaatgtatacatttgttggacttagagctgaggataagagagccgagcaagctagaattgaggctgagatgcaaagggattctgttcctacatcaggttcagctcatactgaaggggatttgatccttaacgaggcagagattgctattaatgatgtgatacctagtgaatctgaaattttctatgacaaggatgatcctccgatggaagttggaagctcatatgtaagcatgaatgagtttaggttagctgtgaggcaacacgctataaagggacaatttcagcttgggacagagaagtctgataaagaaaggtttaggggcttttgcacagctgatgaatgcccatgggctatcatggccaggctgatgcctaatgaaaaatccgtgagggttaccttgaacaaatttccccatacttgtgcatcaactgggagagtaaagaccaaaatggcaagttataagtgggtggcagagaaggcaattccttttctaaaaaaagatccaaatattggtgcaaagaagttgatgggggacctagaaaccaagtacaatgtcactttaggataccacgctgtgtatagaggtatggtcatggctaaagataagatttttggtacatgggaagagagctttgcatatttgtttaacttcaaggctgaggttgagctgaaaatgcctggaagtgttgtggagatagatgtacaagagaatgccgatggggtttattttcatagatttttttgtgcatttaaacctgcgattgatggtttcataaatggatgccggccatacttgagtatagactccacagcccttaatgggagttggaatggtcagctagcttctgctacatccatagatggacacaactggatgtttccggttgcatttggtttcttccaaagtgagaccactaacaattggacttggtttatgcaacagcttcataaggccattggagaacaatcacacttagcagtcagctcgaatgcttgtaaggggctggagaatgctatgaaaaatgtatttagtacagcagagcatagagaatgcttttggcacttgatgcagaatttcatcaagaaatttcatggtccagtgtttgggaacatgtaccctacaactaggtcttacatgacagatagatatgagtattacatgaataaaattcatgaggcaaatccagatgtgaagccatatctagaaacttatcacatcctactttggatgaggagtaagttctcagaagagataaaatatgacttcatcaccaacaatctggcaaagtcatggaacaaatggattaaggatatgaaggatatcgtcctattacagatctcgcagatggcatcagagcaaagacaatggatctatttgcgagacggaggaagatag

SEQ ID NO: 96145 - DNA, 1933 bp, Oryza sativa
  Clone ID: PAT_MRT4530_9426C.1
cttcggtggaggcgcaccaccaaagtccccacgcgcctcaaactccccaacaagagaatgccagattatccactcctccgccttcctcccctccccctcccccttccaccatgattcggattaccacccacctctctcccaccctcaagcctcctcctcctctatccctccacccccacctccctctcctccgccgccaccgccacccctcctccaggcccatctccgtctccgccgccgccccgtccgacctcctcgccagcgtcgagtccgtcgcctccgccgcctccgtcctcgccgccatcgtcctcgtccacgagtcgggccacttcctcgccgccacctcccgcggcatccacgtctcccagttctccgtcggcttcggccccgccctcgcgcgcttccgcctcggccccgtcgagtacgcgctccgcgccatcccgctcgggggctacgtcggcttccccgacgacgacccggactccggcttcccgcccgacgaccccgacctcctccgcaaccgccccgtccccgaccgcctcctcgtcgtctccgccggcgtcgccgccaacctcctcttcgccttcctcatcgtctacgcccaggcgctcaccgtcggcgtccccgtccaggcgcagctccccggcgtcctcgtccccgaggtcatccccggctccgccgccgcccgcgccggcctcctccccggcgatgtcatcctctccgtccccggcctcgcaccggacccctccgttcctgtcctcgtcgacctcatcaaggcaagccccaacaaggatgtctccgtcaccgtctcaagaacagggccaggacccggcgaccggaggtccatcgacctcaccgtcgtgccggacaccagcgtcgacgggaccggccgcattggcgtgcagctctcgccctacttccgtgtcactcgcgtccaccccaacaacctggccgaggccaccgtcctcgccttgcgcgagttcaccgcattgagcgccacggtgctcgacggcctcaggcagacgttcctcaacttctcgcagacggcggagaaggtgtctggtccagttgcaatcattgcggttggcgcagaggtggccaggtcaagcgccgagggcttgtttcagtttgcggctgtgataaacctcaaccttgctgcaataaacttgttgccattgccagcattagacggtgggacgttggcgttgatccttctcgaggcggcccgtggtgggcagaagatcccccgtgaaatcgaacagaggatcatgtcgtcaggtatactggtggtactcatggttggcatgtttctgattgtccgcgacacgctcaatcttgacttcatcaaggacattttgtgatacttgggtgatgaaaacttggatcacagttagtgaagtcaaaagtttcagacattggttggcctctgaaaaggttagtagttgtgcaattgggattcatttgccccatttgttgggattgctctagcattctagcttcttatactgatcataggtccttgtattgttatctgaatgaagctctaatgttgcatttagtcgcatttctagatgaatgggaacactgaattgttgatatgtaaattgccccccttgtgaagcaaaaaaatagttgctttatactcgccttttttggattgccatttacaaccctgttaaaatcaaatcagattaaactaactagtcgattgctataaaatgtatcagttgctatggtatggtctcctattctgcacgatttttttaccaacaatctcaggtctgaaatttagctattaaatgttcagttttgctatacacctgatatatgcaacaagataacataaccggtgctctgtggcaatgaaacatttacacattaaacattggacatggaatactacgataaggaagaatgtggatcgcgggttata

SEQ ID NO: 96146 - DNA, 180 bp, Oryza sativa
  Clone ID: PAT_MRT4530_94270C.1
agagagagctccacctctcagcacttggaaggataggattccaatcagaatctaaacacagccacacaaggtcggtcatgctgaggagttgattgtaattaaggggacatggtcaatatggaggtgtaatttgtctctctgtttatggcaaggctgtattttgtataactgaccgggtac

SEQ ID NO: 96147 - DNA, 3118 bp, Oryza sativa
  Clone ID: PAT_MRT4530_94271C.1
atgagggcgggaatcggcagcggcagcggcggcggcactacgccggtgcggccgcgatgggggtctggtgtgacgacgccgcggtcgctgagcacggggtcgtcgccgcgcgggtcggaccggagctccgacgacggggaggagctggtcgaggtgacgctcgacctgcaggaggacgacaccattgtgctgaggagcgtcgagccggcggcggggggagcggccgtggcgtcgtcgtcgggtgcgtcgccgtcagcggtggcgccgccgaggcgggcggagccgcctggcggggtggcgtcgcggtcgaggtcgccggcgatgcggcggacgtcgtcgcaccggctgctgcagttctcgcaggagctcaaggccgaggccatggcccgcgcgcgccagttctcgcaggacctcaccaagcgcttcacgcgcacccagagcaccaccaccgccccgccgggcatcgagtccgccctcgcggcccgcgcggagcgccggcagcgcgcgcagctcgaccgcaccaagtccggcgcgcagcgggcgatccgcggcctccgcttcatcagcggccccaacaaggccagcaacgcgtggatcgaagtccaggccaacttcgaccgcctcgcccgcgacggctacctctcccgcgacgatttcccgcaatgcatagggatgacggagtcgaaggagttcgccatggagctgttcgacaccttgagccggcggcggcagatgcaggtggacaagatcaacaaggaagaactgcgcgagatctggcagcagatcaccgacaacagcttcgactcgcgcctccagatcttcttcgatatggtggataagaacgcagatggccatattacggaggctgaggtgaaagagattattatgttaagtgcttctgctaataaactgtcaagactcaaggagcaagcagaggaatatgcggccttgatcatggaggaacttgatcccgaacagcttggctacattgagctctggcaattggagacattgctattgcaaaaagatacctatgtgaactatagccaagcattgagctacacaagccaggcactaagccagaaccttgctggtctaaggaaaaggagtccaatccggaaaataagcaccaaattaagctactatctggaggacaactggaagcgcctgtgggtacttgcactgtggattgggataatggctgggttgttcatttggaaattcatacaataccgccaccgatatgtctttaacgtgatgggctactgtgtaacaactgcaaaaggggctgctgagactcttaagctgaatatggctattatcctcctgccagtatgccgcaacaccatcacttggttgaggaatacaagggctgcacgggcattgccgttcgatgacaacatcaacttccacaagactattgcagcagcaattgtggttggtgttatccttcatggagggctccatcttgtatgtgattttccacggctcataggttcatcggaggagaagtatgctccactagggaagtattttggtgaaactaagccaacatatttgaccctggtcaaaggagtggagggcataactggggtaatcatgcttgtgtgcatgattatcgcttttactcttgcaaccaggtggttccgccgtagcctggtgaagcttccaaagccatttgacaaattaactggcttcaacgctttctggtattctcaccatctattcatcattgtgtacatatcacttgtaattcatggagagtggctataccttatccgcatatggtacaaaaggacgacatggatgtatcttgcagtgcccgtttgtttgtatgtaggggagaggacactgaggttcttcaggtctggcagttattctgtccgtctgttgaaggtggccatctatcctggtaatgttttaacactgcagatgtctaagcctcccacattccgttataagagtgggcagtatatgtttgttcaatgtccagctgtttcaccctttgaatggcatcccttctcaataacttcggcacctggggatgactatctcagcattcatgttcggcaacttggtgactggacaagagagctcaagagggtgttctcagcggcttgtgagccaccagtgggtgggaaaagtggtctccttagagcagatgagactaccaagaaagccttacccaaattgttgattgatggtccatatggctctcctgcgcaagactacagcaagtatgatgttttactgctggttggattaggaattggcgcaacgccttttatcagcatattgaaagaccttatcaacagcatcatcaaaatggaggaagaggaagaagcttcaggtgatctttacccgccaatcggacgcaataaagcacatgttgatcttgacacccttatgaggattacctcaaaaccaaagagggttttgaagacaacaaatgcttatttttattgggtgacacgtgaacaaggctcttttgattggtttaaaggagtcatgaatgagattgctgaactagatcaaaggaatattattgagatgcacaactacctcacaagtgtttacgaggaaggggatgctcggtcagcactcattactatgctgcaagctctaaaccatgccaagaatggtgttgatatagtatctggaactaaagtccgtacacattttgcaaggccaaattttaagaaggttctttctaagatagcctccaaacatccttatgctaaaataggagtattctactgtggggctccagttctggctcaggaattaagcgatctttgccatgattttaatggcagatgcacgtcaaaatttgagtttcacaaggagcatttctaaaatcaggtaaatgccaaatagggaaataatagaagattgtgctacttgtatgacaccttttcttttacacgatgccttgttcacaatggaattaatagcaagggcgagaagcatagaggtgctatcacaacgcaccctcctggctacggccagtttgcactgtacacttcttgcttgagatactcagaagatacaataagagtgccaagataagagttttggggatcatctggtacaaaatatatacgacatcaatcatggg

SEQ ID NO: 96148 - DNA, 467 bp, Oryza sativa
  Clone ID: PAT_MRT4530_94272C.1
gggtgggtccgggtatttccggaccggttcccggtgggggggggggtttccttttggggggtggtgtggggggtgggggtttgggggggaataggggtttcgggggggaatggggtatgaggttaaaggtgcacaaaaaggggggcccggggggggggaggggaaaggggggggggcctaagggggggggtagcttaaatgaagggggtggggggggggggccggttttcaggggggaaacaaggaaggggggggggcttagggaatgggggaacccggggggggggggggtttgccttttgggccccggggggggtggggttttttccatttagacgggaaaaaggggattggctttagccccctgcccctttgagagttggggaaaacatcccaccctagtttggttcagggggggaaaaaccggggggttggtggttaaccgccgaatataaaaagaaatattt

SEQ ID NO: 96149 - DNA, 2782 bp, Oryza sativa
  Clone ID: PAT_MRT4530_94273C.1
ggcacgagcccgcgacggctacctctcccgctccgacttcgccgaatgcatcgggatgacggaatcgaaggagttcgcgctcgagctgttcgacacgctgagccggcgacgacagatgaaggtggacacgattaacaaggatgagctccgcgagatctggcagcagatcaccgataacagcttcgactcccgtctccaaatcttcttcgaaatggtggataagaacgcggacggccggattacggaggcggaggtgaaagagattattatgttgagcgcgtctgccaataaactgtcgaggcttaaggagcaagcagaagagtacgccgctttgatcatggaggagcttgatcctgaagggctcggctacattgagctatggcaattggagacacttctgttgcagaaagatacctatatgaactatagtcaggcccttagttacacaagccaagcactgagccaaaatcttgcagggctaaggaagaagagttcaatccgcaaaataagcacctctttaagctactatttcgaggacaactggaaacgtttatgggtgcttgcattgtggattgggataatggctggactgttcacctggaaattcatgcagtatcgtaaccgatatgtctttgatgtgatgggctactgtgtcacaacagcaaaaggagctgctgaaaccctaaagctgaatatggcaattatcctcctgccagtatgccgtaacaccattacttggttgcgaagtacaagggctgcacgggcactaccttttgatgacaacatcaacttccacaagactattgcagcagcaattgtggttggtataatcctccatgcagggaaccaccttgtatgcgattttccacggttaataaagtcatcagatgagaagtatgctcctttgggccagtattttggggaaataaagccaacatattttacattggtcaaaggagtggagggcatcactggggtaatcatggttgtatgcatgataattgcttttactctagcaacccggtggttccgccgtagcttggttaagcttccaaggccatttgacaaactgactggcttcaatgccttttggtattctcatcatctgttcatcattgtgtatatcgcgctcattgttcatggagagtgtctataccttattcatgtctggtacagaagaacgacatggatgtatctttcagtgcctgtttgcttgtatgtaggggagaggattctaaggttcttcaggtctggcagttattctgtccggctattgaaggtggccatatatccaggtaatgttttgacactgcaaatgtccaagcctcccacgttccgttacaagagtggacaatatatgtttgttcaatgtccagcagtgtctccctttgaatggcatcccttctcaattacttcagcacctggggatgactacctcagcattcatgttcgacaacttggtgattggacacgagaactcaagagagtatttgctgcagcttgtgagcccccagcgggtggtaaaagcggccttcttagggcagatgagacaactaagaaaagcttacccaagcttctgattgatggaccgtatggttctcctgctcaggattacagcaagtatgatgttttattacttgttggattaggaattggtgcgacaccctttattagcatattaaaagatcttctgaataacatcatcaaaatggaggaagaggaggatgcttctactgatctttatccaccaatgggtcggaataacccacatgttgatctgggcacacttatgacgattacctcaagaccaaagaagatcttgaagaccacaaatgcttacttttactgggtgacacgtgagcaaggctcttttgattggttcaaaggagtcatgaatgaaattgctgacttggatcaaaggaatatcattgagatgcacaactacctaacaagcgtctatgaggagggggatgccaggtcagcactcatcaccatgctccaagctctgaaccatgccaagaatggagttgatattgtctctgggacaaaagtccggacacattttgcacgaccaaattggagaaaggtcctttctaaaatttcctccaagcatccatatgccaaaataggtgtattctactgtggagctccagtcctggcacaagaactaagcaaactttgccatgaattcaacgggaaatgcacaacgaagttcgatttccataaggagcatttctgaaatcaagtaaatacttgaggggaaacaaggatagattatgttatgtgtatagcatttttgtcttcgtatattcttcattataatggacaggagatagcaaggtgaggaagcaagcatatagttagcccaacagttcttgctaccaatcaataaaaggagcaacaacaagagtgatttgggataatcatataaatttgtgcgatgtccatcatggcttttgcagcatgtcttatgcagtcatgaatgtacagagctcacttgaagaccttgagcttcttctgattttagttgagattataagtaggatggtatagcacataggaaggtcacaaggctaattaactgtatattattcatgcagctgagtgtctggctaaggccagaagcacgttttacttttgtatttatacataacagaaaacgagaaaaaaaaagtgaaaagggaaaggtatactcgaattgagtgtttgtaatctgtaatttatacagtgcattggcagttttattggctccaggttgggcgcaccgcgcaccaaccacatc

SEQ ID NO: 96150 - DNA, 919 bp, Oryza sativa
  Clone ID: PAT_MRT4530_94274C.1
atgccgaagtgggaggagatggaagccggcttgattgagaggggtatcgaactggccacttctaaatggcccgatcgatcaaagttatggttctatgctcacggtggaaagctcaaacctgttgatggctccctggtgttcagcaatcagatacgtgaggctgccagtcgactaacggacgcagtggaagcctcttctcagggcacattccgacccgacagagagaaggatgagctgacactcgccctacagactctcgagcatccaggacgaacacgagggaaaggcgtggttccttggaagattggattcatggaggacatccatacgtacaggagtcggatgaggagcaagagaaatactgaggcaaaaattgcagatcttgagtacaaggtatcgaactacgagcttagcatgcaagaggaggtggcaagaaaggtggatgaacgcatggccgcatatcggagccaggatccccagccatacattcctcctatcatggtcagcccctcaggcaatcgtagtagctgtgcctcaacggggcaggtaggatcacagagcatggacgccatgcaaactcaggacgaaaccacctgccccattgatgaaatcacgccgattccaccaagatactcgagggtcgaagttgagctggtggaagccgcgtacgaggacctcaagttggactaccttgaaggagacgtgctacatcatccttcttgggaaacaagcgacgtctcctgcaccatctccttcggctctgccatctcctccgcctcctccgcctcgtgcaccgtctcctcctcaggctcctgcaccgtctcctttggctcgtgcaccgtgtcctctggcaccttccaagtcaaggtctcgccaagctccaccgcctgcctgcacaacggcaacgcagaaggcgaaa

SEQ ID NO: 96151 - DNA, 3025 bp, Oryza sativa
  Clone ID: PAT_MRT4530_94275C.1
ctgcagaggcgagacgccgagagggcgaagacctcctcagccgcaccacccacaggacgtgtcgtcgttgctccagaagtccggccaaggtgaagagaaaatgggagagagaaagagagaagcgagagcgggaggaggaagaaggatggagatagagaggataatagtgggctccacagaggaggaggctagtggaagtcaaccctccgctggacagaagagggcatgccgaaaacgaggtgccgtgaagaagatagagagtcggcacatcataactgaagtgccacgtcagatgtagccaggaattacgtacgacacagctgttgggttgtaagggataacgtgcctattagcaaagtgtactagcgcagaacaagggcacgcagggattatgacgctttgtcgtggattcagagaaagagatgctgtggaccacaatgctcgagacattcacgctccctgcgggtacggagaacatagtgaaacagtggactcttagcaaaatggcagaacagttctagagcttcaagggagatctctaccataaatacatcctaaaggggcagacaccgaacttcaacatattctcgaagctaagggatcattgggatgagtttgttgcttacaagacagggaaacaagggcaagcgctgatggaccgaaacaaagaaaatgccgctaagaagaagtaccatcaccacctgggtcaggcggctatagcgtcgcaatgccgaagtgggaggagatggaagccggcttgattgagaggggtatcgaactggccacttctaaatggcccgatcgatcaaagttatggttctatgctcacggtggaaagctcaaacctgttgatggctccctggtgttcagcaatcagatacgtgaggctgccagtcgactaacggacgcagtggaagcctcttctcagggcacattccgacccgacagagagaaggatgagctgacactcgccctacagactctcgagcatccaggacgaacacgagggaaaggcgtggttccttggaagattggattcatggaggacatccatacgtacaggagtcggatgaggagcaagagaaatactgaggcaaaaattgcagatcttgagtacaaggtatcgaactacgagcttagcatgcaagaggaggtggcaagaaaggtggatgaacgcatggccgcatatcggagccaggatccccagccatacattcctcctatcatggtcagcccctcaggcaatcgtagtagctgtgcctcaacggggcaggtaggatcacagagcatggacgccatgcaaactcaggacgaaaccacctgccccattgatgaaatcacgtagcggacaccatgtgagctgtatattcccttcaagaacttatcaatcaaggtggcgtcgggaatggccatcccaacggacccttcagggacttaacactgcaggccgattccaccaagatactcgagggtcgaagttgagctggtggaagccgcgtacgaggacctcaagttggactaccttgaaggagacggtgatatgcatctacgagacacaagccaaaccattatactatggcgcaagtgctacatcatccttcttgggaaacaagcgacgtctcctgcaccatctccttcggctctgccatctcctccgcctcctccgcctcgtgcaccgtctcctcctcaggctcctgcaccgtctcctttggctcgtgcaccgtgtcctctggcaccttccaagtcaaggtctcgccaagctccaccgcctgcctgcacaacggcaacgcagaaggcgaaagttgatgccgccgaaaacaaggagccgccgtatgattgcacacaagaggagctagacgcttatgtggcagcagaagtgaagaggcaattaaaacctcggagtccagaaaagaagatacctgtagacccaagtgtcaagaacttcttcaagaaaatgttgaaactagtcaaggaggtcttaaagctaatagactacgagcgaacacttaagaaggcatattataggaagtccaaaccagtccctcagcttggcgagcaaccaaaccaggaggtcgagccgttggtgaccgggcaagaaattggaataaaagaattcatttctgacaccggactaactaggactcagttgcttaaaggcgcatcaatcccaacggtggaagtgaaatactagttcgaactcggtaaaccgcttgtcaagcctgagcagctaaagtccctactgacacatatgtaccgattccatgaacagtaaatggaaatgattgccaacggtagagaggtgatcggaacgaggatcagaacgtccaacttcctgcaaggagaagatgttctctggatcccgttcgacatctctcttctaagcgcatggattttaattgagattcaaagggcccgatggcggggggatttcgatactggattcatcgaccctcggaaagttaacatcgaaatgatcatgtatccgaaaaacacagaggacactcttgtccatctcctgaaggagcagcatttcaagacattcatactactgccgtacaacacagaattccaccgggtccttttacttttcgacttggaggctagcagagtcaatgtctatgactcaatgaataaagatgagtctacttttgaccaagtttttgaacttatagacagggcttaggatcagttccgtcaattggtctgcggttcttggaaagaaaaacttagccggaggttcaattttccatgtgcaaagcagagccagggaactaacttgtgcggctactacgtatgcgagtatgcccactgcctttcaacccaaatctacaccacaagagagcccgatgttattcacatgagagacaacctaacacacaaggaatttatcgcggctgttcaagaacaactgatgggattcatcaatgaacaagtccttgatcccgagggtgaattctactacgacagatcagcaattcataagatcattccttcttcttctgagataacaccgatgtcgaagccg

SEQ ID NO: 96152 - DNA, 530 bp, Oryza sativa
  Clone ID: PAT_MRT4530_94276C.1
aagggggggggattctcattgccaacttattttttaggggttaaatcttccaaaacaggatactttacccgagcaacagagagggcccccccaaaaaaacccaacattatggggccccacaaaaaacacagggggaatgggcccacatttttaatccccttttttgggaaagcccacaggcgaccaaaggctcaaaaaaaacttgatatctccaaacaggggggctgggaaactctgcccatcgttttaaggaaacaatggggggaaaaggggggaaccaacttttggccaaccaaaaacattttaaggggttcgaggggaacttctaaacaaggggggggggggcgggtaccaaaaatggagcgcccttaaccagttcctccttaattataaaagggggggcggaagcaaaaaccctttggccgattttggggcccattcctttataaagccccgacaaaccttaaaaacggattatttttgggaccgcataaaaagggcctttggaggggggcccctggaaacaaaaa

SEQ ID NO: 96153 - DNA, 728 bp, Oryza sativa
  Clone ID: PAT_MRT4530_94277C.1
ccggccgggagaacaccgctcccgcacctccgccatcaccgctccgctccgtatcagccgccgcgccgtcctctgcatcgcctgtcctccgccaccccgccgcacgaggtgctcccgtcgccaggtagccgccgcgccgtcatctgcatcgcctgtctccaccgatcccctccgcacgaggtgctcccgtcgccaggtcgccgccgacgccttccgcggtgatccgatctgccatcgaatccccgccgccggctcgtcctccaagatccccatcggcctgtcctccgcctcctcgccgcacgaattcctcacgtcgccaggtcgccgccaccgatctgctccaccgatccccgccgcacgaggtgctcccgtcgccaggtcgccgccgacgccttccgcggtgatccgatccccgtcgcctgtccgcggtgatcagaaatttcatcgcagcgcctccgccagggcagagcagttgagaaggtagaatctccaattcaaggggctctgcgccttgttcctcaacaagagaagggctaaactgaattggagaaagatgttccgaagtactgtgataagaattcaaatagtgtgaagtgcaggaaaccaaggaggtatcgcttactactaattcgctcttcaacataacctggtgcttatatattggccatgggttttgtacatatatagtaatcaagatttcataatccgagtatagaagaaaccttgct

SEQ ID NO: 96154 - DNA, 388 bp, Oryza sativa
  unsure (1)..(388): unsure at all n locations
  Clone ID: PAT_MRT4530_94278C.1
tgatcgattctttccacggtttccatactacacgaatggatcgacacgtcttgcagggcggcagcgccaacaacntcaccaaagcacttggttgttcatagtatatcaaccaataaaaattggatgcaaacggatattattaacaagatatttactatccacgctattatgagcatggtgcacatcgaatagcacttctacctatgcttatgaacaaggaatgtaagcatgaagtgaaagcagctcttaaatgacagtataaacatgaggcacaaatttatctaccatccggaagaaaaaacgtatcctctaaatatacaaggcaactagattgcggaccaacactcctgcttataaaacacgacgatttgccataatccaattattt

SEQ ID NO: 96155 - DNA, 464 bp, Oryza sativa
  Clone ID: PAT_MRT4530_94279C.1
gcgtctgtttggtcggtctggatttcgatttaccccaaatccaccgcaggagccaagtcgccgtcagtatgcgaagtggagatggcccgtacgaagcagaccgcccgcaagtccacctgcggcaaggtcccgaggaagctgctcgccaccaaggcggcgtggaagtctgctccgaccaccggctggtgtgtagaagtcccaccgctacaggccggggtcggtggttctccgctagatccgcatgtactcagaagagcacggagctgctgatccgcaagctgcctttcgagcgcctggtacgcgagatcgctcaggactgtaagaccgacctacgatttcagagccacgcggtgcttcgcctacatgagggccgcctggcctacctcgtcggtctcttggaggacaccaacctatgtgccatgcacgccaagcgcgtcatcatcatgcccaaggacatgcagctc

SEQ ID NO: 96156 - DNA, 492 bp, Oryza sativa
  Clone ID: PAT_MRT4530_9427C.1
atgacgcacccctctgggacgcccggctatattgaccccgaatgtgtgatcactggtaaagcaagtgccgaatctgatgtctacagttttggggttgttttattagaagtggtatgtgcaaggagaccaatgagtctactggatgatcaaaataatggtctcttccgactagtcgagtgggtctgggatctatacggccagggagccattcacaacgcagctgacaagcggctcaacaatgactatgatgtggttgagatggagcgtgtcattgctgtcgggctctggtgtgcgcatccagaccgatgccagcggccatcaatcagagctgctatgatggtcctccagtccagtggaccaatgccgatgctaccagccaagatgcccgtggcaacatatgcaccgccggtggcctcatcggaggggcagctctcgtcatcgacgggtatgtcatcatcaagtttgacacaaacagcaatcacacctcgttag

SEQ ID NO: 96157 - DNA, 210 bp, Oryza sativa
  Clone ID: PAT_MRT4530_94280C.1
aatacactggggtttatatcaattttgaataaactgatttaacaaaacttgccggattcatttaccattttatcataccagataaactaacacacacacacacacacactcattttctcttccatgaagctccaatatgcatgtttgttttgttccatttttctaccaaaattcattttgtagtgcattccctaagacccaacgatcccc

SEQ ID NO: 96158 - DNA, 383 bp, Oryza sativa
  Clone ID: PAT_MRT4530_94281C.1
tcttaaaactacagtgttggctgccaatggaagattgtatgtgtgcgaagcttggttcttgcaatctatggcagggaattagattctggctatatatgcatccgaaggtctcttcaaaggggtttatgttgaatttcttgttctgttctttcttctgggtatgccagtatctctaatactctattgttgcaggactttttgcgccaaagcaataccggatagttactatggcaagtatttggcatccaagctgcacccttgtgtctctttggcatccaagagcacgaagacattatgtgggatgctttccagcgttcaggttgttacaaaagtcaatgccaactttcatctgttaaacatatgaaatcagttacattaaaaaa

SEQ ID NO: 96159 - DNA, 486 bp, Oryza sativa
  Clone ID: PAT_MRT4530_94282C.1
atgggcgtcacaccctttcgtggaggccatcgtggacgccatccaaggaacaccaagctcggggacaaccggaccatcatggactccatcgatgacaacacgaccgtcgcggacgccatccagggaacatcaagctcaccgacacccatgctgctgtggacaacgatcgcctcacccacaggaatgcccaagcttgccgatgtccatcccgtcatggaaagcgattgctccatcaagctcggcaatgctgaagtatacaacaaggagcggcgtcctcggccccatgatagctggatctgcgccatccccgccgagaatgaccacgaggaggaggcggccaggagcggcaccggccggatccgcgccgcccccgttgatgacgatgaggaggaggcagccgggagcggcgccgccggcccctcgcgcatgcacgccggccagatccgcgccgccgccgccgccgccgccggattcctagggttttga

SEQ ID NO: 96160 - DNA, 364 bp, Oryza sativa
  unsure (1)..(364): unsure at all n locations
  Clone ID: PAT_MRT4530_94283C.1
canggggggacattataatctattggggggtttttaaaaaaaaaagggaaatatgtattgatattcccatacccgcacatggaactcccagccaagcgactaccctgagagttttttggaccacccatacctatcaattcatattagccagggtttgccctactgaccgccaatcaaatttttttttgggtgaaaccatggagatggagacaacaacaaaccccgctaaggctaaagggggggagaccaccacattcacggggggcgaccacaaaaaccggtccacgcgacaccccctgtttgcatgggcaatggccgggtaaagcgagaggtataaatccatcctgctcaggacgctggggag

SEQ ID NO: 96161 - DNA, 740 bp, Oryza sativa
  Clone ID: PAT_MRT4530_94284C.1
gcatatccggccgcttttttttttttttttttgatagaatgcgattatatatcatggcttataagcttattagaaatacaaagtgtcgtaaacaaacatgagagatggccggcacactggtttggatatcatgatatccaacttatttatgactactccagggcagcatatatagccttgcaggggattcaaagtgcgaattcaagtcccttatgcttgcatgatgcagttgtttaggaaacgatagtgacaatatcagcttccttgttgcagaagtggtagcatgcttcgttgcaacgttccacagcaccgttcccttcttcgttgccagcaaaagtgtttatgttgctgcacacggatgaagtacatcccagcatacagaagtcaagtacatccaattcctcagactcagggtgaagggtgtggtgaatgtaaggtggcttgcatttcccatcaacaattttacagccagagagtttagaacatctttcccttgtgccatgcgcaaaacggcatgcattatagatgtttcttgccgtggtggttgggcagcagctctttgctcccaccttgatcgtctcttgctgcaggactaagcctagcaccagcacacacatgatcaaactcttcacacctttcatgttttctagcttcttttcatcgagatttagtcgaggagattagcaaagcaagaggctaagagacggtactactttcttccactcgtctcccggccgggg

SEQ ID NO: 96162 - DNA, 389 bp, Oryza sativa
  Clone ID: PAT_MRT4530_94285C.1
aaaacgaaccttaaaaaatcttttgggagaaaaaacagggttaaaccctaaaattcagcaggaacccgggcccgaatatttccgggggggcagggcccccccgctaagggcccccccaaaatccgaaaaaaaaggggtataaaaaagcccatcccccaaggggccccccgctacaggggcaaaacggggaacaaaaactttccacgcaaagaacaaggtttaaacggggggctaaattacggggatatttgctaaacgggggccacaatttgggcaggctgcaccacgggggccccccccaggggcgcagcatacggggggggcccatcctgggacaacaagcacatgaggggggccccaagggagccccagaagttgccgaagagggc

SEQ ID NO: 96163 - DNA, 181 bp, Oryza sativa
  Clone ID: PAT_MRT4530_94286C.1
gcagcatcaaatcactcccaaatcagttgctgattggatttaatttgatcctaattgcgttgcaggggatgtcacggagaagttcttcgtggcgaccaggggattggggatcgagctgctgcggctgctgtgcgagggatgggctcagccgactattcaccggactccgcgcattatataa

SEQ ID NO: 96164 - DNA, 255 bp, Oryza sativa
  Clone ID: PAT_MRT4530_94287C.1
atgtcgatcgttgtggcaccgtcagctatcggcgtgctggtcatcgtcatcacaggtggagtgagagtgagagaagaacttagctcggctagatccggagctgtgccaaaccagccgtcgctgctgagcctcaccgccctctccttccttctccgaatcccggggacggcggacgtgatcctccggtctcacctgcagggacagaccagggacggcaggctgattaactgcgcccaagatcgagaaatttggtga

SEQ ID NO: 96165 - DNA, 477 bp, Oryza sativa
  Clone ID: PAT_MRT4530_94288C.1
atggcgttggtggcggcagcagcggcgaatcagaagcagcagaaggcgtcgatcgggagacgagcgtggcgactgctgcgcctggcggtgctctgggcgaggaagggcagcgcggtgcacagcctctgcctgttcagcaacctgcggcgcgccggcgtgggcctcggcgtcgtcggcggcggcggccgcagcgagcgcctgcgcggcgtcgggtgctacgactacatcgagaacgacgtgctcaagacggagcagattgttcaggttggacatggcgctagaggggatgtgaccatcttgccgacgctggtgatcaacaatatgcagtaccgggatttgttttgctacgactacaatggcgagccgagtgagtgcggcggcgtggaggacgagtgcttccgcgacggcgcaatggacgagcagctcctcgagctgtccatgccgacgcccgcatccgcccggcgctccgcacgctga

SEQ ID NO: 96166 - DNA, 204 bp, Oryza sativa
  Clone ID: PAT_MRT4530_94289C.1
atggcggctgacgaggaagacggtgccggagccatcaacttccgccgccgccgccgccgccgttcgctggaactgcgccgcctcgtgcctctaaccctctcttacacattgcggcccacaaaagcggcggcggcgccgccggctgagcgtgtaccggcggcggggcacaaggcgatgatggctgccggcgacgagggcgagtga

SEQ ID NO: 96167 - DNA, 222 bp, Oryza sativa
  Clone ID: PAT_MRT4530_9428C.1
atggctgacccggcccggattccgcggatccgaggccggattcggcggcgatttgcccgcgggggtgcactggatcgcgagggcttcagcaagctctgggttgacaatcatgggtatatgctcattgctgggatgtgtggtgtcatcatagctggaagcccgtcagaaggcaatgatgtgccgccctccgaacatttattttcgtcttccctggcgtcgtag

SEQ ID NO: 96168 - DNA, 1266 bp, Oryza sativa
  Clone ID: PAT_MRT4530_94290C.1
atggcttctcgcaagtcgctacgacgatcggcgctgctccaactcccttgcggctgcttcgcggagacgagggttgtgctcgatgagaagacggagcacctccagctccctcccacgagaactaggtgccatgatgaaaattcggtttatgccaacttattatctaacataggcttcaacacaggactagaagtttgcaaggctagctatactgtgagtttagcttatggaggtgcattgaagtcagactttgccatctgtggtatctggtttttgaaaatcaaatgttggccagtcctacaattcactccagaattctgtacctatgtccaacaaggtctcttgcgaaatcctttaacattgatgttttcctgtttgcattttcctagccatgctgccatttggaacactgtattaggcatgatcattgcgtgggtcggggacaaacaacaactgtaccgcaataatattttgggcatcaatttctccaggacgagctatatgcataatgcatctctgttgttatatttcccatgggcattttcgcatcgtcagtgttcctgcattggcctgcttggtgttgattcacgacagcgaaaaatactccctagtccctacattagttcttcacagtgtgacttggaaaggacaagtacgagacctcttggcagaggcttggttaaaattcttgctttgctgaaggaagaagatgccaatggtccaacctgtgactgtcacgatgacaaaacgcattgccaggaatggataatttttctatctaagctaccagaaatcattgtgttctacttttgtgtgtcatgtggaggaactttggggcagcaaagcgcaaccttttcagagctttgcatagctgtggttgaattctttgtgaaaagaaagcaaaagatgataactgttccctttagaaacacatttcctgaaacatttgttgactgggtctaccacattcgagcagacgctatcagttcaatcaacaaactgcccaaacatatttgtatacaacatctcatatcctcacagaaagcagctacaggtgcagattatactaatgcaaaatatgattgtttggagcaaagctacaggcatctgcatgtggacgtggatctcagaagtgtcattggcttaagcaacactgcatttagaaaatgtttactactgggaattcacaatgacagtgacgtgaatgagctgacaaggaatctggggtggtctgatctcacttgcgtatttttaaaccgcgattaa

SEQ ID NO: 96169 - DNA, 633 bp, Oryza sativa
  Clone ID: PAT_MRT4530_94291C.1
atggcgttggtggcggcagcagcggcgaatcagaagcagcagaaggcgtcgatcgggaggcgagcgtggcgactgctgcgcctggcggtgctctgggcgaggaagggcagcgcggtgcacagcctttgcctgttcagcaacctgcggcgcgctggcgtgggcctcggcgtcgtcggcggcggcggccgcagcgagcgcctgcggtacggcgagccggagtactcgatcgaggagacgccgtcggcgcgggtgctctgcctcatcccctgcatcgcccctgctgtactggacacgcccgggttctacggcgacgaggaccgctacttcttctgccgctgggacacggagcccgagtgcagcagcgtcgggtgctacgactacatcgagaacgacgcgctcaagacggagcagattgttcaggttggacatggcgctagaggggatgtgaccatcttgccgacgctggtgatcaacaatgtgcagtaccgggatttgttttgctacgactacaatggtgagccgagtgagtgcggcggcgtggaggacgagagcttccccgacggcgcaatggacgagcagctcctcgagctgtccatgccgacgcccgcatccgcccggcgctccgcacgctga

SEQ ID NO: 96170 - DNA, 612 bp, Oryza sativa
  Clone ID: PAT_MRT4530_94292C.1
atggcgttggtggcggcagcagcggcgaatcagaagcagcagaaggcatcgatcgggaggcgagcgtggcgactgctgcgcctggcggtgctctgggtgaggaagggcagcgcggtgcacagcctctgcctgttcagcaacctgcggcgcgccggcgtgggcctcggcgtcgtcggcggcggcggccgcagcgagcgcctgcggtacggcgagccggagtactcgatcgaggagacgccgtcggcgcgggtgctctgcctcatcccctgcatcgcccctgctgtaccgaacacgcccgggttctacggcgacgaggaccgctacttcttctgccgctgggacacggagcccgagtgcagcagcgtcgggtgctacgactacatcgagaacaacgtgctcaagacggagcagattgttcaggttgttagaccaactgaccagcttgatgctgaaaaatgcaggattttcgatttgttttgctacgactacaatggtgagccgagtgagtgcggcggcgtggaggacgagagcttccccgacggcgcaatggacgagcagctcctcgagctgtccatgccgacgcccgcatccgcccggcgctccgcacgctga

SEQ ID NO: 96171 - DNA, 405 bp, Oryza sativa
  Clone ID: PAT_MRT4530_94293C.1
cgaatattgtttttatcatcgatttgctgctcttttatttttgttaccaccctttaagtgtgcaaagaaagaaaataataagtatcagacaattgattggtatatacagttacactatcgaaaagtccaaaaggttatcagaaaagaccatcctagtgttattctagaaagaacctacaggaagctagatttcaatgtgtccaaagtagaatataggagagaaaacaacatgacattagaatatacagttagattatctgaagatgcctcattgttcaaaagataatggcagaaccataccgtgtaaaatttctagctaagacagacaagatacagaattactatacaattcgacatgtcgttttctttcaggaatgctattcaatttcagcttttaggtgacta

SEQ ID NO: 96172 - DNA, 326 bp, Oryza sativa
  Clone ID: PAT_MRT4530_94294C.1
atgcagctcaacccgaaagcaagaactcgtcgaaataaaactaaagcaaaaagggtggcgatgcgccgagattgtattgaacgtgactctatccatacgtggcaatcatcttgaagcatatcgactcaacccgatgtcgtacaccaagtcgcattgtcggaatcggctgtatcacttaacccagtctgactcggacttagccgatcccaatcatagcagatccggactccagccgattcttactctatttccgcgatgatcctcatctttgattccgcttcgattcaatctttttctccgatactaatattaccaaatttggtcgt

SEQ ID NO: 96173 - DNA, 2541 bp, Oryza sativa
  Clone ID: PAT_MRT4530_94295C.1
atggtgagttcgtcgaagacggcggccaggaaccctctcggtggaaacgcgatctcggagaaactctccaaatcaaaccatgtgctttggaaagcgcaggttctagggttcctgctctccactctagccagggacgttctggcgcaagtggccacctgcaacacggctacagcggcatggcaaatgctggaggagatgtactcctccgtctcgagggcgcgcttcatcaacacccgcatcgccctctccaacacaaagaagggcactctctccatcaacgagtatgtttccaagatgaagactcttgctgatgagatgacggctgctggcaaagtcgtcgatgatgatgatctcgtcttgtacatcatcgccggcctcgacgacacgtatgaaccagtcatctccaccatcgtcggcaaggacttcatgaccctgggagaggcgtactcccagctgctcagttttgagcagcgtctcgcgcttcgtcacggtggagatgcatctgcaaatctggcgaaccgaggacgtggcggtggtggaggacagcaacgcggcgacaatgctggaaacggacgtggtcgtggcaacaacaacaatggcgccaaccgtggcagggggcgcggcaacaatggcggcgcgcgtccaccgggaggtgtcgacaacatacccaagtgtcaactctgctacaagaggggacacacggtaattaattgctggtatcgttacgatgaagattttgttcccgatgaaaaatatgcaggatcagcaacttcctatgggattgatacaaattggtacgtcgacaccggtgcgactgaccatgtgaccgcgaactggacaagctcacagttcgtgaccgctacaaggggcaagatcaagttcacaccgcaagcggtgcaaggtaaaagtcatcaatggccatattctagatcttctagtatgtcaagttatcctttggaacttatttattctgatgtttggtgtcctgccctcacctctgttgggggcaaacaatattatcataagtctgaagttgttcaaaaatttcatgagttccaagctcttgttgaacgcctgttcaataggaaaataatagccatgcaatccgactggggagcacctaatcctggggaacaacagttagatgacaatatggctaatattcctgctaaccctgctgatcagttttttggaagcaatgtgcagcctgtttctgcagaaaatgatgaaccagacgatccttcatatgccacagaagatccggccgaagaaatccatccggaattcagtgcagctgcaaaagaatcggcgtcgggatcgccgcctgcatcagatgctgccgccagccattctagcgctgccacgtctccggatgtggctatggatatagagtatgatgctttgatgaataatgaaacttggcacttagttccacctaggcaaggtagaaatgttatagactgtatagattatgaagacactttcagtccagtagttaaggctgctactattaggattgttctgtctattgctatgtctatggggtggtgtatgagacaactagatgtacagaatgcttttcttcatggtttccttgaagaggatgtatacatgaaacaaccaccaggatatgaggataagtcctttccagactcaagacaggaggcagtgtcagctcttctgcaggatttgaaaaaggagtttgccttgaaggatctgggagatcttcattacttccttggtatagaggacaagtatgcctgtgatctcttgagaagggtaaatatgtttgattgcaaaccagtaagtacaccattgtctactagtgagaaattatctgctcatgagggtgacttactagggcctttggatgcaacaaattatagaagtgtagttggtgctctccagtatctaaccttgactagaccagacattgcttttccagttaacaaggtttgtcagttccttcatgcaccaaccactattcattgggttgcagttaagagaatcttaagatatttgaaacattgtactaaacttgggttgaagctatgcaagtccaagtctatgcttgttagtgcttattcagatgcagactgggcaggatctcttgatgatagaagatcaacagggggttttgcagtttttctgggagacaacctggtatcttggtgtgcacggaagcaagctacagtttccaggtctagtactgaatcagaatacaaagctcttgctaatgctacagcagaaatcatgtgggtacaaactttgttgacagaattacaagtgcaaagtccacctatggcaaagttgtggtgtgataatctaggagctaagtatctttcttctaatcctgtttttcataccagaactaagcatatagaagttgactatcattttgttcgagaaagagtatctcaaaaattgttagagattgattttgtacctacaggagatcaagttgctgatggctttactaaggctttgcctgttagacagttagaaaattttaagcacaatctcaacctaggaaggttgtga

SEQ ID NO: 96174 - DNA, 326 bp, Oryza sativa
  Clone ID: PAT_MRT4530_94296C.1
atcggttaaatgctagtatttatttcctttttttctcacctttacaaacctgcaaactcatttctgcaaagaaaaaaaaatgaaaatatgttgcagagtattcctaatttcctactacacccttcgtccaaaaaaaataaatctagcactagatgggacgtattctagtacaataaatttagacagagatattccagattcggtatactataatatggcatatccaaatatgtttagtttcgttgtattatgatggggactatgttggttttttatttgacggagggtgtatgatacccgaaagaagagaaaacacactgaatttc

SEQ ID NO: 96175 - DNA, 4344 bp, Oryza sativa
  Clone ID: PAT_MRT4530_94297C.1
atggcgagttcgtcgaagacggcggccgggaatcctctcggcgggaacgcgatctcggagaaactctccaaatcaaaccatgcgctatggaaagcgcaggtcatggcggctgtacgaggagctcgccttgaggggcatctcaccggtgccaccaaaactcccaacgccctgatcacgacgacagcaggcgacaagggagagaaagaagtcactgttcgcaatccagaatttgatgattgggttgcaaccgatcagcaggttctaggattcctgctctccaccctagctagagacgttctggcacaggtggccacctgcggcacggctgcagcagcatggcagatgctggaggagatgtactcctccgtcacgagggcgcgcttcatcaacactcgcatcgctctctccaacaccaagaagggcactctctccatcaacgagtatgtctccaagatgaaggccctcgctgatgagatgacggctgccggcaagatcgttgatgacgatgatctcatctcctacatcatcgccggcctcgacgacacgtatgaacctgtcatctccaccatcgttggcaaggacaccatgacgctgggagaagcctactctcagctgctcagctttgagcagcgtctcgcgcttcgtcacggtggagactcttctgtcaatttggcgaaccgaggacgtggcggtggtggaggacaacaacgcggcggcaacaccggcaacggcggccgcggccgtggcggcaacaacaatggcgctaaccgcggcaggggacgcggcaacaatggcggcgcacgaccaccgggaggcgtcgacaacagacctaaatgtcaactctgttacaagaggggacacacggtaatcaactgctggtatcgctatgatgaagattttgttcccgatgaaaaatatgcaggatcggcaacatcttatgggattgatacaaattggtacgtcgacacgagtgcgacggaccatgtgactggcgaactggacaagctcacggttcgcgatcgctacaaggggcaagatcaagttcacaccgcaagcggtgcaggtatggaaattagtcatattggtcattctactgttagaaccccaaatcgtgatattcatcttcgcaatatcctatatgttcccaatgcaaataagaatcttgtttctgccaatagacttgtctctgataattctgcttacatggagctttactctaaatattttaatcttaaggatctggccacgaagaaacttctgtttaggggaccatgccgggggcgactgtacgctcttccatcttcatcacctcatgaacgtcctcgtcctctaaaagaagcctttggagccatcaagccatcctttgagcgatggcacagtcgcctgggtcatccagcctctccaattgtggagaaagtcattagcaaaaataatcttccttgtttagctgagtcaaataaacagtcggtttgtgatgcatgtcaacagggtaaaagtcatcaattgccctattctagatcttctagtatgtcgagtcatcctttggaacttatttattctgatgtttggggtcctgccctcacttctgttgggggcaaacaatattatgtgagctttattggtgattatagtaaatttacttggctttatttgattaagcataagtctgaagtcatccaaaagtttcatgaattccaagctcttgttgaacgtttgtttaataggaagataatagccatgcaatccgactggggaggtgaatatgaaaaacttcactccttctttacaaagataggaatcacacatcacgtttcttgtccacatactcatcaacaaaatggctcagctgaacgaaagcatagacatatagtagaagttggtctcacccttcttgcatattcttccatgcctctaaaattttgggatgaagcttttcaagccgctgtgtatcttattaataggacacctacaaaactacttcagttcctcacaccgcttgagcacttgtttaatcaaaccccagattatagttctctccgggtgttcggctgtgcttgttggccacatctgagaccctataatacacacaaacttcagttcagatcaaagcagtgcacttttttggggtacagcacactacacaaggggttcaagtgtcttgatccctccacaggtcgtgtctatatatcccgtgatgttatctttgatgaaacaaattttccctttgctaaacttcacacaaacgccggtgctagacttcgttcagaaattttattgcttccttcacatctcctaaatccaacatcaaatcctggggaacaacagctagatgacaatatggctaatattcctgttaatcctgctaatcaaatttttggaagcaatgtgcagcctgtttctgcagaaaatgatgaagcagatgattcttccggtgccacagaaaatctggctgaacagatccatcaggataccgctgcatcaccgtctgcatcagataccgctgccagtcaacccggcgctgccacatccctggacgtggtacattttcctgcctctcctgacgtgatgacgcatcactcggccgacagctcttcgccgagccaacctagtcacgccaccgcgacgcctgccagcaatgatgatgtcccgtcaccatcacacatctctgcatccgagccgttcgcgacaggggaggaagtgactcaagcgccgtctcgcccaactactcgtctgcaaagaggtattcgaaaagagaaggtatataccgatggcacagttaaatacaagaatacctttcttactgtgactggtgaaccaaaaaatttaactgatgctttgcaaaatacaaactggaaaaaggctatggatatagagtatgaggctttgatgaataataaaacttggcacctagttccacctaagcaaggtagaaatgttatagactgcaagtgggtctataaaattaaaagaaaacaagatggaagtctagacaggtataaagctcgcctagttgcaaagggatttaaacagagatacggtatagattatgaagatactttcagtccagtagtcaaagctgctactatcaggattgtcttgtctattgctgtgtctaggggttggtgcatgagacaactagatgtacagaatgcctttcttcatggattccttgaagaagaggtatacatgaaacaaccaccaggatatgaggatgaatcttttcctggatatgtgtgcaagcttgataaagccctttatgggctaaagcaagctccaagggcatggtattccaggctcagcaagaaattatatgatcttggttttcaaggatcaaaaggggatacatctttattcttttataacaaaggaggactaatcatatttgttcttatctatgttgatgatataatagtcactagctccagacaggaggcagtgtcagctcttctgcaggatttgaaaaaggagtttgccctgaaagatttgggagatcttcattacttcctgggtatagaagtaaacaaggtaacagatgaaataattcttacacaggataaatatgcttgtgatctcctgagaagggtaaatatgtttgattgtaaaccagtaagtacaccgttgtctactagtgagaaattatctgctcatgagggtgacttactagggcctctggatgcaacaaattatagaagtgtagttggtgctcttcagtatctaaccctgactagaccagacattgcctttccagttaacaaagtctgtcaatttcttcatgcaccaaccactgttcattgggctgcagttaagagaatcttaagatatttgaaacagtgtactaaacttgggttgaaactatgcaagtccaagtctatgcttgttagtgcttattcagatgcagactgggcaggatctcttgatgatagaagatcaactggaggttttgcagtttttttgggagataatcttgtatcttggtgtgcacgcaaacaagctacagtttccaggtctagtactgaatcagaatacaaagctcttgctaatgctacagcagaaattatgtgggtacagactttattgacagaattacaagtgcagagtccgcctatggccaagttgtggtgtgataatttgggagctaagtatctttcttctaatcctgtttttcatgccagaacaaagcatatagaagttgactatcattttgttcgagaaagagtatctcagaaactattagagattgattttgtacctacaggagatcaagttgctgatggttttaccaaggctttgcctgtaagacagttagagaactttaagcacaatctcaacctgggaaggttgtga

SEQ ID NO: 96176 - DNA, 366 bp, Oryza sativa
  Clone ID: PAT_MRT4530_94298C.1
atgtggattccgttggagatctcctccgcaatatgggtggcgtgccgtgatgggatggtctccatctcgtccacaagctctgacaacgccgacgtcagcgacttctcgtcaggatgcgtcgggatggaagacttcgccccgcacgacaaacgccagttggtgcagccaggtgaaggtcttgcggagggagtcgcggatggaaaagagaccttggcgctgcatctcgttgccggccacgagttccatcatcttctgaaggtcctcacgggcgacttcgagctccgcctccagttgcgctaccctttcgtctgccgccgtcggacgggcctccgcccgatctatctgggccgccaccacccaagagct

SEQ ID NO: 96177 - DNA, 2331 bp, Oryza sativa
  Clone ID: PAT_MRT4530_94299C.1
atggccggcggcaagcgccgccacgcgcgcagcaacccgaccgccggcgggccgcggcacggcgccggggccgggcgccgccgccccgtccccgagctcccctccttcgtctccccggcctccgtcgccgccgcgttctcctcgtcctcctcgggcggccgcggccgcggggggaggggcgggcgccgcggcggcggcggaggcgggtcgtcgaactccgcgtccgactcgtcctcccacgccgtccccttcagctacgccgcgctccgcccctccgcctccttcgagggggcgactcaggtgctggatgtcaccatcgacaccgccccctgcgccgacccggcctccgcctccgtcccggtgtactcgtacggcccggttggcgggatcgggctggggtttcacggcgaggaggaggatgaggaggaggaggctggtgaggctgggctgcatctcggattgggattccggggttgcagcaacgaagaggtggagttggaggaggccaccttagtgacgccgaggaagccgaaggagaagcctaagggcaagcgcaacgagggatttttgtccattgggggaattcggatctacacggaggacatctcatcgccagagtcgggggtgggtgactctgatgaggaatcggaatcagattatgaggggagagatggcaatgatgatggtgatagtgacgaggaaggcagtgatgtcaacgaaggtggttcggagtctgatgaagagttgtctggatcagattcagaggaagacttgagcattggtgattcatcagttgatgatgaggttgttgccgattacatggaggggatcggcgggagtgaggagctgttaagcagcaagtgggtggctggaatgaatttggtcgattcagatgatgacgatgagatggatacagatgaggatgaggatgggttcttgaagaaggtgaagggacagcttgagggttatgccttgatgaatgcatccgagcagtatgggatgaagaggccgagctcagcagatcggttgaagggaaagggcactgctgtcagggcttgtgaccgggacctggcaagtatgcgagtgatgggtctggatgctgtgatgatggtgaaggatgtacgcatggcaaacagattaagaaagggagcaaaggtggcttcatcatcttctcacctctccaggtcctggcctaatgagggtaggaagagcaagaagtatcagagtgtaccaggtgagaaaaagaagcatcggaaggaactcattgcaaagaagcgccgccaacgaatgctaggcagaggagttgatttagatcaaattaatactaaattgaggaagatggtcgtagatcaggttgatatggtatgcttccaaccaatgcacactcgagactgttcgcaggttcaacgccttgcatctatttatcacttgaagagtgggtgtcaaggttcaggaaagaaaagatttgtcactgtgacattaaccgcggattcttctttaccatcttctgagggccaaatccgacttgaaaagctcttgggaactgagcctgaggactttactgtcaattgggagaactctaaacgtccagcccaagtgaagggcctctcagctccaggaaagttggcaaggaatcagacttccagtggaaagaaatcttccaagaaacaagtatcatttgctgaacgtcctgtatcttttgtctcctgtggcactatggcggaatctgttactgagacaattgcagttgccacaaccagtggtgaagtctcatgtgagaaaattgttgaaagcgactctgtcaagctgggaacctttgagatgcacaccaagggctttggttctaagatgatggctaagatgggattcattgagggaactggcctgggcaaagatggccaaggcatgatgcagcccatccagccaattcaacgtcccaaatctcttggactgggagtagaatttgacagcgaggctgaggcaatcaaggcaaggtcagaaccaccaaccaaagcaaggtcagaaccatggcggaatttgaggaaagtggagattggtggcgttggttcctttgagaggcatacaaagggctttggatccaagatgatggcgaggatggggttcgttgagggctctggcctggggaaggatggccagggcatcgtcaaccccttgactgcgccgcttgagtttgataacctagttgtatatatgctaggagagcataaccccgttggccgcggcaaacagcacgcgaaatcgtgggttccgatgcccctggctgtaggcagttgcattcgtcttgcgtctcgaatccctctgcttgtttga

SEQ ID NO: 96178 - DNA, 2171 bp, Oryza sativa
  Clone ID: PAT_MRT4530_9429C.1
atgctctttctagaaaaccacagcaatctgaggaagagttcaatgctatttctcagtgtgttcctcaatggctgatggaagttttgcagagctatgatactgatccacatgctactcagttagttgctgccctgacacttaaccctaattctaagcctcatttttcacttcagcatggagtcttgagatataagggaaatatttggataggcaacagtcctgacttgcaacttaaaatcattaatgagatgcatgccagtccagtaggagggcactctggatttccagtgacttacagaagaatcaaacaattatttgcctggaatggaatgaaatcccaaattaaggaaacacttgccaattgtcaaatttgtgctcaagcaaaaccggatagatcaaggtatccaagactattgcagcctttaccagtccctaaaggtgcttggcagactatatcattggatttcattgaagggcttcccaggtccagtcactacaattgcatcttagtagtagtggacaaattttctaaatactcccacttcatacccttgagacatcctttcactgcaattgatgtagcaaaggccttcatgagtaatgtgtacaaactccatggacttccacaaattatcatctctgacagagataaaatttttacaagccaattgtgggagcagttatttctgagatctggcactaaattacattacagttctgcttatcaccctcaatcagatggacaaacagaacgaggaaatcaatgcctggaaatatatttgaaatgctttgtccagtcagcaccttccaaatggccttcttggttgcatttagctgagtactggtataacaactcataccattcaactattgacagaactccatttgaagccctgtatggatatccacctcgccattttgggatcagcatcagggactgtgacaacagtgagttgataacttggatgcaggatagaaaattgatgcaacagttagttcaacaacatctgcatcgtgcacagcaacaaatgaaactttttgctgataagaaaagaagttttcgacagttccaggtgggtgagtgggtctatctcaagttacagccctatgtgcaaagttcagtggcccccagagcgaatcacaagctggctttcaaatattttggaccatttcaaatcctggagaagttgggtactgttgcttacaaacttcagttgccagccacaagttccattcatccagtctttcatgtatcacttttaaaggaagcaaaggggttccagccatcagtgcatacaccattatctccaacttactctgctgtccagtatcctatagcattactggatcatcgtcttaccaaaaaaggtaaccatactgttcaccaggttctaactcattggtctgacactattccagcacaagctacctgggaggatctgcatgacttgaaggccagatttcctaatgctttggcttggggacaagccaaaactcaaggggaagggattgtcagatcgtcatctgacagtgctgaggaagatactgaagaagaactgagcttggaagcagagcaggacgatgatgagaagatgcaagctgaagctgaagatgcagagcagggaggagttatggaccatcaacccgtgttgcggcgcacttcaaggactgtcaagcccaacccactgtaccatgggccacagtgggccgtattagatcctaacatcttcttcttgtccgtcttctgcgacgatctctactcgccggctctagtcgtcgtggccttgaccttcaaccacaccaacttcggcccggacgagcagacgaacatcaggcttgaaggcgacgcggccttcagcgccgacgtctccttcagcggcgacggtggcgggtgggttgacatcagcgccaacaggctcgacggcaacatcgaccacagccgtggcagggtgtcgtacgcccttccggtacctctctgggacgccgccaccggcgaggttgccagcttcaccaccggcttctccttcgtcatcaacccgccaaaagaggacggcggcatcaacaacaagggcgccggcatggccttcttcctcgccggcttcccgtcgaggctcccgtccgccggctcctacgcctacaacctcggcctcaccaaccagactgccgactag

SEQ ID NO: 96179 - DNA, 144 bp, Oryza sativa
  Clone ID: PAT_MRT4530_942C.1
atggcgaggcttcctgcagacttcgaggaagtagagccaaggcagagaattatctgtttcagggtcttgaaatttgttctccttaggaagagaaaatttgaaatacacagcagatatgatgggctcagacagatgacaagctaa

SEQ ID NO: 96180 - DNA, 609 bp, Oryza sativa
  Clone ID: PAT_MRT4530_94300C.1
gcataatgcagcccatccagccaattcaacgtcccaaatctcttggactgggagtagaatttgacagcgaggctgaggcaatcaaggcaaggtcagaaccaccaaccaaagcaaggtcagaaccatggcggaatttgaggaaagtggagattggtggcgttggttcctttgagaggcatacaaagggctttggatccaagatgatggcgaggatggggttcgttgagggctctggcctggggaaggatggccagggcatcgtcaaccccttgactgcggtgaggcgacccaagtcaatggggctgggagctaagaataagtattaataccatatgtgccttctatctatctatgttatctatgttatgtaccttttacagccgcttgagtttgataacctagttgtatatatgctaggagagcataaccccgttggccgcggcaaacagcacgcgaaatcgtgggttccgatgcccctggctgtaggcagtaggttctatcttgtttacattgcggcatttcacatttttcattccctgttgttttgttcaattctctggaggaaagttatttatttccatggtacgtctcatctagtgtttttgtgtc

SEQ ID NO: 96181 - DNA, 557 bp, Oryza sativa
  Clone ID: PAT_MRT4530_94301C.1
gccacttgcattggatgcaatgtatcacagatctcgcgtggctgcgctggtgcttggccgtcccgccgcgggctgcggtccggtttgcctgcttctatgccgcccttgctctttgctctatgctgctttgcgcccaatgttcgcggttccatcggtgcaaggtggcctcgtgtacgcccgaaccggatgttccatgtagagtggctagttggtggctcggctactcaacagtagttcctaacctggccgccgtgcagcctctggtgcgcttggtgcgtggggtgagtctgcttctgcgcttttctggaccttgacttggcgttgtaaggtccatttacgacttctccattccactcatagtgctcgcccctttcctggctggaccttctggtggcctcccccgcgctagttcatggggctgccatgtatttgtcgccgggcggctctcagcttgttagttccccgagtatgaatatttgtgtatgctgaatggttgggttgttttgcacgaccagactacttcaaggccccttgctgacaggaagactgcaaagttc

SEQ ID NO: 96182 - DNA, 364 bp, Oryza sativa
  Clone ID: PAT_MRT4530_94302C.1
aacagacataagctcgagctatgagtgctctaaacgccatcacatagatatggaatatatcgtaatactattgtctcgcactccattgagcagctcgctcgggcagtgtgatgcttgcacactatgggcaatgccagcaagagccgaatatgctaccgatcatgaacacgtgcaatgagatactgaggcaacatgcatcccgagagcctaccttgatagctgtcacgcaggctacaactgagcagctgccaggtgatgcggcagcaatgctgtcagcagatgaagttgatggcgcaacaatatcattgccaggctgtttgcaccatggtgcagtctatcatgcagcacgtgcagttcgatgctg

SEQ ID NO: 96183 - DNA, 890 bp, Oryza sativa
  Clone ID: PAT_MRT4530_94303C.1
ctagtttagctcgcgagcggctctccactccagtcctctcactctcgttgagctcggcgaggcgcggcgcgcggggcgaggcggcaatgttcaccgacggcatgtcgaggttggcggtgggggtgagcctcatgctggcgctcagcctcgcgctgttcctcaccatcgcggtgctcctcctcgccgacctcttctgctcccacctccgcaggcgctggatgcgcgcggaggagggggaggcgttgtcccggcggcgcgcgaagctcgggctggcggggacgtcgcgcgccgccgcgggcgacgacgacgcggcgtcggtggcgacgacggcgaccaccaccaccgcgcgcgaggcgctgtcgagcaccccgccgttctactacgcgcacggcgtcatgcaggcggcggcggacaccaaggacctcctcctcgccatccccaagctggagtccgccgtgtggaggtggtcgccggcccggcgctcgccgccgtcctccagctcctccgccaacagcgaccgcttcgtgtgcatctccaacccggtgtacgagcggggcgccgcgcccccggccgacgttcgtggggacacggacacgccattcgagacgcccgacgcctcgccgtcgccatttgggatcacggaggaggtggaagaagagggtggcgagttctcgccgccattgtccgtgatgaggaagctgccgccattgggcgtcgtggcgtgtcccccgccatcgatgggtttcatcgacggccggccgtctctgggcttcaccgatggccggccgtcgctgacggcgtggtcggggacggtcaccgacaccaaccgggcctcctcgtcgtcgtccaatctcaccgctcacttcttctcttcctggtcacccaagtga

SEQ ID NO: 96184 - DNA, 304 bp, Oryza sativa
  Clone ID: PAT_MRT4530_94304C.1
tgttgcacaaaaaaactaaggcataggaagggggctgcttctggtagctggtggcgttgctggaagcacaattgcgggcaccaaatacccatggagacgagggtgaggatgagctgcaagatgggcactatggaggccctggtgctggcggacgcctcgctgactactgaaccagcatagaggccagccgacaactcgtgaatcgttcagcaggcgactagccggcgagaaaagtggagcacacgactaccattgactacagcatacctgaagggcgaagcatgcctccaccgaggcgcttgct

SEQ ID NO: 96185 - DNA, 540 bp, Oryza sativa
  Clone ID: PAT_MRT4530_94305C.1
ctttgaagaaaccagtacgcgttgaaggatcccctatatttcccaactcaagcacaaaacgtctaaccccttcgtcacccacttcacagggaaaaactcagtattccgtgccctccccagttgatgtagtggctaatgcgttatcgctatctcaagggagcaagcccgtaagcctccaagaacaacaggggtagtaagagcacggtgccttcactcctagatgttcaacgacactaatactaccctaggattatcgaatgagtccgaaagcgagacttcagagtaatggtgaattgagaactagtatcggcgtagagtaaaataaaacacacacaagtatgacaccttgcccggtgattctattcagatatcagtagtaaataaagcctacaaatttcttgaactctcctacttcatgcccatgggatattccattattgactatagcggatgtggctatattcatataatttatcctataaacaagaaacaacacctcctgttgatttccgtggacgacatttaaaaaaaaaaaaaaaa

SEQ ID NO: 96186 - DNA, 805 bp, Oryza sativa
  Clone ID: PAT_MRT4530_94306C.1
tcaatctgtcatcttcttggcaaccagctgcttgaagttgaatggagtggtgaagtgggacatgccatcgtagaaggtggcggcggtgagctgtgcggacctctgggagggatgcacacggtcccagaagagaaaaccttcatggtccgtgcagagtgtggagtttggcaaacaatcatcctcggcgcccattattccgctcccacagcatgcgctatcggtgttcgtgaacccaccggtgccactatctgccgcaactcccaaagtccccatcaccatgctgtttagggtggaaaataacatctgagatctcgtttgtttagagatacatatatgtgcgggcgtgccagtgtacctccggcatgagaactgatagaagtcttggcagtcggcggcagctccggcgatcctcggcgcgctccggcagggcggcttcccgacgacctcctccatggttagcccgctccagtgcggtgaagcttgcaaatcaagaatgtctggtatctcgacgaggtcgcagcttcggccatcaagctcctctcctgcgcttgctgatgatcggatcaccgcgcgcgccctctcctaccggacaccgggactccggccgaagtcgctcgccgccgccgatgcgttgatgatgggtggcttgtggatgctagatgcgttggtgaatgaatgtgtggatgagttcgccaatgcccctggctgccgaggggtcgacgccttatataggggtctggggtcggtgctcgccgcgttcgcgcgccgtttcctccgcgtcaagttcgttgcagataaggcttga

SEQ ID NO: 96187 - DNA, 1137 bp, Oryza sativa
  Clone ID: PAT_MRT4530_94307C.1
atggagctcactaatgtcccccatattgcagcctcctcccgcttcttctccagctgcagtcgttgcacctgcaggattagaagaagtgggaagacgaggataggagcttctgctgctggtcgtaggtgcagtagtgatgattctgcttgttcagaaccctctgagcagcaaaatgcagatttcttttcaggtcccatatcttctctttgttatacaaggagggactttgcttctgttgctctgctccctttcatacttcctcatgttcatatagcgagtgcggctgagccaattgatggttcaattattcaaaacggtgtgaggaatgttttatccaaggtcaaggctgctggcatgcttcgtttggctttccatgatgcagggacttttgatattgctgataaatcaggtggcatgaatggatctataatttatgaagttgatagacctgaaaatactgggctaaataaatccataaaggtattaggaaaagcgaaagaagtaattgaccttgtgcagcaagtatcatgggcggatttgattgccgtggctggtgctgagtcagttgcgctatgtggagggccagaaattccagtaagactaggtcgattagattccagtactgctgatcctgctggtaaacttcctgaagaaacattggatgccactgcgctgaaaacattattcagcaaaaagggcttttcgacacaggagatggttgtgttatctggagcacacacaattggaggtaaaggattcgggaatccaaatattttcgacaactcctattttaaagtactccttgagaagccacagccatcttcatctggcatgccggcaatggtaggactgcgaacggattgggcactcactgaagatgatgaatgcttaagatggatcaatttatatgcacaggaccaagctaaattttttgccgacttcaaggatgcatacatcaagcttgtaaatactggagcctcatggagatcagcttaattttactcgcacacagctctctctaatgtaggctattaggcacgattcaaacgtaggaacctcagagaatttttgtggaaaaccaagccatggaggtctggatttcttaatatttactcccaaaaaaaaaaaaaaaaaaaa

SEQ ID NO: 96188 - DNA, 718 bp, Oryza sativa
  Clone ID: PAT_MRT4530_94308C.1
cggacgcgtgggtgacttcgtgtcatattaggacatccagatcagttaaatggatggttttctacgtcaggtattacaaagtcagctctcatcttattgtctaaccacataccttattgttttgaatgaagtcttaacacatattatgattctaacttgatccattagtgatatgtgctttttggaagattctaaatatgtggtctctgttttccttgaaaggaactactttcaacatacgtggtcatgtaataatggaatgtattcctagaagtcagtacaagtgtgcaatccgttcaaatcattgtctgctacttttctcagcgtgttgtcgtcttatcctattccaacgaggggcaactcctatctgtttttggtgggcttgtggccagctgggttgataaacattgccacatgttcaagtttttgttcagtgctgagcgcaagcaacaaaccaaaatggggggaacagtagtttcttgttttgttttctttaagttgaactaatattttttttaaaaaaaagacacagctaatggcttatgtatgatattagttttttttaggatcataagttttgcaccttttatggtccatatttaccatcttattaatttttaaccattgtaattgtgcgatatacctgctatgtcaagtaagcttttgttatgtactaaaactatctgcctgatttaatgcatgcaagcctaattttggt

SEQ ID NO: 96189 - DNA, 561 bp, Oryza sativa
  unsure (1)..(561): unsure at all n locations
  Clone ID: PAT_MRT4530_94309C.1
gcgacatgtcacccacatttttgctcagcctatgatcagtgtaggaattaaagataggagtcgctttagcctttagcatccacttgctggtgtcaactgtacccatcatactgtacttaaaccattatcctctctctgcattggtgagagagagagagagcacacaaagcttcaggtttcttgctgtaatgatgtgagatcatctaggattccgaagtagcctttggctaaacacggcgcagctgaaatgatgagccctatcactgctgaaagatctgcatccttgtgaaccaaaattggtttgtctttatgaatgcgccttaactccttggatctaatcgtgccaaagaaaactgggcgggcccacgtgtccctgtctctgggcggcattggcatatgggggacttttacgtctccgtgggaatctatggacttcaccgtcgaccatcacactgctgcgtgtcggtggcttgcacatgagaagtcagaccagaattggatgattgatgcaggtgagaaaatcaaatttccaggtggtggaacacatttccatcataagcn

SEQ ID NO: 96190 - DNA, 185 bp, Oryza sativa
  Clone ID: PAT_MRT4530_9430C.1
aaaaaaaaattcaatccattttatagtgtccttttcaacattgcaccattcacactttccaaaattttaccttttattcccccaccctaaaaacaatgatttaacccatcacacttgcattgttcttgacctacttattttatcccaaataggcatactggtacatgctacggtcactaatccct

SEQ ID NO: 96191 - DNA, 327 bp, Oryza sativa
  Clone ID: PAT_MRT4530_94310C.1
atggagggagtatatccttaccaataccgcccacgggccaccatctatcgtctaccggcacaccacacgaaggcccctaccccacttcgctcagcacgcgggaacaagtcaagacggcgatgccgcgccggacggacgtacgccgacggtgacgcgacgaccaccaccacggcgtacggcctcgatcggtggcccgcgtggggcatgtacaggtcggctttccaggggttaaatgtggccgtgccggacgatcgatatatatcctggcctcctttaagacgagtcgacgtcaatgagctcgatcgattatgtcgctgtctccaccac

SEQ ID NO: 96192 - DNA, 547 bp, Oryza sativa
  Clone ID: PAT_MRT4530_94311C.1
gcacgaggggctgtacgcgcaggcggtgcatgtccggcagcccgacccgtcgacggggaagatgaggatcgctaacaagcagagcagccggctggtgtgtggagacgtgcctcagcgacctcaagtcgctcggcaaggtggccgtgcggctcatcttcctccacgccaccgccaaggggttcaggtgcgcgccacccatgtcccgctggctcaccgctcccgggagctctgccgccggcattgcccgcgcgcagcgcctcgtctacgtggccgccaactcgaagctcgagaggagggacttctccaacgacgatgacaaggacctggagcttgctcacggagggagacgatgacatgctaactgaggctactgccagtgtggatccctcttcagtgtagtcagcagcataccacagcatccatcccctgatcccctgcctgattttaattggtttttcttttgtttttaattaattgctcccttttaatgttgcccttaattactagcatttgtagaatttgataactaggaattgttagattcttc

SEQ ID NO: 96193 - DNA, 156 bp, Oryza sativa
  Clone ID: PAT_MRT4530_94312C.1
atggcggtcatgcatggcaaagaagaggaaggaaaagttgagagcgaatcctcaccaaggcaatgtggtactactggcacaatggagcagcgagagaagcctagtgttgtaggagatgcacaagccatggtgcgggagtgtcccaatgctcgatga

SEQ ID NO: 96194 - DNA, 357 bp, Oryza sativa
  Clone ID: PAT_MRT4530_94313C.1
atggggttgccgatcatcgcccctctccccaccgacaagctcctagggaagaaatgggggaggtggggacagcacccggcactttgggcctcggcggctcggcgccgcggcatcgtttcccgctctcacggtgcccacgacaagcggccgacgtcctccttgcagtccggcctgctctgcgtcttcacgcgcctccatatcgcgtcggcgcctgccagcttccgcgcttgcatgcaaggttttccagggccggggttaccatgtctcggcggtaggcctatgcccttcgccgaccgctgcggtccaccagttcgtttcttttattcatcccgtcctccgagcgactgcggcgcgtag

SEQ ID NO: 96195 - DNA, 1055 bp, Oryza sativa
  unsure (1)..(1055): unsure at all n locations
  Clone ID: PAT_MRT4530_94314C.1
cggtccggattccgggtcgacccacgcgtccggctaatgctaatgccggtgttggtgtcggtgctaatctcggtattggtgccagtatctcaggaggtgctaaagttggtggtggtattggagcaaatgccggcgttggtgttgatgcgaaagctaatgctgatgctagtctcaatgctggtgccggtatcgctaaagacgataaaattggtgctggtatctctaaagaggataaaagcagtgctggtatcggaggaaatgcaggtgctaatgctaatgccggtgttggtgtcggtgctaatctcggtattggtgccagtatctcaggaggtgctaaagttggtggtggtattggagcaaatgcgggtgttggtggtgatgcaaaagctaatgctgatgctaatgctattggaggtggaggtgctgttggaggacaagctggagcaaatgctaatgctaatgctaatgctggtgctaacgttggtattggtgctagcaagcatattggttttggttttggagctggtggtagtttccatttccgtgcatcagccaaggcacacgcaaatgctaacgccgctattagtggatccgaaggttctaacataggtgctggagctagtgcgtcgaagagtgttggtgctggtatcggtgccggtgtaggagtacacactggaatgaacattggatttcacggaggaattgggggcaatgcaaatgttggtagtaatgctggcataggtgcttctggtaaggaaaacaatagtgttgaggaagaaaaaagcaaatcggctgaagctagcacacacaaggaatatggttcggcaaattaaagaggaattctaaagaagaagcccattatacgaagatcgatatgctcattacaaacgtttgagatgtttttttttaacacattcagtaactatatgatttttttctatatttttagtctggagatcttatggcatgataaggctctccttgacgacataagccaatgaataaaatgtggctangcatgtaacctgacatgttgattttgatgataagcatca

SEQ ID NO: 96196 - DNA, 651 bp, Oryza sativa
  Clone ID: PAT_MRT4530_94315C.1
gcggacgctggatccgcgtcccccgacctcgtggaggccggatatggcggtcatcggtcggcggcggaggaggcggcgtccggcagtcggggaagaggttgtggaggtggcgaaggtgtcggtggctggatccgctgtggcgtcggcggccgggaggcgagggaaggcgccggcggcagaatccggcttcccggaggccaaacttggcggcatcggcggccgggaggcgaggaaaggcgccggtggccagatccggcttcccggtggccagatctggcgaccggcggtcaggaggaggctggaagcgtcgccggcagaggcggcggagatggagaccgctgccaccgtcgggcctcagccgcctcccctcccgccgtcggccgccacggcgccacggctccagatccgtcgtccgccaccgcgcctcccctcgcccatgccggatctggcggccggaccgccgccgcgcctccccacccgcccctgccggatctggcggccgcgccgccgccgccgccccgcctcccctcccgcccttgccggatttggcggccgggccgtcgccgccgccccagccggcccggggccgccgcgcctcccctcgccatggcacaaagaaagaggggagagatagagaagaagtggaagaga

SEQ ID NO: 96197 - DNA, 981 bp, Oryza sativa
  Clone ID: PAT_MRT4530_94316C.1
atgaacaacacaagacaaaatacatgggtgaaagaggacttgctggcagagggcggaggcggaggcgcggctggaggcgtcgccggcagaggcggcggaggtggagaccgctgccgccatcgggcctcggccgcctcccctcccgccgtcggccgccaccgcgccacggctccagatccgtcatccgccaccgcgcctcccctcgcccctgccgaatctggcggccggaccgccgccgcgcctccccacccgcccctgccggatctggcggccaggccgccgctgccgcccccgccggcttggcgccgccgcgcctcccctcccgcccctgccggatctggcggccgggccgccgcgcctcccctcgccacggcacagagaaagagaggagagatagagagaagaagtggaagagatagaggagaagtggagaagagggagccggctggccttatctcctcatgtgggccccgctgggagaggagacatatatatacagtggcagaagtcatctcaaacgggctgggacttaaaagccccggatgcctcaccgatgacggcatcccgtatgacccgttagaggtgacggtcatcagtcacccgtgcgtgcgcccgccgcagacgcaggcggccaggcacagcgcgcgcagcgagcagcgtctccatgaccgcgactccgcgaggccggggcgcgaccgcttgacggcgctgatggccggcgcgattgacgaggtggcgagcccgccggccccctcgccgctcggctgccccgcctttcatcatcgtctacagacgagcgacagcgccgacgccgcttcagaccttcagttcagatttcaccgctttagaggatacaagcaggatgaccccgcacccgacagtgatgatgcggagaatgaggccaccagcgaggagaggctagacccaaaccgccacatagaaagacaaatctacccttatagattttatactgcaagctaa

SEQ ID NO: 96198 - DNA, 887 bp, Oryza sativa
  Clone ID: PAT_MRT4530_94317C.1
atgacttctgccactgtatatatatatgtctcctctcccagcgggggcccacatgaggacataaggtcggccggctccctcttctccacttctcctctatctcttcgacttcttctctatctctcctctctttctctatgccgtggcggctggggcggcggcgacggcccggccgccaaatccggcaggggcgggaggggaggcgcagcggcgccgagccagcgggggcggcggcggcggcccagccgccagatctggcagggcgggaggggaggcgtggcggcgcggagccggcgagggcggcggcagcggcgcggccgccagatcctgcaggggcgggtggggaggcgcggcggcggtccggccgctagatccggcatgggcgaggggaggcgcggtggcggacgacggatctggagccgtggcgccgtggcggccgacggcgggaggggaggcggctgaggcccgacggtggcagcggtctccatctccgccgcctctgccggcgacgcttccagcctctgcctcccaccggctttcaacacccacgccgtcgccgcctcctgaccgccggtcgccagatctggccaccgggaagccggatctggccaccggcgcctttcctcgcctcccggccgccgatgccgccaagtttggcctccgggaagccggattctgccgccggcgccttccctcgcctcccggccgccgacgccacagcggatccagccaccgacaccttcgccacctccacaacctcttccccgactgccggacgccgcctcctccgccgccgaccgatgaccgccatatccggcctccacgagtttgttaaaatggacatggatacttgtgtgatgtatattgtcagattgcttcatgtgtag

SEQ ID NO: 96199 - DNA, 101 bp, Oryza sativa
  Clone ID: PAT_MRT4530_94318C.1
aaaggatggaattgagtatcattactttcaccctaaaatacagtttagcgacaatattttagaaaagtcgcttgcttttgcgccatggcttggcaaagctt

SEQ ID NO: 96200 - DNA, 737 bp, Oryza sativa
  Clone ID: PAT_MRT4530_94319C.1
cagcaaaatgacaagaagatcatcagatctaaaccatccgttttttccaacatagcctctgctcgctccatcccatttccccacctcgattactcgattgcgccggttttagcctcccttctctctccagtctccacctcttcggccgttgggcgccatggcggccatcttcccccacctcgcctcgactcttccgcttctccgggctgtccgaacccctcgccggcttccgcctgctgtctccgccgtccctccccgagccgcccgcgtcgtcctccgtggattcaggcttcctgatccagctgcaagaaaatttctctgtttcgaggattcaataggcttgcagacggagcaccagaagccagattctactagcactggtgcaaaacagaacagctcaagtgatgataactcaagctcaacagatggcccacccgtcctaactattttggctggtatcattgtgttccttctagtcttgtgggttatcggatcgctcttcacctggattgctggtttggtctttggcgctgcaaaatcttagaagttcaaattttaggataattctgcacctttttagttgtacatacttcggtccaattgtatgccaatcttggataaattgcacttgatggtttcattcttaagtgttgaacaactgcttcatggtgttgtaccattgtttccagctgtgccttgggtattgccttttcatataaaaaaaaaaaaaaaaaaaa

SEQ ID NO: 96201 - DNA, 512 bp, Oryza sativa
  Clone ID: PAT_MRT4530_9431C.1
ctgtggccacatttcctctactgaacgaatcgttaataccggcaactgcattgaatataggatgtattaatccgcaattctactcccaatcatgtgcaaggctcaagctgcttcactaaggaaaatagaccaacatccaacattacatgatagttctttaaaaaaaaaaactagcactacctggccgagtgaccgaccttaatcccatatcacttgtaggaggaaccactcgcacatcaggctaggagatgaagccacccattggagaactattgcgcaccctccttggctaaatggacgccctcccacgaccaggctgttggatggatccactacactcactcagcaccttcattaccgcaaatcacacaggcgtgggatagctcatgacaggacaccttcacctcaatgccatgaaaacagcctttaaccgaccgaacgacccgggattggcgagcatccttaaggcccgtctccataaataggtgtgcacgatggagacttacgggaga

SEQ ID NO: 96202 - DNA, 919 bp, Oryza sativa
  Clone ID: PAT_MRT4530_94320C.1
tcctctacttgtcatcgagttacaaaatcgtcccctaaacgcaacatgagacagctgagtcagtgtgagacccacgtgtcagaatgccacttcatccccctccgtctctttcccctcctctcccttcctcctctctctctccctctcctctcgggcaagctagccggcgggtggggatgaggtcgccgacaacgggcgcgaggacgagggggtcggcggcgacaggggtgaccgggtcgacggcgttggattcggtgacggcggtggcggtgatgttgaggacgttggagatggagatggcggaggcgtagagcggtggggagcagcggaacacgaggtaggcgtcgcaaggccccgtggcggtggcggaggtgacgtcgtactcctgctgcgcccgaggcggcagccgatggccctcgcccgcgccgtgccgcgacggcgaggagaacgaggaggaggacgagcgcgagcatggcgccgccgcctcggatttgccgtagcctcttcgccatcggcgaggtctgcggccgctgccaccaccaccaccactagggctcgggctccgccgccgccaccactcagccgcggcgaggaggacgaggaggaggacgagcgcgagcactgcgccgccgccggccaccgtcgatggctgagaggctacggcgaatccggatcggaaccgcctcggcccgctctccacgaagaactcctcgtcggcaagctcgtcgtacaccatctcgtcaaagatgtcaccatcggcgagctctccggctttcctccattgtgacacgaaccagagcaccccagagcacgggatccgtcgggccgccgccgcgtcgccgtaggagagcgcgacggtaaggttcttggcctcgccgtcgtacgcgacgcgctggtgcgccctccagccgtccttcat

SEQ ID NO: 96203 - DNA, 331 bp, Oryza sativa
  Clone ID: PAT_MRT4530_94321C.1
gcgcagcgcaagaaagcgctaagaaggcgaaggaaccctcgcgatgtagcgcatcgatgtagaggaagtaattgatcgcaccggctcgaccttctcctcctcgtgcgttctcctcgccgtactcccacaccgatcagcaccgcaaggcaacgacgactctaccggtatctacacatacagctccaaggcccataggactcctattcggatccctacccgaagttcatgcacactcggctgtaacccgaaaactccttttcagtccacatgtcaacagtggcccctagcagaacgtattgactgaccgggcatacacaaagatcataacggt

SEQ ID NO: 96204 - DNA, 712 bp, Oryza sativa
  Clone ID: PAT_MRT4530_94322C.1
ccgccaaccagtccatcgtcgcatcctccgtgcaagcagcagccggctcgccgcctctgcccctaccttctccactcctctttctctcatcttccgccccaagcttgcactctcatcctgcccgtcgtggtgcgcccgcggtgcattttgcctcatgtgcactccgagacactgcaacgacggtgaagaggaggagaaggcggctacagtgaccatggagatggtagatctgccggtgggcggctagcaaggtgaaggctagctatgggtcgagggcagcagccagcaagcaaggcggaggtccgatttgtcggagccagcaaggtggagtctcaaactcttaggtccgatttgtcgattacttcctcttgcaatgctaattttgtttttattgggatgggtttgatttcttccatggatccctctgctttgactataattgaattggtgtggattagagtccaatttgtgtggattagagtctaatttgacaattcagtgttctcttttcttttcagtttcgtgtatgaactgggaattggaaatttagagacgatctagttgtgtaggaaattttggggtccaaattgacaaactcaatgttctcgcttcaatttcgtgtacgagttgggaattgagaatttggaaacgatctagctacgtgggaatttttgatttaaaaaaaaaaaaaaaaaaaaaaaaaaaaaaaaaa

SEQ ID NO: 96205 - DNA, 447 bp, Oryza sativa
  Clone ID: PAT_MRT4530_94323C.1
ctttgttttgtacattaaacccatatgttggtcagcaatatgttccaatttatggagtttcatccgcagcaaatactgctagccaaccatttagccagttcagcccgtccatttctggtgggggtaatggttatgtggctattcatggttacaatgtgccaggaaatccatttgtacagttaactggatcaaactttagcagtgcatcgcctacacctcggcccaccattcaggccccctttttagttgcaccggttcctactcacccgcacttggtcctcccagctcactcacctcagtttacacaggctagtggttcagaccaaagagcaagctgaactatgctgccaaacatttgtaccttgaggtacccttagattgcagcaagacaaaagagcagtgctgcttgattttgagtactggttcttacctggcaaagtatccccc

SEQ ID NO: 96206 - DNA, 5799 bp, Oryza sativa
  Clone ID: PAT_MRT4530_94324C.1
atgttcgccccctcctcgcccccttttttccctcttccttatgcgcgcattcgacgggaacgggcagctcggtcgctgatgggtggccctgccgctgtgtacgggagggcttctttccgtccgaaccggctgaggtcctttctttcctctggttttcttcctccttgtggcgggtgctgtgacagttccgcttctcattgccggttgcccttggtgtcatacctttgggagcttgatgggcatggtacgctgttagctggtgtagagcttatccttccgcctgaagaccctgccagtggtcaggctcacccatccaacaatctggctaggaagttcttttgggttgctgcaacagatccgctaattgtttcacacgagatggttgctcagcaggttgttaggttcatgcaagcaaagtaccggttcgctgttcatgactacaattttcacatgctgctttcctatagaaagattgcatcctctgcagtggatgctgctctcacagcggcttcatgtcttgctaggctccagtcacgctatggggcgctagatctgccgtgtgagggttctagctcctcacagtcagtcaaccattccatgtgttctgtcctggttcaatctgtacatgttgggcagcagggtaccagtgctggtgcaggaccatccatggaacagcccattgacagtgagcctttggtaggaaatgccaaaaggaaaagttcattgctagatataccacgaagtgctgctgccgttaatagggaaaggcggcgtatgaaaatatctggtggtcagacaaaccattctctcgatggtattcttaacggtcccacgcccagtgctgatgacatcttgcctttgccaaaagactatattgcgtccttgaaagctttgtaccctcatcagtcctactatggtggtccatctcatgaatgtccacactgcggtgccgttttctggtaccaggagagggtaaagaaaggatctgtagtctcgcagcgcaagattctgtacaacctatgctgtagaggtggagccaacattgataagacgataaacaatgggaccgcaccttgtgtgttcaagattaatggggttgtccaccaaggtattggcagcctgctgccacagcaaggctcacgacctaaatttgcacaactttacatatatgacactgaaaatgaaactgcaaacagaatgaatatttacgaaaaagacaatccttctgatgaaccagacccagacattgttaatgggcttagttctatgcttgatgagcataatgatttggttaaggcattccgctttgctagagatcggctaaaagataatggtgatcaaaagattgcacttagattgcttggttgtgattcaagagatgaaatccagtacaatttgccaacgagtggtgatattgctggaaatattgagtttagtgctcctattgtcgatggttttatttccgctgaaatacctgatgtgctaaccgaccctttaggctatgccttggttgatgaatttatgatccatggcccttgtggcgatgtgaacaaaacatgctcctgtatgaagaagggagagtgctctaagcatttccctaaatcttttcaagaagagaccatcatggatgaatttgtattcactgtttacaaacgtagcaatgatggtcggtatgttctcaaaaatggtattaaacttgacaacagatgggttgttccctacaacatggaacttctgaaaaaataccaggctcagattaatgtagaatggtgcaataaatctaatatgattaaatatctcttcaaatatgtcactaaaggggcggatagaacaaaagcattctttgagatttctggaaatgcaccgaacaaaccagctgaaaactgtactgctccacgaaatgaaatacaagaatatatcgatgcaagatttctgtccacctgtgagtccctttggcatgcatttgaatttgacattcactacagagtgccttctgtagaacgcctagctgtgcaccttccaaacatgaactttgtccgatacaaaaaaggttctgacctaaagtccttgctatccagccctgtagccaaaaaaacgatgctaaccgagtggttcgaggctaccagaaaacataacagtccccgaacgcttacttactgtgattttccgagagagtggacatgggacagcatctcacgtagttggcgtcctagaacaccatgtgaaaaaataggcaggatatactatgtcagcccagttagcggtgagctctactacctacgaatgctattaatgatagtgaaaggtgcaacgtgctatgctgatgttaggacctatgatggtatcgtttatccgacctttaggcaagcatgcgaggcaagaggcctacttgaaagcgataacgaatggcacttgctatttgatgaggctatagtatctgcgtcttcgggccaattgagacagttgtttgctcccgttgtaatgttttgttctgttggatatgtgcgctcgctctttgaaaaatattggacatattttaccgatgacattcagcgacgtgtcagaactgctttatcgaatccttcgtacgtaatacctcctgataggctcctgtctctattaatgaaagaacttcacattgtgttttcaaacagtggtggtagcattgatgattacgacttaccgcagccggcaatttattcagatgacattacaggaaataggatggttgacgaagaacttgctcttgatgttgcggccctaactgcagaagctaatttgaatatacctaggctaaatactgatcaaagaaatgttttcaacacaatcatgcaacgggtgaacgaaaacaggcctgggttattctttgtctatggccatggtgggacaggcaaaacatttttgtggaatacactgatttctaaaataagatccgagaaaaaaattgttctagcggttgcctcctcaggggttgcctctctactcctacctagagggcgcactgctcattctagatttaaaatcccgatcgacatagatgaaaacaacatttgcaccattaaaagaggaactatgcttgcagatttgattcagaaaacgtctcttataatctgggatgaggctcccatgactcatagacgatgctttgaggccttagatcgaacgttacgtgatttgctttctgagcacacgccttctaacagcattgttccgttcggtggtaaagttgttgttcttggaggtgatttccgtcaaatattgccggtcataagaaaaggttcacgtgcttctatagtcgatgcatccatcacgaactctcctctttggcggcatgttgttcttcttagactgacaataaacatgagacttcttcatggtaacgttactgaccaaaaccgtgtcgatcttagcaactttggcgattgggtcctagcacttggtgacgcttgtgctcaaaaaaggtgtgacgattatgctactacgaaacctaaatcaatctatgggtctatgcaatgggacaagattcctaaccttgagctcggtgatgggaatccaactctattggtacgtgtatcaaggttatgggaatatcatgaccaggacgatgaaggcgacttacgccatattggtcttgttttggttggtgagaagggatatgccattgctgctatgatttatcctccatggggcaagaaattcaaaccactgatcagcgaaggcaaggtctacttgcttacctactatcgggtcaagccatgcaccaaacattacaggccagttgacaacaagatgatgatcaatttcaccagatggactggtatagaagaatatgttgacgtacaagctggctttggtcactatgcttatactctcacaccttaccaagagctccgctctcgtgtcgacaggaaagactctttcacagatgtgattggagtgatcactgacatatcatctgtgacaactgttcggacacgtgttagagacagtgacagtttaaaaaggaatgtctacatgcgcaatgctgaaaatgagacaacaaatattgtgttatggggagaaagagctacaagctttcctgcagatgaaattctcagtgctggcaaggagaagccacagatagttatctttgttggcacacttgtcaggggacatggatctgttgttctcatagcgtgggacactgttgttatagggaatgtttcgttgtcgggtaactctgcttgcaaatgtgttgaagggaattacgaggcaatcaaatggattgatctcccagctgcacctattcttcagaacaactgtgaacagaagacaatcgctgagataagagacccgcacccttttaagttcaagaaacatgaattctcagtgactgtcgtgataaagaaacttaacatggagtattcttggtggtatactgcatgcgatatatgcaagaagacagcaaagccatatggaaatctatataggtgtggaaacagcacatgccccccaactggctcagcttcacctaggttcaaactcagtgtgatagcaggagatgacacaggagatactacatttattatctttgggcatttagcgcagaggctgattggtcgttcagttgaggcactgatgctggaaaatccaactggcaagggctgcatatccagagagatcactgatctgcttgagaaagaatttgtgtggaatgtgagtttcacagagaacacggtctctagcggcattgttgcttttcaagtgaacagagttgttaagggtgctcagagtcattcccttgctctcttgcaatctccatctggatcccagacatcttctctgatgccttgcatggctctatcgccggttgcatctcaggatacttccattggccagcccatagcagccagcccatcagctgggttcagtgatgctcaacgcactctgagtagcccaccaatcaatacagaaaaggataagaacacaggaaatgaatatgcatccaagagtcctgcacaggatgctggtgataatgaagattgttatgaggatgatgaggcagtcagccttacacaagtggcttctgcccctgcaactaagaacagcacctcaaaggcgtacaaaaaaaggcctaggccatctcctggaactggtgctgctaagaaactgttcaaagatgatgctgctgatgatactgatggtgccactggtggcagcaacatggaacccgacagcaacaggcagattacaatgccggtaacacaaccatcatcttatgcaaggaaacgacccctagcagcagcaaagttttcagacagaaaagaaacctcgcaattgctagtagatattatataccgagactcagtagttgtcaaggtacttggagctggcaatccaagcaccacacaaatatctgcaatggtaggagagcaccatatccaagatctttctgtgtttagattggctgcatggacaacaaactgtgatcttatccccaagattatagaatggaacattgagacaaatcaggaaggggagcaatgtactgatctcaagtggaaaccaaacggtgatctatctatcatacttattcacattgaaaagttattcgactatagcaatgaaaacaatacaactgaagacaatcaaggagatctcacagagtatgagaagacaaagcagcgcttgccgatcatgaagacattccaatggacccctggtcagattgactctgattatggtccaatcgaaggagggtcaccgttagtgccacctctcgaccttgacaaaaaaaactggtttgatcctgaccagtag

SEQ ID NO: 96207 - DNA, 293 bp, Oryza sativa
  Clone ID: PAT_MRT4530_94325C.1
ctctctccctaccccatccctccccgcccaacgccggcgggacccgttgaaatactccgtggctcccaacagccgccgtcgtcgccgccgtcctcccaggccgcccgcccagcaccgccgtccatcgtcgccttccccgtgctccccatccccccgctcgagttgcgggtgaagaggggctcgaagcggctgatacccctagcctctctgctccatctaacacggtgaggcctagattgacggagacggcgtgttgatagccgcctacaactcctgtgtgaggcttgaacacc

SEQ ID NO: 96208 - DNA, 303 bp, Oryza sativa
  Clone ID: PAT_MRT4530_94326C.1
gtggggggggttttgttctttttctttttgggggatctttttttttttttttgggggggcttagggggtggcctaaaaattatgataggggtctgcgggggaaaatggttttcctttaagggggtgataaagagatgggccttaaataaagaaaaaaaggtctcggggggaaaatgggggggctatcaaaatttacaaaagttgggatcagggggtattatgaaaaagggaggggggtctattaaggggtcataaagaaattaataagtccggggttaagggcctttttttaaggggggaaaa

SEQ ID NO: 96209 - DNA, 345 bp, Oryza sativa
  Clone ID: PAT_MRT4530_94327C.1
atgacgtcggcgatgacgtcatcactggcggcggctcgggcgcgcaagctcgccggcggacaatggcgcgacgacgcgaacggaggacaccaacacgtagagggcgacgtggcgaactcaccggtgaccaaaacagcggcggaagatcaacggacggcgacgacggaggggtggacgagatctgcgacctacggcgatgctccggcgacctacggcgacgacttggtgaccacgacggtgacctccccgagcagcaacgacgaccggagcgacggcggcgcacggctgcacggtgctagggcgctacagacggcagcgggcaaaggcgagggtggcggcgggtag

SEQ ID NO: 96210 - DNA, 216 bp, Oryza sativa
  Clone ID: PAT_MRT4530_94328C.1
ttacacctgactttccaccaattgcagggtatggctgtagcgctgaagtgtggagccaccaaggcgacctttgacagcaccgtctgctgctgaagagtttgtgacaatgcggaccttgaccaggcgcgtgagcccatcatccaagccaaagacaaaaggtttgggacaggagatgagatctttgtccgccgccggattgtgtgttccggtgggcat

SEQ ID NO: 96211 - DNA, 729 bp, Oryza sativa
  Clone ID: PAT_MRT4530_94329C.1
atggccggaacatccggtggcgccgtcacgggaggaggacacggaaagcttcttcccgacctcaacgtcgtcgcaaccgtggcgcacgacgacgaaggccgccacgcacggggcgcaccgcggccacaagacggcggcaccagcacgacgacgacgatggtggccagcgccggcgccgagcgcggcagcacgacgggccacctgccggccgccaccgccgggtaccgtcgaacgctgatgctcttcctggaggaggaggacgacgacgccgtggaggatgagcagcagcagcagcaggcgccgccgctgccacccgcgacgtcgacggcgacgacgacgacgaggacggcggcggaagccaatgtgcagcggcagcggcagccaccgtgttgtacatttgtggtgcacccgtgcgcggtgcacgcgaagatgcgacacggcgcggcctacgggactattcatttccacttgtttgagtcggggttcatgccaagctataactgttggacatcctacggagagcaaggggttgaactggaagaagatgaagtggaagacgacaatattccggactttgctcagtatgctggatttgaaggaaatcaaacaggcgaggaggaaagggatgctgatggtaacgacgttgcggatgatcttggtcagatgttacaggacaccaaggaggactgcgaaagtgaaaaggggcctataaattggacaagatgttaa

SEQ ID NO: 96212 - DNA, 327 bp, Oryza sativa
  Clone ID: PAT_MRT4530_9432C.1
atgggggcggggggcgaggacgtcgagtgcgccgcgatcgccgtcgatgtccatgggagcgggaacgggggccggggcggggtcggtgacggccttggctctacctccctctccctctccgtcgccgtcgccgtcgatcgggacgagaaccgccatggccgtgggttgggggtggcgtccgaccagcagccatggagctcgcggccggctgccgctgtcaccggaatcgagcggcatccacagtgtgtcagacttacaaggggcatcctggacggtgcggtttttcctcttggaatgcctacagagatttggcgcttgactttttag

SEQ ID NO: 96213 - DNA, 2178 bp, Oryza sativa
  unsure (1)..(2178): unsure at all n locations
  Clone ID: PAT_MRT4530_94330C.1
gggggggggggggcataatcaaattagttgatgcattttcacccagaatcccatcacagttcatcatacaagcaagtgtagttattaatggtaaatttttcgtttagagaaaaaaaaaggaagccttatataagatccaccggtggggtgtgaacaataatcaatgaatgagatcgcatcccgtaagggcagcctagctacacaaaaatgcataaaactccgtataccaaccacaacaacgcttgcgcacgcgctcaaatggcagcgacttcatcgtcttccgcggccaagaaacgaatcagtgatacattggcagggaaccaccaaaagaaggcccatccaatccaatccactccaacgcggcatggaagacaagacagatgattcacagctatcttctgcttctacaagtttgatactttgtactgtcctttcagggaaaaaagagcatcagattagtctgatctcgggcgcgttgagttcttgtgggagatcttgttgtggagtggcaggagtgacgatcggctgccccgttttcttctacngaaacatcgccagcacagcagccaaaaagacaataatacggcaatggggatcgcctacctgtccagatcgagaatggggctatatacgatagtttcccacgaagagacaatgatgtgccaagctggattatagtacaatgactctgctgaccagaacatcctcgtgtacgtctccaggaagatgaacatcacccaggcaacaatctcaagtaaaaagaacttgatgacaaagcgcccaataaccaccatgactagggagaaggttaccaaccaattgaagagcttgttattgtactccttgataaaaagagcacgagacttgacaagcatctttgacattctgcgctcgtagctttcctttgcagggcccacacattcccttacaaaacttcgattgcagtgaaaaaaccctgcattgaactttgccatggaagggagcttcaagacttgaaggtggtccattttatcttcacattctgagaagcgtgcttcacacagctttgatgattgatactcatttgctagaaggaagtttctgtacacctttttttatctcatcatcaagcttaaggattgactgagcagcatggtgtttaccaaagtgctgcttatcaaacagcattctagcttgatcaattgctgtctcatgaacttgttgcagtcggtctactggtactggtagacgtaagccatccattttatccctatacaccttcagacagcgatcaagaatggccttattgaaaatttcaacaagagatcccgttgatggaatctctcctttatttaatgcctcgagaatctgctgcaagaaagaaacaaattcctttccatttagagttttcccctgcacaatttttggtcttgtgatggacgcaacgacctgcttcaattcatcccgcctttttacatataaggggtcaagctctctgtcatccatgtcacataactttgttctttgtagatgcggctggggcaggctaaaagcagtgctgttgttgcccataactgccaaagaatctctaatttgattaacctcatcaatatatttgtcccgcaggaaatccctctggataagccaaagaagctttgctggttcaaaagcaacatcttgccccttcactcttccatagaattcttctgcaatctcaacagcaaatgagagcctagatatatcagcttcacgcaccgtctcaggaaggttgtagattagcactgaactcaagacagttgccaaagcaaatatcctatcatcatatacatttgacttcccaacactctcaaatccttcagtatcaaggtaaaggacagacacttttgaaccatcaatgtccatttcaacaggtgtaccccaaatccatatacctttttcacatgataaagagagaagctggttgaggagaaaagactttccagatcgatatggaccaatgacaccaacaacagcaataggagtttcaatccttcgaattgcgtctagaccttgttgtgagagacggagcttagtgtggccataatctggctccacaattggaaatgcgcgctctagctcgtccggctcgaggtctcccgcggcggccgcggcgagccaaaccagcgccaccgcgcagatcccggcggcccaccgccccat

SEQ ID NO: 96214 - DNA, 292 bp, Oryza sativa
  Clone ID: PAT_MRT4530_94331C.1
ctgcaggaattaggcacgacccacgcgtccgcccacgcgtccgcccacgcgtccggcaaatttgcctaagatttagagaaattggagagggaacttatctttggcgatgtaaccttcatattttgcaaccttttcttttttggctgcacttctatattatgattcactgagagcagttgttgtatgctggttgctatatagctcgggatgaaaaaaaaaatttccatagaaatgatgaaaatacagagattttttgggattaatttagggaaaattaggtgatttcagcttt

SEQ ID NO: 96215 - DNA, 165 bp, Oryza sativa
  Clone ID: PAT_MRT4530_94332C.1
acttgagattggttcgctgctatgccctggtgaaattgaagtgctgattgagtgactgatgccaaaaggcttggatgtggtgtgctgtgtgcgggatgattgattgggaaaaagtgctcctgcccctaactgttaacgaagcgcccagatgctgtgggcctgtgt

SEQ ID NO: 96216 - DNA, 108 bp, Oryza sativa
  Clone ID: PAT_MRT4530_94333C.1
atggctagagtggaatggggaattggagcggtggacgcggggagaaattttgtgaagtttttgagggaggattggagcagattgatgaaccctaacttcgtcggcgcg

SEQ ID NO: 96217 - DNA, 199 bp, Oryza sativa
  Clone ID: PAT_MRT4530_94334C.1
gcgcgccacacatgaatgtaggtgatcgatgtgaagtcgagccagatgctaagaggggtaccgtaaaatttggtggcagagctgaagctattgaacatggattttgggttggagtccagatatgaggaaccacttggaaagcatgatcgcatggtgataggcatattgtttttccagagaactgaaaggcatggagcta

SEQ ID NO: 96218 - DNA, 2206 bp, Oryza sativa
  Clone ID: PAT_MRT4530_94335C.1
atggaaaatgcagaggaatacaggccggagtcctggagttcatggcgatatgtgctcggcgctgggaagaagatgaacagggcacatgagagagaagaagcgaagcggtatgcagataaactaggttggcccaattcgatagtaatggcccagtccagtggcccacttcccacacttacacactcacacaggtcaggtggggacttagggttgggggcgtttggggtgggggctggcggctggtggcgactgggagcggccgacgccgacggccgacgcgagtcgcaactcgcaagagctcgaggcctcgagctgcaggctctggaattggaggtcgacgatggaccgcgcaagttcacttatcagaaactgtactgatgctgaggtgaggttgctggagaagcgggcgaaatgggagatatggcgagtgaactctctgtcaatggtgaacgccatgttgatgggagtggttgtggggattggagcctatgccccgcgctaccgacaccaccccttgactcgcttcctcttccagggtgccgctgcactcttcatgcctatagtgtcctatgttgtctctgatagtacttttgttacctttctcatccaacccattacaaccacagcgacctgcagatggctcctacacacgttttgtatcttacagtggacagtgcttgttcagattgccgctatcaacaccataacactagtggcaactgatgctagagaattaggacgaagcattgcaccatctgcattattgattattcatgcaatctggacttgctacctggtcatctacttcctggggacggaccttggtagtggcaatgatttttcagtcaaaaccatctcacaggatatgagtgattttcgtagaatatttgtgctggtttcagcgtgtcttatgtttgtcaaattggttttcaagttggttgcatttttcatggcccgacaatcgtttgctcttggacggaatcctcggcttgtgcttggatacatgaaggagaaggagaaggacgtcgtcctaccatcagtaatgcatgtaactggcgatgatgtgcctcctccgccacttttagttatgggagaggacactgttaatgtacaaaaagggcccaatagttacactagtgtagttgataataatctacagcagagaggagctgctggcttggtgaacttagatgaagtttggcagcaaatggatgacgagtacacgaattattctctgacaagctggacacctgcaggacacaaacagctgaaagatgtttgtctttcatttgcattgttcaagctgttacgttgtcgattcgcaagttgcaagctggtgaataacccatggaaggacaacatcaacctctgctcaatcctggacatgcatcgtccaacagcaaagtggtcgccgctgccggagaaaaccaagatcgtcaaggtgcccgaccaagtgaagtccgccatcgtcgccaagctcaggagcagcaaggggagcctgcagctgaccaaagcatgcacggcgtctctgcatctgcagggcagcgacagccagctgctctgggaggatgtgacagccacaaccgacgtcctcctggtgtgccacatcgccaccaccatccttgaggtgaagtatccaaatccaagtacaactgcaagctcaagctctgacagcagcaacagggttgttgccactcacctgtcaggctactgcgcctacctggtggcctgctgtcccgagctgctccccgacgacgatggctggagcaaggacctgtacaaggccgtcaaggcagacgctcgccgtgctctcgccgccggtcgtgctccaccggagtacgagaagctggtccgattgctcagcgcaggctgcaggcacaaggtgttaaggaatggcgcgcagctcgcggagcaactggtggcgttggtccaaaaccaacaggaggaggaggaggaagggaataaggcgtggggggttcttgcggagttttggtcggagatcatcctgtacctggcgccgtccgacaacctggacgcccacgcggcggcgagctcatcacgctgctctgggcgctgctcaaccacgccggcatcgtctccaggcccgccgccgccgccgccgacaacgagactgcggcttcttcatctgctgtttaagtttatttaagtgctggttaatgcgtgtttaatttctttgcatggcttt

SEQ ID NO: 96219 - DNA, 855 bp, Oryza sativa
  Clone ID: PAT_MRT4530_94336C.1
atggccacaactggttgtggcggcggcggcggcgtctacgttggcagcatgcgggggtggcgagcgcgggccacggcgtgttggcgtcggctcgcgggcggcggccgcggctcgcaggcggcagcgtcgacaggtggcggcctaggtggcggcgtgcgcgaggcagccggggaggcggcggcgtcgacagtcggtggccaggggcggtggcggagatgcgtgggccaaccggcggcggtggctcgcgggctgaccggtgccagcggctcgcgggctgcccggcggcggcaacgccagggtaacgcctacaaggtgttggacgaaatggcgatgagggatgtggatacattctcatatactatcgagtatatggtattgccgtattacacaaacccatgtataggagcccatctaacggaagagcgtgcggacaacgccaagctgcaggaggagattgccagcgcggaggaatcaccaagtccaaggacaacctggcttcactctggcaagctctgcactagaactacgggcgcctcgatgtggccgcaaaagggcctggggatgagcgttcctcatcccgagtttcctgacgaaaccacggtcctggtgtcccttgggtcgctgataaccaagctggagaccgccgcgagctcccatgcagaccaagtagacaagggaatgaggtctaggatccagaccgacgcatgccacgttcttatgtgcctcaaactcacacgcccggaggtcaacattgaacaaatgatgaccaagggaggagccaacaagcgtcgcgaggacatgatatcagaattggaggatgtcgaggagtctgtgatccccttttttgaagagtaa

SEQ ID NO: 96220 - DNA, 567 bp, Oryza sativa
  Clone ID: PAT_MRT4530_94337C.1
acggtttaatttttttcacgatctcgatggttatcatcaacttggggcccaaagcgtataaaacaggcacttcgccaaaaaggggtgcaagatgcagaagtagaccaggcgacaaggagagtattccaagatggtcattcaaaccagacaatgtatggcatttccgaggattcaatggatcatctctttgagcaggcagctaaacagtggcagcgggggcaaagcttgccccttgagaatcgccgtgcacgcgtagtgaggtggcttcagtaccgagggttcaactgggctgtaaccaatgccattgttaggaagctggaagcacagaaacctccctgagtatggaattgatccttctcctttgctgcttttcaactttgcaatttacaatggtttgctatttctgtcgcaagtttagcttgcaggttccttctatagttatgaatctggtttctgattaacatgccattttgaacaacggggaacgatgattaacatggtcatcatccaacttacattaactcatccaattgcatgattaacatggtcaatcaacgcataggaagc

SEQ ID NO: 96221 - DNA, 435 bp, Oryza sativa
  Clone ID: PAT_MRT4530_94338C.1
atggagagagaaagagttatctttgttctgaagtgcatgccatgggcgtggcccatgactgtgctcatcggaggtctgcaagtcatctggctcatcggcgatggccgcggccttcctcttggcgtccgtccgttggaagtaccccgtggcgacagtgtcgacgatgagcgtgccgatggcggagaccatggagactatggagaccatgccggcaaacgggaagctcttccacgggctaccgacgaggcacggtgagctgatgttgacggttcttaaatcataatatctgaccgtcaatacctttgtttgttgtgtatcccacggatttgtcagaggtaggcggcaggtggtgacagcctcataagccatcccatagagaaactcttggatgcacccgaaaccggtgttctcaaccttcaggcctgcgctatgcat

SEQ ID NO: 96222 - DNA, 1773 bp, Oryza sativa
  Clone ID: PAT_MRT4530_94339C.1
aaacgggatgtggagtaaaactgtgcttcaaaccatccgcggcggcgtcagtgcaccagacgctcaggatggcggcggcggcggccatggccgcgagtcgccgcctgctccatctgcggccggagctagggctgcgcctgcgctcccgtgccctaatcccctacccttcctggacgaaggcgatgggtcgttgccggtatgagccgtcaccgcggaggctctcgagctgccggcgagcagccaagaatgagcggccatggaggtcgagttcaaatgagcagctgactgatggcgatggcacagccaagtacatgggcaggaatttccccgatgaattcgcacagctttctttggaagaggaggaaagcgacgatgaggtgcacggaatcagcgaaaccatggtgaaagatgtggagaaggctgcggtcgagttgcttgctggcagagcattcacagtttcagatcttaggaagaaactacgtgctaagaagtttcctgataatgcagttgattctgtaattgctgatttcaagtcaaggggtctgttgaatgatggttattatgcggaatctttttcacgatctcgatggttatcatcaacttggggcccaaagcgtataaaacaggcacttcgccaaaaaggggtgcaagatgcagaagtagaccaggcgacaaggagagtattccaagatggtcattcaaaccagacaatgtatggcatttccgaggattcaatggatcatctctttgagcaggcagctaaacagtggcagcgggggcaaagcttgccccttgagaatcgccgtgcacgcgtagcgtcagcggcgctcggagacgggctggatgcgctcctggcctcctctgccggatcgggggctgccgctggtctggccgggctctcagccggcgcctcggaggatgacacggatatcgcagaggtgccgatggagggaaccggatcctcgctacgtcagagggacgtcgggcgcagctgcgccgttcgttccgcatccgacggacaggctcgcccacggccccccaaaaaaaaaatacggtccacatcgccaccacggagccgcagccggccgtgccgccggggacgactggacgagacaagtgggagacctctgccgccgccgccacacggccgcatcccccgtctccccgacgaagccccttctgtcgccaccttcctcctcgtccccaacgccgcctccgtgtcctccgtcatgcgggaggcctccgctgctctccggcgtaaattgagacgcaacaggaatgaagcaatttgaacagagcaaacagtgcattgttgtgagatttttttttttttgagagcatcctttgttcacagcagagcatttttgaagaattgagattgagtcaatattgaatgagatcttcaaatgtaattttgagtctgatcattgcgatcgtgtaaattgagattgcaaaataagaaacaagtgttttcagtgccgagggttcaactgggctgtaaccaatgccattgttaggaagctggaagcacagaaacctccctgagtatggaattgatccttctcctttgctgcttttcaactttgcaatttacaatggtttgctatttctgtcgcaagtttagcttgcaggttccttctatagttatgaatctggtttctgattaacatgccattttgaacaacggggaacgatgattaacatggtcatcatccaacttacattaactcatccaattgcatgattaacatggtcaatcaacgcataggaagc

SEQ ID NO: 96223 - DNA, 371 bp, Oryza sativa
  Clone ID: PAT_MRT4530_9433C.1
ggttgaatcttccttttgctgatctcccgcagaaggattaagatgctggacatggcccatctgatactaatgaccccacgccagtcggccttcctgtaagaataattcctagaagcagtgaccctgtttagactgtaaaagccctcacatcggtatgtttgtgcatggttgtaaatatctgtgtgaaccacgtcacaaacttcaccaaaactggccaactccgcgaattcatttgtacagaaccacatattacctcactgtatagtcttctccctgccctcctagggattgtggagcaggggaagaaccattcttttgcagcacgaaatgcatggatccaaaaaaagcctcgtttcaaacaaaaaaccaaa

SEQ ID NO: 96224 - DNA, 783 bp, Oryza sativa
  Clone ID: PAT_MRT4530_94340C.1
atggggtgttcctgtgtgctttactcggtgctgataactgcagttgtaactactgtggtaaagaatgcagtaggaagacctaggccagacttcttttggcggtgttttcctgatggaaagcagttatatgatcaagtgacaggtgatgtgatttgtcatggagagaaaagcttcttaaaggatggacgcaagagttttcctagtggacacacgtcgtggtcttttgctggacttggatttctgtcactctacctatctggcaaaattaaggtgtttgatcgccaaggtcatgttgccaaactttgcattatgattcttccccttcttattgcttcactcgtcgggatttctagaatagatgactatcgacaccactgggaggatgtgtttgctggcggcctactaggatttatcatggcgatgctctgttacttgcacttctttccacctccataccatcatcaaggttggggaccgtatgcatacttccatatgcttgaggagcttcaagtggccaactcccacaatgcagaaagccagcagtcagtgtgtgggcatcatgttgagctatctagactacacaatagcaggacatcaagaaatgatctggaagctggtcgtgtgtaacatccctagcatgttgaaaaccgaggaagcggcatgtacagtaagcatgactaaaccttctatgcttgtaatcaacaaatattagcaactagcagctcaagcctcatactgaattatccactatcatgtgtgaaatcaaaaaaaaaaaaaaaaaaa

SEQ ID NO: 96225 - DNA, 280 bp, Oryza sativa
  Clone ID: PAT_MRT4530_94341C.1
ccggccggaatccccagcagcatacctacgccgctgcatgcctgcttaggacgaaaacacgcaaatgaaggatataccccaacataagatgcagcctatctgggcttgtataaactgctcactccgagacagccacctctgcagatgccgcaccatcaccacgagccaccactatgaagcaggggaaccaagtagacccggcatgccgtgctgcctaccatgcaggcgcgaaggggtctccgatggaccaagccgcgtgtcaccctgaggtacttcacaa

SEQ ID NO: 96226 - DNA, 3879 bp, Oryza sativa
  Clone ID: PAT_MRT4530_94342C.1
atgagcgggctggatctccgggagatgttaagcagcgctgcgcggcggcatacgtggaggagaagcggatggggggcggagtggggcggcggcgacgacgctcgctcggccgcgcttccggctcgctgtcctcctccccctcctcctcgtcgtcccgcggctgcgggtgggcgtggcgacgaggggagcggtggagtgcgggggcgcggggaggaggggacgagtcgtggtggaagcggagcgaggcgcgaggacgcggcggggaccgggaggaatgcggtggccgtcgtcgccggtggctcggccacgtccggcgcggagcgggttgctgcgcgagcggaggacgggcggcgatcgatggacgggccgacgctggaactctccgagatgatgctccacgcggcgcagccatggagaagccgatgcacgcagcgtgacgttcgcccgggcgcggttcctcctcgtcccgtcgctgcggatgggcgaggcgagggcaccagtacagtgcgagggcgcgtgctggaggggacgactcgtggtggaggcagaggaggtggaatggagcgtgagcgcgaggtggtggcgccggcgagaaatgcggtggccgtcgccggtgatttggccacgcacggcggcgagcgggttgctggccccttggtggcgaaggagaagagaaatggcggcggtgagttggggacgaagagggggctagagaagcgggccccgcttccgccgcccaagcgcagggtggtgtccgctaagcgccagtttccaccagatttcggtagggactctgctgttccactcggccgcggccggggccgtggtggtggtgttcgtccgtcggatggggcgcctgcccgtgctgttctgggtgagaaggtggcgtctgcgggtaatggtgattcaatggcgaatgtgcatcatcatgctgtgatggacacggtcttgatgaaatcttcacatgcttcggatgagaatctggttgctttcaaagttggttcaccagagaatggtgcagaaggggcagcaaggggaaagggagcacacaatggtgaattgctgggaaagagggaagtgttggctcaagctgtgaatttgcttcccatgaggaggactgtatctgcgacgcaccgcttcactgctgggtgtgggagggacgctgcagctccacttgctcgcagagaagagggtaaggtgggttcaggtttggaagtcatgcctgttgatgttggtgggggtgtgtcaaaggaggtgatggctacggatggcagtaaacattcggttaaccagtgtacggcgaacattgttggagctgtcggtgttttggatggaacagtacagtaccaggaattggaggagggtgaggtggctgatgaggcatactgtgatgtagagtcacaaaaagttgttggttgtgattcttttgatgattctgcaggtgaaagacatgagggtgttgttcctgtaacgtttgctgttactgaagttttgacaagtcacgcttatgatgagatgatgcaaattaaggcattgcaagaagggggcagtgatgctgcgcaggaaactgaacatgacttgccaatgggaggcaaatgtgaaactatcttacctgatgcttctcctaaatgttcgtttggtggtccttcaaatgaaattgtccacggcaagagagtgttggggagtcatggcatgaaaggggaagttcccagtcttgcaattgaagatcatggtggcattgctcaaattgaccaagaactggaggacgttgagatgactacaggggaataccgtgttcaggatgctcaaattgccacccatgttatcccacacgagtctacaactggtagacatgagggggggctttgtgcatctgcagctgctgaagatgttaaggtgatgaacaaatacaaagggaccttacccaaaggtgctgctaaatcatcgatgaatattgcaacaggagtatttggtgatggtatcatgagaagtaagatactatcaacagctagaaaagtagtcaagccacctgtcagagcaagccataagcctccattgaacactctgcatagacccttctccacaaatagtgcttcatttggtcataagaagttgaaggtaaaacgtccagatcaaagtaaagatattcctatgaagattgcctctacatctggattggcgggcaaggacaaccttatcgatgaaaaggctttgagcttggaagatgatgatattttgaaggcactagttgttcatgatggaaagcttgaggtgtatctcaatgttccctcatgcgttcagcttcataggcaacatggaagtgggaatgctgatgataggagcaaaatcaggatgttgtgcaggaggtttcagtttatatgcagggctctcttacatgccgtcgaacagggttcattgaagattcgaagagttgaccttgcagctgataaaatcatcaggaaattgccaggctttaccaaacctggacctactgtgggaaatgttaatggagtggaagttggtgacgaatttatgtacagagttgagctagcccttgttggtctccatcgcccataccagggaggaattgataccaccgattataatggagtgcttgttgcaataagcatcgtttgttctggaggttatcctgatgaattgtcaagctcaggtgaactaatatacactggttctggaggaaagcctgctggtaagaagaaagatgaggatcaaaagctagagagggggaaccttgccttgaagaattgcatcgagacaaagacacctgtccgagtgattcatggattcaaaggtcaaaatagagaggacaacagtcattcaagagctaaacaaatcctaacatttacttatgatgggttgtaccttgtggtggattgctggacagaaggactaaaaggttcaaggatcttcaaatacaaattacaaaggattcctggacaaccagaacttcctctgcacatagctaaagggctgagaaggtctctttcacgtccaggcctctgcatagctgatatatctcaagggaaagaaatggatcccatctgtgtgatcaatgatgttagtaatgtccatccaacatcttttcagtacatctctagaatcaagtacccgtcatggcttacaaaaagacatcctcagcatcatggttgcgattgctcagatggctgcatagattctactaagtgcttttgtgctgtgaagaatggaggaaaaatcccattcaactccaatggtgcaattgtccatgataaacccctcatttttgagtgtggtccatcctgtaggtgccattcttcatgccacaacagggtaagtcagaagggtatgaaaatccacctggaagttttcaggacagccaataaaggttggggtgtaagatccctaaggtccatctcttctggcagctttatatgtgagtatgttggtatcctgttgactgacaaggaagctgacaagagaacaaacgatgaatacttgtttgatataagccataattgtgatgatgaggattgctccaaggggaggccatcaactatttctagtctaaactcttctggtggttgctctcagaccatggaagatgtgtgcttcacgatagatgcgtctgagtacggaaatattggaagatttatcaaccatagttgctcacctaacctctatgcacaaaatgtgctttgggatcatgatgaccaaagggtgccccatatcatgttctttgctgcagagaacattcctccactccaagagctcacttatgactataactataaaataggtgaagtccgcgacctgaatggcagagtaaaagttaaagattgccattgtggttctccacagtgctgcggcaggctctattag

SEQ ID NO: 96227 - DNA, 111 bp, Oryza sativa
  Clone ID: PAT_MRT4530_94343C.1
atggcggatggggatgccccaggatccagggggaggcccactggaggagacggtgctaggcaggcggttggggttcggaccggggtggagatttatggtattggggattag

SEQ ID NO: 96228 - DNA, 400 bp, Oryza sativa
  Clone ID: PAT_MRT4530_94344C.1
atctggtcgatcgatcataaccgcgggcacggctattcgaatagtttactctggccagagatgcacaactgtacccacaagacacaatccaccggcatgtcaccgcgtcatcatgcgcctatgaagaacacgtcaccatgtcaagtgattgtgacaagacccttcatataaccctctgaccaatcgcacaacacctcaggttacgcccccgcccccagcaggcagccccctctcgtgtcacggtgaatccgaaagccgatcaactgaacagcccggatgacccaaccccatcacgcccaccctagcctaggaacatcagccagaggaaagctatactacagatcaagcagttacccattcccacttgtggtaagcgcggtaagtcttccagtgcatccgg

SEQ ID NO: 96229 - DNA, 124 bp, Oryza sativa
  Clone ID: PAT_MRT4530_94345C.1
cgcgcgatcttttagtgtgccatgccctagaagccaacacaattgggccgttttcctatgatgttaccccatgctcacgtatacagagcgatggcttgctatgagcactccaattttcttcaaa

SEQ ID NO: 96230 - DNA, 402 bp, Oryza sativa
  Clone ID: PAT_MRT4530_94346C.1
atggctactacagatacaaccattgctcacatcatgaatgaacaagatgatatcaagatcaagtcctccaagtgctggaatccgattcggccacttgctacactgctgacttcaaacggctgccaaatttgcatacgagctccgttttgggcccgtgaatacttgatggaaaggtctcggagtcctctttccaacggatctagcctcatcgccaaactccatctcagttggccacaatcaaagaaacaaggtgttgcgtcacctgtcatgggcctatgggcatgtaacttcgtatgggaccccggcccaagtggggcccatgtgggatgcgccccaatcaggaataaggttgatctataccggcaagatcaacaacccacggagaggtgtatcgatcgctaa

SEQ ID NO: 96231 - DNA, 737 bp, Oryza sativa
  Clone ID: PAT_MRT4530_94347C.1
cacctcagcctgagaccctgactccctgtccaccaccgtctccgccatcgccaccgcgccaagccgccgccgccaacccccatcgagcgcctgccgccgccgctctccgcctctcccccagtgcccgccgtcgagctcgcctcctcctccccctccaccatcgagctcctctctgtagtcgccgtcgagctcaagctcgagctcgttttctccgccgtcaagctcctccccgcctccgccaccaagatcttcttcaccgtcctggccctcctcgccctcatcggtgtcgtcctcgccttccgcgccctcctccaccgcgccaagtcgcgcgccagctcctcctcctccgcctgcgccgccgccgacgagtgccagcccatcctgcccgacaccgtcccgcagccctccatgccgtcaacagccgccaccactcctccgccgccgcaccaatatccctccttccccccaccggacgccgccatgcccatgcccatgccgcagcccccaccccctctgcagccaccacctccagcgattgcgcagccccctcccgcattcgcctcaccgcctcctcccgacgctctcgtgcccccgccgcctcctcccgctgcgcctgcgctggtgacgccaccgccggcgttaccgtcagctcctccgcccgcaccggaggcgccaagcccaacggcctcctgatgccgccgattcttcatctccaccattaattacttgcactttaa

SEQ ID NO: 96232 - DNA, 814 bp, Oryza sativa
  Clone ID: PAT_MRT4530_94348C.1
ccgcagggctgcatcgccagtcgccacgcgggacggacagagtcactgccaggtgggcccccagtagaggcggggagcggccccgcgagctactggcaggtgggccccgccgttacttcactagaaggcgggttcgcattctgtgggaggggagcgtccgagcgtgtggtcgccgctgctgctgctgccgtcttcctttcttgcatggagacctgccggcgacgctcgtcgtcgcaccagccggcgccggcgccggccagggtcatcaccgccgacggctcactcaaggagctggccgtctcttccgccgtcgccgacgtgctccgcggcgagggcgagggccggtccttcttcgtgtgcaactccgacgcgctctacttcaacgagcagccgccggcgctggcgccgggggaggcgctccggccggggcagatttacttcgttctcccggcggcgatgctcgggcagccgctatccaccgccgacatggccgcgctggcggtgcgcgcgagcgccgcgctcgcggccgcggccgccaaggcgccgcgacgccgaggggttcgccgcggcggcggcgacaggaagaggaagacggtgcgcgtcacgccgctgcgggacgagcgcctcgacggcggcgacgtcctgctccacgagaagctcaacgagcggacgctgggtgagttcccggcgtcgtggagcccgccgaagagcggcggcgagaagctcgccgcggcggcgcggtcgcggctgaagcgcgtgctgagcatcatccaagaggacgccgagtgacggacgctgggtgagttcccggcgt

SEQ ID NO: 96233 - DNA, 3555 bp, Oryza sativa
  Clone ID: PAT_MRT4530_94349C.1
atggaaagggataatgagacataccgatccccaacacatgtggtgtacgcgacagtgatctcatatgtgattcatgacaacaacctctttggtgaggtcccaatctgccttggcttacgcacctacattgttcacactacactcgtctccaagataactttgcatagcctccaaggcttctctccttgccacttccatgagcttcatccatcgcgaatcctacaagtgagcgaggaaccggactattacgactacgtgataaattgttttaaaaatgctgatatggtgctgtatttgcttcgcaagtatttgggcgaatatgttgaagggctctctgttgaaacactccggataagtgtttggcaaggtgacgttgttcttaaagacctaaaattgaaggctgatgcactgaattctcttcggcttccagtaacagtgaaagctgggtttgttggcaccataactttaaaggttccatggaaaagcttgggtaaagagccagttattgttcttattgatcgtctgtttgttcttgctcatcctgcccctgatggacagactctgaaggaagaagatagagagaaactttttgaagcaaaacttcagcagattgagaacagaaaggtaccagggagtaattcatggctatacaatttaatatcaacaattattggaaaccttaaagtcaccatcagcaacgtgcatatcagatatgaagattctgtcagcaattctgggcatccatttgcatctggcttcacgttgtcaagacttgcagccgttacagtcgacgaagacggtaacgagacatttgatgctggtgtagcattagataagctgcggaagtcggtcgaactgcataggctagccatctaccatgattctgacagcagcgcgtggaagcttgctaagaaatgggaagatctaaatcctactgaatggggcgagatatttcaagatggcattgatgatcattctggcaattctgtttgggcaatgaataggaactatttagtttaccctataaatggaactcttaactacaaacgacttggaaagcaggagagagggggtccagatatccctttagagaaagcatcacttgttcttagtgatgtttcactaactgttactgaggcccagtattatgatggcattaaactgttggaaacattttcaaggttcaggacacgtgttgacgtgtcccatttacggcctattgtgccagttaaagtggattgccgtgcttggtggcgttatgctgtgctggctggctggcagcaggtgaagcttgctgttggtgggccccagatcatcagttccctgacaaacccattgccatggtcagctcattggcacatggaatttgcattgatggtagttgatacagcatgtgaagcaacccatgtctgtggggtagtgcatttaaaggacagcatggagttacaacaacgtacagcacaagtggtacaaggaactcggggggagcgtagctgcgtaggagtcgaacccaattactatgttctgtctaacagaattggttccgtcaaccaggcgaattggcccttctattggttctcatgggagagaactaggcatctctgccagcttcgtcgacgctatgttcacttgtatgccacattattgcaacaagcatctaatgttgatatgtccgaaattcggcagatagagaaaattctggacacaaaagtcataatactttggaggttgttgggacatgctaaagttgagaccgtgaaatcaaaggaaatattacataagaagggggcatcaaagagaagatggtggacttttggatggaactcggctgaattaccttctgaagagaatgcccttctagaaccgcagttagatgaggaggagagattaacaaaagaagaatggcaggccattaataagctgttgagttaccaaccagaagatgatctgtcttccccccttgaaaaagtctccccgaatacaacccgattcttggtggatgtgtctattggccaagctgctgcaaggatcatcaatattgaccggacagaaattttgtgtggtagatttgagaaacttcaagtggtcacgaaattgtatcccaagagtacgcggtgtgatgttactttgagatattgtggtttgtcttctcctgaaggttctcttgctcagagtgttgtcagtgagggaaagagtaatgctctagatgtcagttttgtgcgtgcgcctgtcggcttggacctggattggcagctcgtggcaaagatatcaccatgccatgttacggttttgaagggaagctatgaacggtttctagagttcattaaacggagcaaagctgttagcccaacaatgaagatagagcaggtcacacgtagagctcaggagcagcttcagatggtattggaagagcagagcagttttggacttgatattgatttggatgcaccaaaagttaggattcctttaatcacttgtcaacctttgctggggaatgaacattttgttctggatttaggccattttacgttgcatacaagggacggcacacgtgaagaggaaagacgcagtttatattcacggttttatattgctgggagggatatggctgcttttgttgtttgtgatacagctgaagacatatattctgtaccagaaaatcagcgtgtgctgtcaggtcctactgttgatgctaatcagttttgttctcttctagatcgttgtggaatgtcagtgataattgatcagatcaaagttccacacccgagttatccatcaactcgtgtttcttttcaagtgccgaatctggatattcacttctcaccaaaaagatacggcaagattgttgaactacttggtgtactttgcaagttgaagggaagtgatagtgaagattctgatagctgtgaaaattgtaacctggcaccttggtatcctgctgatctagctggtgatgctagaacattggtttggaagggtcttggttattcgctagctgaatggcatacaagttatgttgtattatctgggatgtatctgtacatcttggagtctgaagtgtcccaggattaccaaagcatggctagccgtcaagtaattgaggttccatcaactagtgttggtgggtctctttacagtattgctgtgtgttctagaggtgtggacatgcagaaggcgctggaatcaactagcacactgataattgaataccataatgaaatcgagaaggccaattggatgaaagcgcttgtccaagcaacatatcaagcttctgcccctcctgaagtgaacatactaggagaccctgtcagtacaacagaaccaagcactccaaggctgagcagcttgggatcagtggatcttcttgtgaatggttctgtggttgaaacgaagctttcgctgtatgcaaagttggacaggaagaagaaagatccagaagaggttgtaatgttagagctccttggaagtggaggcaagttccctaggaaatggttctatatcgtgagatgttgggatattcgtcagttgcaatccaccctaggcttggaagagtag

SEQ ID NO: 96234 - DNA, 615 bp, Oryza sativa
  Clone ID: PAT_MRT4530_9434C.1
atggcccggtcggcactttgtgccaggccatgccggcccatgggctgcacctccgacccaggcacgacccaccagcagcacagcccggcggtcgggcccggcccccgtcgggccgtgccgtgcttgggtggagccaaaatggcatgccatgggccaggtcgtcgggccttatggccatctatatcttcagggcccaagtcggcggggaggggagaaggggaagtgacggcgctacacgtcggggttgtcgtcaccgagggccgtcgtggtcgtcgtcgccgagggttgtcagggtcactgtcgatgaagaccatcgggccgccaacagatcagtcgccaactccgccgtccaagaagatccaacgtcgtgccatccacgtcggcgcaggcgccatcagagctcgatccacggcctccgagctcggtttgcgccaccagaactcgatccgccgccactggagctcaactcgcggagagaaagagggctttgccaccttcgcctccgaccgccctttccgccttcgtttgctaggccgccggcgggagtccgccaaaccgcatggtggcgccgtcccttctactcgtcagctgattgaccagagtgtagtcagctga

SEQ ID NO: 96235 - DNA, 454 bp, Oryza sativa
  Clone ID: PAT_MRT4530_94350C.1
attggatatgaggtacatttgagatcttttgattctgtcaggaggaattggaacatgccagctacatctgataattctagatttattatagcagttttcagattgactataagataattcatgtaatcttcctgagttatttaaccacatagcttcctaagatacatcaacataaatttgatattctcaggtggtaaaataattattccataatccagtttatagctctgtttggatcagctctatttgcatttttaatgtaatagtgaccactgaaaacaaatgaaaatggcgttgcaaggaaatgacagatgcatagtggttctattacttatgctatgtaactgcgtcatgtgcaggacaaatgtgccaaaaaccaaatgtgatatctgttggttgcttgcaggttggcacttttagtggccagagtatttttttttgcgttggttgctgg

SEQ ID NO: 96236 - DNA, 2829 bp, Oryza sativa
  Clone ID: PAT_MRT4530_94351C.1
gttccatggaaaagcttgggtaaagagccagttattgttcttattgatcgtctgtttgttcttgctcatcctgcccctgatggacagactctgaaggaagaagatagagagaaactttttgaagcaaaacttcagcagattgagaacagaaaggtaccagggagtaattcatggctatacaatttaatatcaacaattattggaaaccttaaagtcaccatcagcaacgtgcatatcagatatgaagattctgtcagcaattctgggcatccatttgcatctggcttcacgttgtcaagacttgcagccgttacagtcgacgaagacggtaacgagacatttgatgctggtgtagcattagataagctgcggaagtcggtcgaactgcataggctagccatctaccatgattctgacagcagcgcgtggaagcttgctaagaaatgggaagatctaaatcctactgaatggggcgagatatttcaagatggcattgatgatcattctggcaattctgtttgggcaatgaataggaactatttagtttaccctataaatggaactcttaactacaaacgacttggaaagcaggagagagggggtccagatatccctttagagaaagcatcacttgttcttagtgatgtttcactaactgttactgaggcccagtattatgatggcattaaactgttggaaacattttcaaggttcaggacacgtgttgacgtgtcccatttacggcctattgtgccagttaaagtggattgccgtgcttggtggcgttatgctgtgctggctggctggcagcaggtgaagcttgctgttggtgggccccagatcatcagttccctgacaaacccattgccatggtcagctcattggcacatggaatttgcattgatggtagttgatacagcatgtgaagcaacccatgtctgtggggtagtgcatttaaaggacagcatggagttacaacaacgtacagcacaagtggtacaaggaactcggggggagcgtagctgcgtaggagtcgaacccaattactatgttctgtctaacagaattggttccgtcaaccaggcgaattggcccttctattggttctcatgggagagaactaggcatctctgccagcttcgtcgacgctatgttcacttgtatgccacattattgcaacaagcatctaatgttgatatgtccgaaattcggcagatagagaaaattctggacacaaaagtcataatactttggaggttgttgggacatgctaaagttgagaccgtgaaatcaaaggaaatattacataagaagggggcatcaaagagaagatggtggacttttggatggaactcggctgaattaccttctgaagagaatgcccttctagaaccgcagttagatgaggaggagagattaacaaaagaagaatggcaggccattaataagctgttgagttaccaaccagaagatgatctgtcttccccccttgaaaaagtctccccgaatacaacccgattcttggtggatgtgtctattggccaagctgctgcaaggatcatcaatattgaccggacagaaattttgtgtggtagatttgagaaacttcaagtggtcacgaaattgtatcccaagagtacgcggtgtgatgttactttgagatattgtggtttgtcttctcctgaaggttctcttgctcagagtgttgtcagtgagggaaagagtaatgctctagatgtcagttttgtgcgtgcgcctgtcggcttggacctggattggcagctcgtggcaaagatatcaccatgccatgttacggttttgaagggaagctatgaacggtttctagagttcattaaacggagcaaagctgttagcccaacaatgaagatagagcaggtcacacgtagagctcaggagcagcttcagatggtattggaagagcagagcagttttggacttgatattgatttggatgcaccaaaagttaggattcctttaatcacttgtcaacctttgctggggaatgaacattttgttctggatttaggccattttacgttgcatacaagggacggcacacgtgaagaggaaagacgcagtttatattcacggttttatattgctgggagggatatggctgcttttgttgtttgtgatacagctgaagacatatattctgtaccagaaaatcagcgtgtgctgtcaggtcctactgttgatgctaatcagttttgttctcttctagatcgttgtggaatgtcagtgataattgatcagatcaaagttccacacccgagttatccatcaactcgtgtttcttttcaagtgccgaatctggatattcacttctcaccaaaaagatacggcaagattgttgaactacttggtgtactttgcaagttgaagggaagtgatagtgaagattctgatagctgtgaaaattgtaacctggcaccttggtatcctgctgatctagctggtgatgctagaacttggtttggaagtacagtaacagagttttgtatattttattttggatgcaagggtcttggttattcgctagctgaatggcatacaagttatgttgtattatctgggatgtatctgtacatcttggagtctgaagtgtcccaggattaccaaaggtgttgtagcatggctagccgtcaagtaattgaggttccatcaactagtgttggtgggtctctttacagtattgctgtgtgttctagaggtgtggacatgcagaaggtagagatttggttcactgctttaggtattaggactatggctttcaatctaaatgggttcaatttcaaccatctgtag

SEQ ID NO: 96237 - DNA, 247 bp, Oryza sativa
  Clone ID: PAT_MRT4530_94352C.1
attatttcccacgacatcaaaaaatttcaggggtgggctttagaagaacctggggcgaaaaaactccccacctacatttgttttatatatgtgaatgcaatcgacgatacacactgtacctaactcttattacctatcctctaacatataaaggaaaaccctgtgtgcctcctccagtctcttgagctgacctatggaatgagggatgctaccaatgaacttattttctacaataacaaaggtgacc

SEQ ID NO: 96238 - DNA, 432 bp, Oryza sativa
  Clone ID: PAT_MRT4530_94353C.1
tcaacgatatatttacaaacgaaaaataatctgtgaataaaattttagagtaaaatctatcaccggtcattaaacttgtatcgttgtgtcatcccggtcgctaaactcgcaaatcgaccgtttaggttcgactgtgtcatcccggtccctaaacttacagatcactcatttaggtcctccaacttattcagttgtgtcactccggtccctaaacttggatttaaatatcatctgggtcaaataggacgggaccggggtgacacaactgaacaagttggaggacctaaacgagtgatctacaagtttagagatcgggatgatataatcgaacaactgctcgagcttggctcgtcctaggctcgattcgggctcggctcgagctccagacgagccaagcccgagcctctccgtaagttcgtgagttttgtcgag

SEQ ID NO: 96239 - DNA, 315 bp, Oryza sativa
  unsure (1)..(315): unsure at all n locations
  Clone ID: PAT_MRT4530_94354C.1
gcgccatccgcgctcaaggcacctacgctgaagcccaggnaatgttcttgtctcgnaatgaatccaagacttcagagcttgtaaaatcccntagggagaaaaaaatagggattgtcgcacacttttatatggttccggaggtgcaaggcatattaactncttcaaagaagcattggcctcacatccacatttntgattcattggtaatggcagatagtgcagtcaagatggctgaagcaggatgcgaatatatcactgtccttaggtgttgattttatgtcagaaaaatgttcggngcaatactttgatcaagct

SEQ ID NO: 96240 - DNA, 2408 bp, Oryza sativa
  Clone ID: PAT_MRT4530_94355C.1
acacgcttgtcgtctcatatgccttctccccgcgtgcggcctcgccggccccgtcctcgcctggccaaaggcgaggctgatgctcgctcgctcgctcgccaaactgccagatccgggggaatccccgcaccagatgcgcccgccggcgatgctccgatggcccgccgccgcggcggcgctcgcgctcctcctcctcctcatcgccgccgcgccccccgccgcggccttctacctccccggcgtcgcgcccaacgacttccagaagaaagatccacttcaagtgaaggtgaacaagctgtcatccacaaagacacaactcccctattcatattactcccttcctttctgcaagccagatacgatagttgacagtgcagaaaatcttggagaagttctacgtggtgatcgcattgagaattctccttacgtgtttgagatgagagagcccaagatgtgccagattgtctgcaaagcaaccattagcgataaacaagcaaaggagctaaaggaaaagatagaggatgagtaccgggtgaacatgattcttgacaacctcccgctagttgtgcctattgcaaggacagatagggatgctcttgtttttcagggtggatatcatgttggtgttaagggccaatatgctggaagcaaggatgagaagtactttattcataaccacctggcatttttagtgaagtatcacaaggatgaaaattcagatctctctagaattgttgggttcgaggtcaaaccatttagtgttaaacaccaattcgaagagaaatggaatgatgcaaacactcgtttgagcacatgtgatccccatgccaacaaaatagtaataaactcagatactcctcaagaggttgaagctgggaaggatatcatattcacatatgatgttggctttgaggaaagtgatatcaagtgggcttctcgctgggacacctatctgcttatgacagatgatcaaattcactttctctactcgtatctggaatggtggccatgatcatgctccgcactctatatagagatatctccaggtacaatcaacttgagactgaagaagaagcccaggaggaaactggttggaagcttgttcatggagatgtgttccgcccaccaactaactctgacttactctgtgtctatgttggcactggtgtccagttctttggtatgctgctggttaccatgatgtttgctgtcttgggtttcctttctccatcaaaccgtggaggattgatgactgcgatgctgctcatttgggtcttgatggggctgtttgctggatatgcttcttcccgactctataagatgtttaaaggatcagaatggaagagcatcaccttgaagactgctttcctgtttccgggaattgcttttggtattttcttcgtcttgaatgctcttatatggggggagaaatcatcaggtgctgtccctttctccacaatgtttgccttggtgcttctttggttcggtatctcggttccacttgtctttgttgggagctatcttggtttcaagaaacctgccattgaggctccagtgaagaccaacaaaatcccgagacaggtcccagagcaggcttggtacatgaaccctgccttcaccattcttattggcgggattcttccattcggagcagttttcattgagctatttttcatcctcacttcaatctggcttcaccagttctactacatcttcggcttccttttcctcgtgttcattatcctcatcatcacttgtgcggagattgcaatcgtgctgtgctacttccagctctgcagtgaggattacatgtggtggtggaggtcctatcttacttcaggatcatctgccatctatctcttcctgtatgctgggttctacttcttcaccaagctgcagattactaaactggtgtcaggcattctgttcttcggctacatgcttctggcctcattctctttcttcgtgctcactggcacaattggtttctgtgcctgcttgtggttcacgagattgatttactcatctgtgaagattgactaggcgcagagttgctatacatccggcttccaatagttctgtatgattattgtggagaattgtgagacgaggatcagaatccactttgtattttgccgattttcaagaaaatttatatcgtagttcttagtttataaaccacttatgttcattcactataaatgagatgatacatctacataacatcttacagaagtaatatgaagtaaaagactataaggctagttacgattgttatggagttgttttttggtgaaatttttttaatggactggtataagaattcaattgattatgaactgcttgtactctaaaaaaaaaaaaaaaaaaaaaaaacaccagtccgaatactactgttttctgatccc

SEQ ID NO: 96241 - DNA, 310 bp, Oryza sativa
  Clone ID: PAT_MRT4530_94356C.1
gagtgaaacagttttctcttctctatacacttgaagcaaatgattgattaacgtcttccaaggaatcagcattttcaacagcagtgttcaacggtaaagcaccaacagagaattatacacggaaagtcttttaacacttcattcttttgcttcatgtaaactctgttcaataacattaatttacagtgtttgatccatctaaaactttgatcttctagaagacatgctatggctatggaaatgagtgcattactacatcatcttgatagaattttttttaatttcttcttttttataaccaggtgttttt

SEQ ID NO: 96242 - DNA, 3279 bp, Oryza sativa
  Clone ID: PAT_MRT4530_94357C.1
atgctccgatggcccgccgccgcggcggcgctcgcgctcgtcttcctcctcctcatcgccgccgcgccccccgccgcggccttctacctccccggcgtcgcgcccaacgacttccagaagaaagatccacttcaagtgaaggtgaacaagctgtcatccacaaagacacaactcccctattcatattactcccttcctttctgcaagccagatacgatagttgacagtgcagaaaatcttggagaagttctacgtggtgatcgcattgagaattctccttatgtgtttgagatgagagagcccaagatgtgtcagatcgtctgcaaagcaaccattagcgataaacaagcaaaggagctaaaggaaaagatagaggatgagtaccgggtgaacatgattcttgacaacctcccgctagttgtgcctattgcaaggccagatagggatgatgttgtttttcagggtggatatcatgttggtgttaagggccaatatgctggtagcaaggatgagaagtacaatcaacttgagactgaagaagaagcccaggaggaaactggttggaagcttgttcatggagatgtgttccgcccaccaactaactctgacttactctgtgtctatgttggcactggtgtccagttctttggtatgctgctggttaccatgatgtttgctgtcttgggtttcctttctccatcaaaccgtggaggattgatgactgcgatgctgctcatttgggtcttgatggggctgtttgctggatatgcttcttcccgactctataagatgtttaaaggatcagaatggaagagcatcaccttgaagactgctttcctgtttccaggaattgcttttggtattttcttcgtcttgaatgctcttatatggggggagaaatcatcaggtgctgtccctttctccacaatgtttgccttggtgcttctttggttcggtatctcggttccacttgtctttgttgggggctatcttggtttcaagaaacctgccattgaggctccagtgaagaccaacaaaatcccgagacagatcccagagcaggctgggtacatgaaccctgccttcaccattcttattggtgggattcttccattcggagcagttttcattgagctatttttcatcctcacttcaatctggcttcaccagttttactacatcttcggcttccttttcctcgtgttcattatcctcatcatcacttgtgcggagattgcaatcgtgctgtgctacttccaactgtgcagtgaggattacatgtggtggtggaggtcctatctcacctcaggatcatctgcgatctatctcttcctgtatgctgggttctacttctttaccaagctgcagattactaaactggtgtcaggcattctgtacttcggctacatgcttctggcctcattctctttcttcgtgctcactggcacaattggtttctgtgcctgctttcagttattgcggtccacccaggggtcaacggtcaaccacgtatgtcgtggccagagaaaaccaatgcagaaggccgtctcctccgtcgccgtcgctgtcgccgccggagatgaggttttggtgaagatgaacgagctgatgtccatcgagactcagatcacctactcgtactactcacttcccttctgtagacctgacaatctaactgaaagtgctccgactctttggcaacttctccatggtgatcgccaacagaggtccccttaccagtttgaaatgagagtgcccaagaagtgccaaattgtctgcagagtgcttgttggagaaaaagaagcgaaggagctgacggagaagatggaagatgagtaccgtgtgaacatggctcttgacaacctcccattaagtattccaatcagaaggatagataaagatgattttttctatcagcatgggtaccatattggtgaggagcataagaggtacttcatccacaatcacttatcatttttggtgaggtacaagagggatatcgacacaagtgcttctacaatagtggcgtttgaggtcaaaccattcagtgttaagcaccaatatgaagcgcaatggaacggtgcaaactctcgtctgagcacatgtgatgctaatgccaacaggttcatcttatcctctgattctccaccggagattgaagtcggtgaagaaatcatattcacctatgatgttaactttgaggaaagtgatatcaagtgggcttctcgctgggatgcctacctgtcaatgacagatgatcaggctcgctggttttccattgttaactctcctgttaccctgattggtctttctgttgcaatggccatgactatgcttcgaagtctgcatagagatatctttagatacagccaacttgaaacccagaatgaggctcaaggagtggtgttcaactctttggtactcatcaccgtagccttcgctgcgctgggcttcttttctccatcaaattctgcaggcctgagaaatgttgtgttgctcacctgggtcctgatggggatgcttgctggctacacctcttctcgcctctataagatgttcaagagcggttcagagtggaagcatatcaccatggcaacagctatccagttcccgggtttcgcttttgttatcttcgcaatcttgaatactcttctacaagatgagaattcatcagccacagttcctccaaccacaatgtgtgccttggtcctcctctggtccggtatcacgccgcctctcgtgtttcttggaggatatcttgggtacaagagacctgccattgagcctccggtggagatcaacaaaactccacgaaagattcccaagcaagcatggtacatcagccctgtgttctccatcctcattggtagtatctttccatttacaattgttttcattgagctcttctttggcctcatcttcatctggtatcaccaattctaccgtggatttgggttcctcctcatcacgcttgttctactcctcgtcgcctgcgctgaaatctccgttgcgttttgctactatcaactgcgaagcggcaactacaagtggtggtggagatcattccttacaccaggatgttctgcagtctatctcttcttatatgcgacattcttcttcttcgcgaagctgagcattgttaagccagtgtcagtcatgttctactttggatacatgcttgtcgtctcatatgccttcttcctgcttacaggcacaattggtttcttctcttgtttcttcttcacgaggtttatttactcacagagggcatttggatga

SEQ ID NO: 96243 - DNA, 1611 bp, Oryza sativa
  Clone ID: PAT_MRT4530_94358C.1
atgcagaaggccgtctcctccgtcgccgtcgctgtcgccgccgtccgccggccaactcgtcgttgtcatctcccagcacttccgggagatgaggttttggtgaagatgaacgagctgatgtccatcgagactcagatcacctactcgtactactcacttcccttctgtagacctgacaatctaactgaaagtgctccgactctttggcaacttctccatggtgatcgccaacagaggtccccttaccagtttgaaatgagagtgcccaagaagtgccaaattgtctgcagagtgcttgttggagaaaaagaagcgaaggagctgacggagaagatggaagatgagtaccgtgtgaacattgttaagcaccaatatgaagcgcaatggaacggtgcaaactctcgtctgagcacatgtgatgctaatgccaacaggttcatcttatcctctgattctccaccggagattgaagtcggtgaagaaatcatattcacctatgatgttaactttgaggaaagtgatatcaagtgggcttctcgctgggatgcctacctgtcaatgacagatgatcaggctcgctggttttccattgttaactctcctgttaccctgattggtctttctgttgcaatggccatgactatgcttcgaagtctgcatagagatatctttagatacagccaacttgaaacccagaatgaggctcaagtggaaaccgggtggaagcttgttcatggagatgtgttccggcctccatccaaccctgtcttgctctgtgcctatgcagggagtggtgttcaactctttggcctgagaaatgttgtgttgctcacctgggtcctgatggggatgcttgctggctacacctcttctcgcctctataagatgttcaagagcggttcagagtggaagcatatcaccatggcaacagctatccagttcccgggtttcgcttttgttatcttcgcaatcttgaatactcttctacaagatgagaattcatcagccacagttcctccaaccacaatgtgtgccttggtcctcctctggtccggtatcacgccgcctctcgtgtttcttggaggatatcttgggtacaagagacctgccattgagcctccggtggagatcaacaaaactccacgaaagattcccaagcaagcatggtacatcagccctgtgttctccatcctcattggtagtatctttccatttacaattgttttcattgagctcttctttggcctcatcttcatctggtatcaccaattctaccgtggatttgggttcctcctcatcacgcttgttctactcctcgtcgcctgcgctgaaatctccgttgcgttttgctactatcaactgcgaagcggcaactacaagtggtggtggagatcattccttacaccaggatgttctgcagtctatctcttcttatatgcgacattcttcttcttcgcgaagctgagcattgttaagccagtgtcagtcatgttctactttggatacatgcttgtcgtctcatatgccttcttcctgcttacaggcacaattggtttcttctcttgtttcttcttcacgaggtttatttactcacagagggcatttggatga

SEQ ID NO: 96244 - DNA, 213 bp, Oryza sativa
  Clone ID: PAT_MRT4530_94359C.1
tctctccagtgctgtgagagggcgagtgcttatccaacaatcaacaaccaaacagtgaacaaacgggagaatgtcggagggacggcgaaggcgatatgcctcctcgccacaacaagtccccacaggcgaacagccacaggagatcccggtttttgggtgcagccagcggcggatggatcggcgagcgacctccggaccaggaggcgagacccg

SEQ ID NO: 96245 - DNA, 180 bp, Oryza sativa
  Clone ID: PAT_MRT4530_9435C.1
ggagcaaggattttggatttttttggaattcttaaagaattataataaaaggcattttccttcgtccattttattttgggtacttagaacactggcacgcccgcacattttatttccctggggggggagattttagttaaaattttttcaaaacacatttattttgggcctgagatcttc

SEQ ID NO: 96246 - DNA, 182 bp, Oryza sativa
  Clone ID: PAT_MRT4530_94360C.1
gggggaacttacaacctttaagcatttatttcctgctcagaaaaaaaacgaggattggttggaatccgaagagagaacgcatttgggcctaagtaacattcaaggggaacaaactgcactgccttgcacttggagggagttccatttcattaacagaacaggggggttatttctataggaac

SEQ ID NO: 96247 - DNA, 2108 bp, Oryza sativa
  Clone ID: PAT_MRT4530_94361C.1
cccgcgtccgcacaagcaagggaaaaggacacgaggccgagggagggagtttggcagttgctcgctcgccaaactgccagatccggatcccgcaccagatgcgcccgacggcgatgctccgatggcccgccgccgcggcggcgctcgcgctcgtcttcctcctcctcatcgccgccgcgccccccgccgcggccttctacctccccggcgtcgcgcccaacgacttccagaagaaagatccacttcaagtgaaggtgaacaagctgtcatccacaaagacacaactcccctattcatattactcccttcctttctgcaagccagatacgatagttgacagtgcagaaaatcttggagaagttctacgtggtgatcgcattgagaattctccttatgtgtttgagatgagagagcccaagatgtgtcagatcgtctgcaaagcaaccattagcgataaacaagcaaaggagctaaaggaaaagatagaggatgagtaccgggtgaacatgattcttgacaacctcccgctagttgtgcctattgcaaggccagatagggatgatgttgtttttcagggtggatatcatgttggtgttaagggccaatatgctggtagcaaggatgagaagtactttatccataaccacctgatatttttagtgaagtatcacaaggatgaaaattcagatctctctagaattgttgggttcgaggaaagtgatatcaagtgggcttctcgctgggacacctatctgcttatgacagatgatcaaattcactggttctctattgtgaactctctcatgatcgtgcttttcttatctggaatggtggccatgattatgctccgcactctatatagagatatctccaggtacaatcaacttgagactgaagaagaagcccaggaggaaactggttggaagcttgttcatggagatgtgttccgcccaccaactaactctgacttactctgtgtctatgttggcactggtgtccagttctttggtatgctgctggttaccatgatgtttgctgtcttgggtttcctttctccatcaaaccgtggaggattgatgactgcgatgctgctcatttgggtcttgatggggctgtttgctggatatgcttcttcccgactctataagatgtttaaaggatcagaatggaagagcatcaccttgaagactgctttcctgtttccaggaattgcttttggtattttcttcgtcttgaatgctcttatatggggggagaaatcatcaggtgctgtccctttctccacaatgtttgccttggtgcttctttggttcggtatctcggttccacttgtctttgttgggggctatcttggtttcaagaaacctgccattgaggctccagtgaagaccaacaaaatcccgagacagatcccagagcaggctgggtacatgaaccctgccttcaccattcttattggtgggattcttccattcggagcagttttcattgagctatttttcatcctcacttcaatctggcttcaccagttttactacatcttcggcttccttttcctcgtgttcattatcctcatcatcacttgtgcggagattgcaatcgtgctgtgctacttccaactgtgcagtgaggattacatgtggtggtggaggtcctatctcacctcaggatcatctgcgatctatctcttcctgtatgctgggttctacttctttaccaagctgcagattactaaactggtgtcaggcattctgtacttcggctacatgcttctggcctcattctctttcttcgtgctcactggcacaattggtttctgtgcctgcttgtggttcacgagattgatttactcatctgtgaagattgactaggcgcagagttgctatacatccggcttccaatagttctgtatgattattgtggagaattgtgagacgaggatcagaatccactttgtattttgccgattttcaagaaaatttatatcgtagttcttagtttataaaccactgatgttcattcactataaatgagatgatacatctttgatatgaggttatataaggctaattacgattgttaatttcatatggcagagcatatttctc

SEQ ID NO: 96248 - DNA, 260 bp, Oryza sativa
  unsure (1)..(260): unsure at all n locations
  Clone ID: PAT_MRT4530_94362C.1
atctagcacacgcacgcacgcacacgcgcgcgccgaccgagcggatagccatgtcgacggaggcgctcctcgccggcggaggcggcggtggcggtagaggcaaggtgaatatgacaagtgagcactgatgactacggtcangttgagacgtcgacacatttttagctgagatactcagaagatacaataagagtgcccagataagagttttggtgatcatctggtacaaaatatataggacattaatcatggggaaacat

SEQ ID NO: 96249 - DNA, 1139 bp, Oryza sativa
  Clone ID: PAT_MRT4530_94363C.1
tttttaagggataacaagatcaagcggatgcagtaaagagagtgctggaactttatgcacaaggtattgttagggttctgactgggttaaaaggaagactcactgggtgtcataggaattgatgatacaatcaaagtatggtggcagcatggggtccaaagatatgtggttgtttaatcaaccgttgctagctcaacaggcgtggagattgctagcccatcccgacagtttgtgtgcacaagtgttaaaagctaaatactacctgaatgtgtgtttgagtgatacaacgttaagtggtaatgcgccaccgggatggagaggaatcgaacacggggcttgagcttctgaaaaagggtttaatttggtgagttggtaatagcaagtcaattagaatttggagggatccctagattccgagagattattcgaggagcctaattagagtaaaaggtcgttgtcgtctaaagtgagtttcataactgattgggggagaatggaacttaggattccaataagataaatagaattttcctgctagttgatgcatcaagaattttcaaaatcagaatttcttaaagaggggatgaggactgcctagcatggcactcgaagaaaatagatcctttattgtttgcagtgcttacaggtagcagtaagactgagagatgtttctgagggtggatctccttcaacctcagcagacgatggccagcgaacaatatgggacgtaatttggaaatatcctgtgccacaaaaagtctggatatttgcttgcagaacagccactgataacttgacaaccaactagaataagaggaagagatgtctagtgcagcaagggatttgttccttatgtggtacagttgttgaagacactttccatgctctttgtcaatttaaccatgcacattcgttgtggagggctgtgcaagaggaatggctggccatgccaagaataagaccacataatacatgtctggattggttattactctatttgatgcatcttctctgagattgagcaatttatgatcctaatgttgctttggcgcatttgatatgtccataatgatattatggcatcaagaaggtttctagcaaattatgttgatagtctactccttatcaagcactgccca

SEQ ID NO: 96250 - DNA, 1171 bp, Oryza sativa
  Clone ID: PAT_MRT4530_94364C.1
ttttttttttttttttttgatatggcaaccaatcactgaaataatatgcaccaatccaacaggatgtgcctgccgccgccttcgccaccaggtgccaaaagccgagttcatcctagttcatcacatgggcatccatcgagcagatgaccagaacggcagtggtggcgacggcgtcctggttccgagctggaaccttggcgatccctcttctcttcctctcctcctacctccaaccaccggcggattgagagggtggtccgggtgttccccggaccacccaaaaattctcgagcccaaggcccaattaaatagatatgcttcagcactcagctctgttggcgcctcctcctcagcagcttcagtcttctcaccaacatcttcctggttgacgtcagataagggtctaacactatctcctctgctcattcccttcctagcatctgacctccggcaatcgagtggcgacgtgaaggcaaacaacaagggccgctcggaggggtgttacatccggcgccggagtgcaagtgcggcgaacggcggcaggcgttgtggctgcatgtgggcagccagacaagctgcaaggaagagcagggcggcatcatctcctccttcccaggcgccaccttctccaacacccaccacctatttgacgaaatgccccaataacgccaaccctcgggtgatggtgagctcaagccacatcgacgaggagactgctccgatggtctacctagagcttggggatggcgaggacaaggttcacgactcctacatcgtcaccaagaattttcccgaggtcacgtctaccatgtgttcgatgaaatgctccagccccgacaccgagcccgatcttaccatgactgcggtggtagcgtgcgccaccactgccactgcatctatggaggtagtatctgttgaggacacaacaggagtcacctacatcgacacctatgactattccaaggtgacgcatgtcaagcgttcgaaagtcggccttgacgtcgatggtggcacagaccaagatgtggtcgctttccagaccatgatgggtgtgtcgaggattgttctagcatccatccagcccatggccgacttctcaccaagatatttattcaacatcaggccaaacacattggtgtccactaaggtcctgtttggttccatgggctaa

SEQ ID NO: 96251 - DNA, 162 bp, Oryza sativa
  Clone ID: PAT_MRT4530_94365C.1
cccacacttccgtatctattatgtgcatacggattaattattactcaataatgccacacaggtatcgattgctagcgagatggattcatcaacaatatcactatatctatggcaagagctactgagatcttactgcccaaattaaaatgccgagaatggatc

SEQ ID NO: 96252 - DNA, 210 bp, Oryza sativa
  Clone ID: PAT_MRT4530_94366C.1
cattatgcctcaattatcaatttgatggaaccgtatcaagcctcggggatggtaacaaaccacccatctgaactagctctatcaagatgggggcaaacatcaagtgattcctggggcttaaacccccacttagtttacaggcacaaaactagcttatacctcccttgttatgagaagaccaagggcaacttctggcgctcggagacgtac

SEQ ID NO: 96253 - DNA, 255 bp, Oryza sativa
  Clone ID: PAT_MRT4530_94367C.1
atgcggcgattccgatccacgatcgtcgtcatcgctgaggacgatcatggggcgggagacggattcccggaggacgatctgggggcgggagacggattcatggaggatgatctgaaggcggcggagcagttgatgcagctccgatgtagcggcggttggcaggaggaacaggccgacgacgacgacgacgacggcggcgactggtggggctggaaaaggaagcgcccgcggtaccggtcgctctcggagctctag

SEQ ID NO: 96254 - DNA, 225 bp, Oryza sativa
  Clone ID: PAT_MRT4530_94368C.1
atggccgacctcggcgaacctatcaccgagtgcacgctagtcctcgcactttcacgagcaccaccaactccacctccgggaacggtggcaacaactgcaatcactgccatgggtgtggcaatggagatagcggcaacggtggcactgctcaggcctccgaacaaggtggcggcggcatccaagccacccactcaggccaacaggctgcgggagagtggcaactag

SEQ ID NO: 96255 - DNA, 285 bp, Oryza sativa
  Clone ID: PAT_MRT4530_94369C.1
atggagatgcatatatatgatcctggatcggctgaagcagctagcggcgaggccaatatatctcgccggccgccgcaactacgaatgtcatgcgtgcaacaacttgctctgttattgcttcttgctgcagcttcggtcgaccttcctaaggagctaaagcaactattcatgcctgcctctttttgttccagtacatattcatcccggccaacttatgttacagatatttcttttacacgtaaagggtatggccggtccttaaacttattcagctttatcatctaa

SEQ ID NO: 96256 - DNA, 2504 bp, Oryza sativa
  Clone ID: PAT_MRT4530_9436C.1
ccatgccatatgaaagtctcctttggaactcaccagttcagttcgagccatgaattgtcaaaatggcatgcacttgaatcaagcaagatcgatcgaattgaagcacgaggtgaacgacgagcttagctttcggtttggttagcttccatcaacccagtgttgttgaaggtgacacttaaaaaattcagatacacacttagaatttacatacattaatatcgaccacgtcggtaaattaaacaaacatgattgaggctgtatatttttgtgtgcctactatatttgcttcaattgacttcgatcgcttcaattgacttggatcgagagagatgcaggtttactgattacggtcgtacaaactcagatatcttggatagcgattgatggaagccaacacgtagtgtatgaacggaattgatggtttttgagcgaaacgtatcgctcctaacaagtcataagttgatcatatcttgcttagccatgaggttggcaacttgccatgatgcatgcaacacgaaccaaaactagattgtgccactagcctctgctgacgacaattgtgcaggtaagtacagtaccctgatatggttgtgttggtcttggactcttggtagtagtagagatgagagtatctcaggtcttttcatccactgtttagtctcaccacaaaaatttcattaaaatcttgccccaaaattgtagtatgcctataaattcggcagagtgacggtttggcatgacaccaacgatccagatggttacatcttacaggaaggaagcattacaagtcattcgctttcatttgggctggccgatggctctgttggctgcgcagcatcttcagatgccgtctccacggtctctgcagagtcatttgaagttggtaaatttgggtcatcatcacttacttcctcgtcccagtaaccctccagcaacttcatgactaacttgtaaatggcatcattgtcgacttcctgcagatcttccagtttatccaaacccccacattctaaaataaactgtgcatacgggttcaccgtggaaccctgcccctgcttccccactgcacccgcctgaagtatgttttgaagaccttccaggcacgcatatactaggtcagcatcttggtaagtgagaacattgcagagtggctccaaacatcctcgactcaccaaatattgaatttgatcatttgaaccaccagacgcagcatttgatatagcccaagcagcttcctccttgatatccttctcggaggtctttaataggaaaatgagagggcttataacatctgcatcaattactgcctgaatattatccttgctgccagtggagatattagaaacaattagacaagcttgcttcttgatgctctttgggtaatttcgtgctagcaacggggccaaataattaagaatgtcattttctactaggacctgcacttgagcatcatctccagaagagattctcgcaagtaccgtaatgacaggaagcaggatattagctgatgcatgcatcaaaagatttacaagttgagggcaagcacccgcatctagcacatgttgaattccgtcagatacaccgtcacatatataacaaagagcccagcatgcatcacccagtatcttttcgtcgactgaatgaataagctggctgattatatccagtattggcttcacttgcacttcagctggtaattttccaaaacaaaggtttgacaacgcccaagtggcagtcctcagaactggaactttcatgccttctctaaattgggcaagtaatggtgtcacagcaccatgatcaaggacgatctctctgcaggtaggcacgtctgcagctatatttccaagagcccagatagcctgatgcctgatattagcatttgcagattctaagagctcgaccaaccttggaacagcaccacattctgcaactagcaatgtatagtcagatgcagctatgttggtaagaacccatgccgcctccatttgtagctgaggatgctcatgtcttgagaggaaatcagaaaaccttggcaggacatctgctctgatgatttttatcacggttgggttcttctcatctgaaaggagtctcctgaattggatcgtggcttctaactgactagtggtatcatctgaccagaccttctccaccatttctgataggccttcaagctcagagtcggcggcagtcggaggaacggattcggcgggaggtgaggacgggggcgaagagggtgcagaggaagggggagaggtggcggtggtggtggtgggcacatcatcggcctgagatgagggggtcgcggccctcgcgggcgggatgggagtgggagtgggttcgtctcggcggcgcttgaagaggccggcatcgcggttgctgcggcggacggcgaggaggcggtcctcgcggcggcggcgcgagcgggcgacgtcgacgccgggcttgtaggcggcgaggcgcgcgtcctccgacggccgcggaggtggggctcgcggcat

SEQ ID NO: 96257 - DNA, 440 bp, Oryza sativa
  unsure (1)..(440): unsure at all n locations
  Clone ID: PAT_MRT4530_94370C.1
ccgtccnngagcggccattgatatatggaggagtngagaagaagggtganatgtgctccnnttctgtgtacccnntggtggnntaggccatgatgtgtgagnnntgggcaacctnnactccgtgttcaagggtggatnccctacnngcggcggcgaaagaagaggcngnngcggcggnncggcgaacgaaaggagggaatcccgcntnnccggtgcctttatccnnctcgccggcttcgcgccgcgatttcagcgccaatgttcttgtcattgtcttttcnngcccccgtnngcccgtgcccgcttcatggnanntcgtcggcngnntcgggggccgatctcacgccggatgaaggacctanncgcccnncggagaaccattttcgtgcttcgacacnnccgagacttcnngcgccgnntgatccggggnnngcccaacc

SEQ ID NO: 96258 - DNA, 607 bp, Oryza sativa
  Clone ID: PAT_MRT4530_94371C.1
ggaattcggcacgaggagtaagtttgactgcctttgtgatactattatgatttcttcagcagtattaaagtcattatcattttatattaaatttcaaaactaatggtagcccaaaacaaattctgacacaagtttgttagtgtcgtaatcaatacttccataaggtaaattaaactaggaatttaatgttggtggccaatatgaggatcctatactaaacatttcatgcccatagccccataagtaaggtttctttctgatccctgccatttcatcatcattacatcgtatttccttctgtatttcatattcatttgtacgtatattcaatgtttccttgataacaagttaacaaacaaaatactcgtgaggaattatttttcactcattactcattagtgttttggggaggcccttcccactgtggcaaatactttattattgttccattattctgattgactactttgtagtaatatagtgtatcatccctatcttctagttttttttaggatatggcctgtaatttgaaagggcacacgtgagatctatcattgtttattgggtctttctaggaataacttttagccaaatgcccttgtgttgc

SEQ ID NO: 96259 - DNA, 240 bp, Oryza sativa
  Clone ID: PAT_MRT4530_94372C.1
tttcacttgacacgctaccaccacggatctggtccctcctatagcttaggccacatccaaatccaagctggcgacaaatacaatagctattaatggctccactaggatggctaagctaatggcacttgatcccctgaatagtgacgacttgaaaggagggcccgaggacaacatgtacattaccacgaactacatcacatacttgcaccagacagacactatgcactatcacctaaagga

SEQ ID NO: 96260 - DNA, 390 bp, Oryza sativa
  Clone ID: PAT_MRT4530_94373C.1
aacgggttatggtttttattaaaaagacgctctcaaaacatttttgaattataaatgaagaattttcaccaaggtgctctatgcaacaccaatgttggagggttttcaacaaataacaattttactgactcttaagactggccttccattacacaaaaacagaactcaattcttcctttaaacgccacacgccaaacaaaatggtcactgccaatccttatttggaaaaaatttgcggggaaaaacatttatcaccaaggcccggcctcctccatctaaatacatttcctctctaacaaacataaaaggcacaacatcttaacctccaaatcttaaaaattgctttccttatcaaacggactccttggcaattttttatgcctttgcaat

SEQ ID NO: 96261 - DNA, 623 bp, Oryza sativa
  Clone ID: PAT_MRT4530_94374C.1
gcacgaggatcagttctcctcatggatgggcggcgatcgcgacgggaatccgagggttacaccagaggttaccagggacgtgtgcctgcttgccaggatgatggctgccaacatgtacttctccaagatggccgatttgatgttcgagctctccatgtggcgctgcaacgacgagctccgagctcgtgccaacgagttgcaccggaagtcctcaaggaagtacgccaaatactacattgagttttggaagaagatttctccaggagaaccttaccgcattatactcggcgatgtgagggacaagctgtacaacacctgcgagcgtgctcgccagatcttgtcgaagggaatttctagcattcctgaagaccagacttacaccaatgtcgagcagttcttggagccgcttgagctgtgctaccgatcgctgtgcgactgcggcgacaagctgatcgccgacggcagactgctcgacttaatgcggcaggtctccaccttcggcctctccctcgtcaagctcgacatccggcaggagtcggagcgccacaccgacgccatggacgcgatcaccacgcacctcggcatcggctcctaccgggagtggcccgaggagcggcgccagg

SEQ ID NO: 96262 - DNA, 426 bp, Oryza sativa
  unsure (1)..(426): unsure at all n locations
  Clone ID: PAT_MRT4530_94375C.1
ccggtcgaccccgcgtccgcgctctcccacccttcacgccgccgcatgtccacgccccggcgatccgagcacaagcataggctggctcgatcacggttgttgctgtgtcataggcccggtgaacgaccttgttctgggagtggttttgctgctggatgagatggccttggcgagcaatgctttttctcttattagggggtgtgggggggggggtggcgtaccgtgttttgccgcgcccttcncgctttgttccagtggcgcggnngtcctggtgtctggcgngtgnttgggtgtggcggactactncttccctcttcncttctggtgcgtctcttgtctctctcctcccggggggcggtctnncngggccgccttttcctggttggcctgggnncctcctcngcngttcccccttccgggcccgcc

SEQ ID NO: 96263 - DNA, 3782 bp, Oryza sativa
  Clone ID: PAT_MRT4530_94376C.1
gcacgagcccccccctctttttttttttttttttttttttttttttttttttttttttttttagcgccactccaggttaatctgctacgttactgaaagaaaacagtgatcacggttcaagctagaaccaggaaatccgtgtaccatcactgctaaaaaacagagatcactgaagaaacaagaacagtacgatctgttcttgacccaataagcgccagaaacaagtcagcaacaccaatttacagtctcaatccactcccaccaatcttctctacaaagttttaaccggcaaggccatggtgcttttgcatcgatcagcccgtgttctgcatgccggcggcgatgcccttcatggtgaggatgagcgtgtcctccagcccggggtcgtactcgctgtttgggttgagcttcaccagcttctccgccaccgccgacgagcccagaagctccttcgacagcggcggccgcgtctccggcctgaacccgccgtcccggatccgcttcagcgtgtacgcctggcacacgttcagcgccgtgatgtacgagtcccgcagcatcagccgctgcctcaggtacggatcactctccaggagatccttgtgcccagcaacttgcaggagcaggcgctgtgtctcgacgtagttggctctgagctgctcgccgaatggacgtaggtcgtcggggacgaggagctcgtcgtagagtgcggcgatgccggggtcgcccttggcgaagaccatctcgaggaggtcgatggtgacgcggaagaagggccactcgtcgtacatctcgcggagcgtggcgaggccgccgccggcgtcgctctgctgcatggcgtgcctgaacgcggcgccgaagcccagccacacggggaggtggaaccgcgtctgcgtccacgcgaagatccacgggatggcgcgcagcgactcgatgccgccgccgggcttccgcttcgacggccggctgccgatgttcatccgcccgtactccgtctccggcgtggcggcgcggaagtactccacgaagcgcggctcctggaacacgatggagcggtactcgtcagtggccaccgtcgccatgtcgtcgagcaggcggcgccactcgggcttcggggacaccggcgggttcatgccgtgctccagggtcgccgccgtgaacctctgcagcgtccggaagcagaggttctcctcgccgaacgacttctcgatgacctcgccctggacagtcacgcggagcgagccattgacggtgttcggcggctgggacaggatggcgaggtggctcggcccgccgccgcgccccacggtgccgccccggccgtggaagatggtcagcttcacgccgtgccgctccgccacgccgacgatctcctcctgggccttgtacagctgccacgccgcggacagccggccggcgtccttgccggagtcggagtacccgatcatgatctcctgcttcccgtcgatccgctccttgtaccagtcgacggagaagaggagctccatggtggcgcgcgcctgctgaaggtcggcgagcttctcgaacagcgggacgaccctcaggggcttcttgacgccgcactcccgctgcagcagctcgacggcgagcacgtcggacggcgcggtggccatggagataatgtacgcgccgaagctgtcggcggggagctcggcgatgacccggaacgcgccgagcacgtcggcgacctcctcggactgcggcaggtcggggccgaagagcgggcgcctgccgcggagctcggagacgagccactcctggcgccgctcctcgggccactcccggtaggagccgatgccgaggtgcgtggtgatcgcgtccatggcgtcggtgtggcgctccgactcctgccggatgtcgagcttgacgagggagaggccgaaggtggagacctgccgcattaagtcgagcagtctgccgtcggcgatcagcttgtcgccgcagtcgcacagcgatcggtagcacagctcaagcggctccaagaactgctcgacattggtgtaagtctggtcttcaggaatgctagaaattcccttcgacaagatctggcgagcacgctcgcaggtgttgtacagcttgtccctcacatcgccgagtataatgcggtaaggttctcctggagaaatcttcttccaaaactcaaccaaagcaatgaagagatcggacccgatttcttgggcggcaggggtttgggcgacgaactgcgagcggtagaagcacggcttggtgtagtcgtcgtgcaggtgccggcgagttcgacgcgggccggctctggcgaggaggcggcaggtaccggcgaaggggcggcggcgacgctcctgtgtcggggagaaggcttccgtgggcgttggcatcctcaccggcgggaagcccacggcggcggcggcggcgccctcaccgggggggctcaggaggcgacgaagcgcttcaggacgggcagcgatgtcggaaaccaaggcggcgtcttcgatggcggcgttgaggaagctggtgaagcgtgcgggctcctggtgcttatgcagatccgagacggagacggtcgcagcaggcgtgcagagcgatgcaatgtagtatttggcgtacttccttgaggacttccggtgcaactcgttggcacgagctcggagctcgtcgttgcagcgccacatggagagctcgaacatcaaatcggccatcttggagaagtacatgttggcagccatcatcctggcaagcaggcacacgtccctggtaacctctggtgtaaccctcggattcccgtcgcgatcgccgcccatccatgaggagaactggatgaggggggcgttgtaggggaggcgctcgtcgatgccgatgttcttgagcgctgtgtcgacgcgccggaggaacttgggcacgccgttccagatggtgtcgtggaagtagctcatcccggcgcgcatctcgtcctgcggcgtcggcggcgtccgccggatctcgtccgtcttgaacgccgcgagaatctctctctgaagggcctcgtcgatctcctgctcctcgttgtcggagatgccctcgccgcagagctgtgtcaggcagctcctaatgcttgcgtgcttctggaggagtgaacgcctgacggactgcgtggggtgggcggtgaggacgaggtcgatggtctggctgcggagcgcatcgaacacctcgcggggggacttgccaaggccgcggacgaggcgctggaacgtctcgtcgatgtcggactcggtgggcgcggaggcctcgtcgacgaagtccccgcgccggctcgcctccgccttcttgcggtacaccatctggatctcctcggcgaggttggccaggttgagcatgtgggagaaggagctcgccaccatgatggcgtcgcccacgtccaggctcgtcaggaggccgcccagctcgcccagcctcgccgggtcgccctcgctctggtactccccggacagcctcaggcaatcctccaccacttgtctgaagtcgccgccgtggaggtcctcgaggatgtcgaggaagcgcgcgacgaggagggtctcgtagtcgacgaggcggtcgtcggcggacaccttctccggcgcgagctgccggaggcgtgcgtcgatggagtactcatgctgccgccgcccctccgcgaccgccatctcccgcaccgccgccgacgacacgttcccggctccccggacggcgcacctcggcggcgtaagaccgctcctcctccggccggggagctttacgaggagggtgaagggggcggagtggagggagatcat

SEQ ID NO: 96264 - DNA, 277 bp, Oryza sativa
  Clone ID: PAT_MRT4530_94377C.1
accccaaactctcaaatctgaaccacatatttttcaaccgaaaacccattctaataaatttcatagagcattgaaaaaccacagcttcaacctttaaaacaaactaccccaaggcacaacccttttaattcaaagggaccccattcaaagtcacaggaccaaaaccagaatttccccattgccccttttttcccgacctgaccaataaacacccactgtcacaaaaaagttttttaaaataaaagccacatttttatttttattccacccgacccct

SEQ ID NO: 96265 - DNA, 881 bp, Oryza sativa
  Clone ID: PAT_MRT4530_94378C.1
atggcgagctcaaggagcgacgggtcgtcttcttcgtctcgacggcctgctcctgtcccgtatcgggtaggtccaatggagtatcaacccccggtgttctgtcgttgcaaggcgaaagcagcgagatggatatcctggagcgtagataatcctggccggcggtattttaagtgtcgcaatgctcaggatgggggatgtgatttttttgattggtgcgacaagttgacgagcagttttcttagagagttgttgaatgacctgagagatgctgtgatgtcgcttaggatggagaaggaccagctgcggcaggagattacaaagggaatagtgggattcgatgatatcgacgagatcgtagtcgagttggttcgactagatcacccggcgacttggctcctgtaggttccggcttcgtaggctgtggcagatgtgttggtggtgagattcgatgccttaggtcctcccaggggggtcccttttataccgcgggtcagtcaatctccaagtagaactcggagatatcggaccccacacgatatagtaacgacccagttctgtccgagcatgactccttccatctgtggactccgtttctgttacgtgatggatttccttaacatgtataggaaacatccatatacgcgcaggtataccgtatcagtatacaacatacgtccaagggtagagggtatacctcaccgattcaaatttgaatttgaattcgaatttgaatttgaattaaaatttaattcaaatttgaatttaaattcaaattttttatatatagtatttctatccgtaattttttctaacttttgtttttttaaaaaatttttgtggtgtactgtagtaggaagagaggatggggaggagaaaggggg

SEQ ID NO: 96266 - DNA, 993 bp, Oryza sativa
  Clone ID: PAT_MRT4530_94379C.1
atggatctggggggagaggtggaggacgacgccagtgcaggggccgctcctaaccctggtggaatcgccgggggaaaggagggagatctcgacgcggaagattcgggaggagggagcggagcagacgacgccgccgccgccgtttcccatggcgccaccagcaccgactcgatcgtgctcccgccggagccgacgagcggccacctggcgagcctcctgcgggcgaggaagctgatcctcgtcgtggacttggaccacacgctcgtcaactccaccgcggattacgatatctccggcacggaggactacgcggcggcggtcgccaagctgctcgaccccgacggcgtctacttcggcgaacggatcatatcgagggacgagtcgccgcagccagacaggaagagcctcgacgtcgtcttcgggtcggcgccggcatcggcggcggagcgcgccgcggtggtcatcctcgacgacacggcggaggtctgggaggggaacagcgacaacctgatcgagatggagagataccactacttcgcgtcgagctgccgggacttcgggtcgccgtgggagtgcacgcactccctgtcggagcggggcgtggacgagagcgagcgcgccgcggcactgcgcgtcctgcggcgagtccacgcgggcttcttcgccggcggcggcggcagcttcgtcgcggacgtcagggaggtgatcaggcggacgcggcgcgaggtgctgctcgggtgcacggtggcgttcacccgggcgatcgccagcgacgaccaccactccgtgtggaggagaaccgagcagctcggcgccacctgcgccgacgacgtcggcccggaggtcacccacgtcgtcgccacgaacccgacgacgttcaaggcggtgtgggcgcaggtgttcggcaagttgctcgtcaacccagagtggatcaacgccgcgcatttccggtggagcaagcccaaggaggaacacttccccgtccgttggtaa

SEQ ID NO: 96267 - DNA, 327 bp, Oryza sativa
  Clone ID: PAT_MRT4530_9437C.1
atggtagatctgcccctggcttcagcttcagctccacctctcctggagctagagctcagccaaacagtttcagctccacctaaattaggagcggagctggatgaagctctctcacaaaatgaactagaaagtgccacgtcagctgaaatcattattcaaaccaccttggaactactggttttgggtgttgagggatgtgtcatatctgatattgcggttgaagggcgaatgccaaacttagcgatattgagggacctaagtgaacttattctggctcagattgtgcttgggctgaaaaggccgtattggatggcccatgagaaatag

SEQ ID NO: 96268 - DNA, 665 bp, Oryza sativa
  Clone ID: PAT_MRT4530_94380C.1
cggagtggagggcagtgttgccgtcgcgtagccatagtcttcgtcgtgtcgttgtgcccatgttgtcgttgcctggatcccctgggcaagagagtgagagtgggggagaggaggcgtgtgctgtggaggcaggtggggggagggcggtgggggcggatgggacggtggtgtggaggaggagagaggaggaaggagaaggagggggtgggagtgaggcgccagcccgcagggggagagagcagggaggaaacggaggcccaaaaaaaaatagagtgccaccgtgggcgcgtgtgtgggcggaaaaagcattatatgtgcaggttttagctattcttgcacctataatggttattgctggtggcggtaagctctgccaaagaccaaaggccagtaaaggtgtgccattttctccggcggctgacaaccgccagcatataaatatttttgctggcgggcgtcataagagaattgaaaatatccagcaggggatgtggctgaaggaagcaacaggggcagcgcgcgaggcctaccaggggacgctggtggcgaggaacgggccagaagacgacaaggaggcggcggatagcacaaggggggcggcggtgagtcccgacacagcgacccagctagaagaggagattgaggaggaggcggaggtggactag

SEQ ID NO: 96269 - DNA, 428 bp, Oryza sativa
  Clone ID: PAT_MRT4530_94381C.1
gctcccttcttttttttttttttcctatccctctttttgtttatctctttttttttttttattccaactgtctatacatttaattccttattttgtcatgctctcacacgcccccgtaaaccgagagaccaaggcgcacccaacaaacaagcgggcgggggggaaaccaagccagaacaaaaaacccaacaaagaccggggggggcacgacccaaagcacggggaggaaccccaccaaaacccccccacaaaacaagagcaaccaacaaggggccgagacccccaaagcccccccccaacccccccaacagcagggggtcaaccacgagcgggggaacccacgcgcgccgggccgacaaaacgtcgcacccccgggggagccgcccgaacacgaccaggacccccccacgagggcccgccccccccac

SEQ ID NO: 96270 - DNA, 1205 bp, Oryza sativa
  Clone ID: PAT_MRT4530_94382C.1
ctaaacaccacgggagcgcacaacaggcacgggcgacaccaaaaggacgaggacgggggcagcgagaggacggatccttaccaccacgcgacgaggcgtgggaacgacgacgacgaacgggcacggcggaggcagctcggcggtgacggagacgaacggcgaggggacgacttcggcggcgatccttagacggaggcgagacacgaccggcgcagggcttgacgacgcagagccgaggacaaggacgatgatggggctgcagtggctcacttgatggacgcggacaacgaacgaggacggcttgacgaagggagggccgacgacgagcgcaactgggaacgacgagaggacgatgacaaagaccggcagggaggcgacgaggggaggcgaggccaaggacgaccttgccgctgtgatgccgaaggtggtggaggtgcggccgaccgtcgcacaggcgaggagaaaggggtggccgaagggactccggcgtggatggcgtggaggcgacgtgcggcagcttgcagcggtttccgggcgaaacagaggagcagccggaggagaggacgatgcagcgacgtcgacggaggagacggcgacgtaggtcggtgctcgggcacaggggaaggggctgccggaggtggtgcagtggcggcaacatcactgtttacccgcgaggacgcgtctccggtggtttccccgcgaaacggaggcgacgctggggaagaggatgcaccttcgacgctgagggtggcgacgccgcaaccggacagcgcacggtcgtggcgggaggtgcggctggaggtcggccggcgccggagtgagagaaggagaaggcggggagaggcggggtggccacggggagacgcgggaggaggctaaacagggagaacgaaggatggggattccattgtataggcgcggggagggatctggccacgggagagggcggaacggaggcgggaatggcggctggcggccatggaaagcggccagggaagatgcgaccgttctcggtgattaaaagcacgaatcaagggggaatcaaggggaaagagagaggagggaaaggggattaatttccccccaataaattttggaatccaaggtttgaatcgcgcggatttgagagagggaatgactaggttttcacgggagagaagagagagaggatgccgaacgggaggaaggagacgactcccggccgg

SEQ ID NO: 96271 - DNA, 210 bp, Oryza sativa
  Clone ID: PAT_MRT4530_94383C.1
atggtgacgggcttcggcgacagacggcgcggggcggagtggccggccgggcgtgagggcgatgagaagatgcggcagggaatcagcgacagatcggtggtggaagcagggcagcaacgacgtggtgtcaagagcagcatcggaggtgaacatggagagggaggtggcgtcttcgtcaagcatccggcctcctctgttaggacccgctga

SEQ ID NO: 96272 - DNA, 1763 bp, Oryza sativa
  Clone ID: PAT_MRT4530_94384C.1
cacaaacacaatacaaataatacacaaatttgaatattacttacatctttccaaccgcgagctcttcgcgggccgtgccgtgccggcctgctacaggagccgtgccgtgccgtgcccccgaacaccgtgacatggacctccacgccgccgccgccgccacctccttccgacgccctgcccacggaacggcaagacccagtccccgtggcgccgccacttgcgccgctcggtgtcgaacgagtatgtgccgccgccgccgccgccgccaccccgagcaccgcgtccagcctcatccccctcgccggcagcaccgccaccgcccacaccagcgccgccgccaggaaccccaccgccacgtacaccgccgccccgccctccaccgcgtacgcctccgggtgccgcgccccggccgccaccgtcagcgacagccccagccccaccaccgtgttgaacgccggcgccgcgtagcaccccgccaccgccgtctgcgccccggcgccgccgtcgccgcgccgcgtcgccagcgccacgtccgccaccaggtcgcccagcgagttcccccacgccagcaccgtcgcgcccagcacgccggcctccacgccggccgccaccgccaccaccgcgacgcccggcgacgatagcgaccacgccggcgacgacggtggacacgaacagcgcgccaccgagcacgccgctgaggccaacatccccggcatcctcccctccgccgccgccgccgtcgccgccgcgtgcccccggacctccgcctccccgacaactgcgacgccgacgccgtccgcgccaggttcgacgaccacaagctcatcatcacgctccccctcgtcgccgccgccgtcgacgtcgacgagtcctcggcgacgtcgccggagttcaagacgccgccggctctgtcgccggtgccgccgccgccgccgcctcctcgtactcgtacgcgcgttgagccgccgcaccgtccacctccggtgaaaccccagccgccaccgtcattgccaccaccacctcctcctccgccgccaccgccgccgccacgtccaccgtcggtgaagccccccgttgtgcagccgaagccacagccgccaccatcattgcaaccaccatctccgccgccgccgccgccgacacgtccaccgtcggtgaagccccccgttgtgcagccgaagccacagccgccaccaacattgccaccaccatctccgccgccgccgccgcctacagtaccaccacgaactccgggggacacccctgccgttgtcgagccaaagccgcagccaccaccaccaccaccacgagctccggtgaagatgccacgtgttctcgagccaaagccctcgccgccgccgccatcgccgctgccaccgccgccagaggattattggtctccaacggcagtgactcctccggaaccaacaaagccaaagccaccgccgccatcgccgccgccgccgccgcagcaaccgtcacagcggtattggaccccgcctccggctatcacccctgaaccagcaaagcccgccgccggcaagccgacatcctcgtcgccgccgagcacaaaagactcgccacggccgccgcttcctgcgccaagtccagcagcaaacggcggcgatccaaggctaccggcgactacgccgctttcgatctcgtcgaaaccctcgactacgatctcgtcggtatcatctgttttgactactctctttgtaatctgttctcatcatcatcaatcccatataaactggactagg

SEQ ID NO: 96273 - DNA, 518 bp, Oryza sativa
  Clone ID: PAT_MRT4530_94385C.1
gcgaaggcggcccgacgcggagtcgatctgagccgtccgatctaatggatggctcagattccctccatgccgaagaagtcgctgacggggagggtgagaaccctaaccctattcccgattcttctccccttctcttcctgattcgacgtccggcgagcgagcgaccgaatcggcggcgatggtgcgacggcggtccgacgagttcgggcgccagcgcggcgacgagcgccgccgtggctccatcttcgccggctggggggcgcgctcggggcggcgccaagccgtggcgtttaggcgttttggcggtccgacaaagtggcggcgcgcaagcggcagtggttgccgtgcggctccggacttcatttttctggggggcggagcacaaggcgacgccaagccaagccttcccgtcctggcgtggcggtgatggtgggaaaattcaaggcggcgtgcgcacggcggatgccgacgtgaccgtgaggagctccggcgagcttagggagcttcaagtccggtaa

SEQ ID NO: 96274 - DNA, 163 bp, Oryza sativa
  Clone ID: PAT_MRT4530_94386C.1
gcacgaggctcaagcctatccaagtgtgaacgcaacagaggcgtcgtctcctcctctcctcgacctcgcgcggttggaggtctcgcgcgcgcgttaggcaacaagtgccctgttcgatcgaccggcaaggattgcgacggcagcgagagcggcgtcgtgcacc

SEQ ID NO: 96275 - DNA, 544 bp, Oryza sativa
  Clone ID: PAT_MRT4530_94387C.1
gcacgaggtggtgatgctatgtttatttggttttacttctcaaaaggccgacggccttaacgcacgcggcgcaaacactcctctctcatctcacgtctccgtttccattgaagagctggcgaggtggcggtggtggagggggaagggccggcggggcggcggcgggctcgttgccggcggcgtcggcgaggcgtgggtgaggtgtgccctccacctgctcgacgaaatgctcacctcgttctcacagtttcacgccgatgttatcttggatggcgtcgtggcacaggaggaacttccgtggattaccaagcggacctttagctccggacctcaggagccggtcctgatgtcacgaggtgtcaagttttgataggccttgcaggattaaaaccacaagggatgggatctgcccgagaggtggaagttctgttagctgtttgcattcgatcagatgtatttgtctcaggtaacttgttgaactggcatcctcttagaccaagaacttgcagtaagagcagctcacagagggagtctgggagtactt

SEQ ID NO: 96276 - DNA, 268 bp, Oryza sativa
  unsure (1)..(268): unsure at all n locations
  Clone ID: PAT_MRT4530_94388C.1
ggctgctgccctgctgagcgcaccgctgcgtacttgctgatcgacccacgcgtgcgtatattctgctgttcttgctatcttccctggtctgctcatctcctctgctccaggtcagaaattgctgctggttcttgcacatcggtgctcatcacgaactgatcaggagctgcagaaatcttgtgagaagctgaagaaatgggagggaagaatctggtggcgttgctcaaccggcttcnatgatacttagttgatgccaaaatacctggag

SEQ ID NO: 96277 - DNA, 1384 bp, Oryza sativa
  unsure (1)..(1384): unsure at all n locations
  Clone ID: PAT_MRT4530_94389C.1
gcacgagggccgcctgctcgtcgacctgctcgaccggctgcgcgcgctcggcgtgaagccctcgccggaggcgcgcgacgaggccagggctatcgcggccgactggaagcggagcaagcggatcgggccgcaggccgtgcttaagaaggagacgatcgccctcctgctccccgcgcgggcgtttgggttggtggatgatgtcggcgacgcgagcgaggtgctcgatctggtcgtgtcggtgtctggccgggagcgcgccgttgaggctttcgtcggccttgggctcgatcttgagaagcacatgccagttttcattcatacaatgataaagaaaggcaaacagctggaggcggttaaattcattcaagctcttaatttggtggaaaaatatcctttattgcctgttctgaggtcgtacatcagtgatgctgcaaaagctgggaacatgatccgcatcagaggagatgattctgcttgtcagactgaagccgatgcaaaagagcgcatgctgctcggagtattgcagagttcatcaaagaccagaagctagaagactacctattttggaaatagttaaacagcggctggcacatttggagaagaaaagtgtggagagaaagcgagcagctagtgctgctattgaagcagctcatgaagtaagtaagaagattcagaagcaagagaagcaacagcagcaggtgcagtcagctatgccatcacgggttccaggtaaagcagcacaaaattccttaagccaaaacatccattcggttgattccctcagtcgaccgctcatgtcgagccagagcatgggtatctcaggagtattaaatttgtaccaagctgcttcaagccagantataattccggctattagtccgagcccactgagccaacatcccgttggcatcaagaatcagaccctgaatacaccgcctgttcagactcggtatggtggcttggctgactactatggactgtcctccggcagacctaggcccgactctgtatctcctgggatcaagtgttaccgagtgcacacacatcttccagatcaaagctctattctgcagatcccctggctgctgtctcccgagcatcagataagaagggttcgtcttacaactatcgcgttgtcaagtatgtcgacatataatcctaatccataaataacctcgatatggttcttatgccccctccctctgggggactaacatgtaaattttagtttgaggccaagcagaggctgctgatcctgtgtaaattccaaatattcatatagattaatataaatgcttggctatatcatccgtggactgttaattcttgtgacatttggaccnggtctaatgatattttgctggtttttaaaaaaaaaaaaaaa

SEQ ID NO: 96278 - DNA, 1118 bp, Oryza sativa
  Clone ID: PAT_MRT4530_9438C.1
tcaagctttgtttttgacagtggtttaatggacataataagagtctccaacggcctcatccacgcctacgcctcctgcgccctcctctgctccgcccgccgcgtcttcgatgtcaacgtctcctgcagggacgtctgctcctggacctcgctcctcaccgcctacggcagggccgcccgcctccaccacgcgcgcgccctgttcgacgcaatgccccacaaaaccaccatcgcctgggccgccatcctcagcgcctacgtcggcgccgggagcttcgcggaggccgtcgacgtgttccaggagatgctcagggcccgcgtgcgccccaacagggcggtcatcctcagcgtgctggccgcgtgcggggcgctcggggcgctggagcaagggcggtgggtgcacgcccacctggttgccgcccacggcgcgatggccaaggacgggatggtggccacggcgctggtggacatgtacgccaagtgcgggagcctcgagacggcgaggcaggtgttctcgggcatggcggagagggacgtgttcgcgtacacggccatggtctcgggcctgtcggaccacggccgctgcgtggaggccatcgagctgttcgggcggatgcaggaggaaggggtgcggcccaacgaggtgaccttcatctgcgtgctgagcgcgtgcgggagggcggggctggtcgggcgcgcgagggagatcctggggagcatgtcggcggtgcacggcatggaggccggcgtggagcactacggcagcatggtggacgtgctggggcgggcggggatggtggaggaggccctggaggtggtgcggaggatgccgatgaggcccgactcgtacgtgctgggggcgctgctgaacgcgtgcgtggcgcgcggggacacggagggcggggaggaggtggcggcgatgatggcggagctggggctggacgaccgcagcggggtgcaggtgcagctgtcgaacctgtacgcggggcgggggaagtgggaggaggtggtgggcgtgcggagggggatggaggagaggaaggtggtcaaggtgccagggtgcagcatggtggaggtggacggcgtcgccagagagttcgtcgccggcgaccggtcgca

SEQ ID NO: 96279 - DNA, 1126 bp, Oryza sativa
  Clone ID: PAT_MRT4530_94390C.1
atgcggccaccgccgccaccgccggcgcgggctgagaggcacagcacgggcacggtgcaggtgacgcgggtgaagctgctcaagccgcgggacacgctgctccttggccagccgtaccgcctcatcaccgtcgacgagatgcagttggtagtaagacaagtgctagagatttgccaagttaggtgccaacacctgaactcaagttcccctacaatgaacaagatttcagtaggcagaatgccagaatgtgaaagaaaaagccccaaattccatggcagagagccacacaaatcaacgcacgtgcaccacggaggagtggtccttctcctggagcttggagatgacggacatgtacaggtcgcgcacgcggcgaggcgctggtagggcacgccggccgcggtcaccgcttctgcttccttcgcgtcgagggacgtccgattacaagaacaccaccgaagcggccgtggacgcgacgcgcatcatcctgcagcaatgcgagcgatcaaagacggtgaagcggatcatccacacggcctccgtcaccgccgcctcgccgctccgggaggacggcggcggcggtggctacaaggacttcatcaatgactgctgctggactcctctcaacttctcccaccgttacagcaatgccctgctggatgcgtatctctcatccaagaccctctccgagaaggagctgctgcgttacaacgagtcggagaggccggcattcgaggtggtgaccttggcgtgcgcgctcgtcggcggcgatagcatccagccctaccacacgctgagcatgcatcccggtgatcgtgcctcgctgggctccgtgccgctggtgcacgtcgacgacgtctgcgaggcgcacatcttctgcatggagcagccgtccatcgccggccgcttcctcttcgccgccgggtaccccaatatgcaggactacgtcgatcactttgctgctaagtacccggagatcgagatgaagctcaaagaggtggtaggggaaggcgtgagggtgaaagtggatacaaacaaacttgtggatttggggttcaagtacaaatatgaagtggatgagacactggatcatagcgtggaatacactaagaggatgggattactttaa

SEQ ID NO: 96280 - DNA, 623 bp, Oryza sativa
  unsure (1)..(623): unsure at all n locations
  Clone ID: PAT_MRT4530_94391C.1
ggaaagatccaaccccagatgtcatcctgccgcctcctcactcctcttcttctcctgtgaaggtagtttgccggaattagattttcatgtaggttgatatcccgnttgctttggtcaccattggctttgaagccataaaagtgttcagaatcaaaggggtgctgttctcattgtcttgagggggatctgatggagatgatgtcgccaacgaatccgatgcgcaagtactcgtggtggtgggatagtcatataagcccaaagaactcgaaatggcttcaagaaaatctcacagatatggatagcaaaatcaagcgtatgatcaagataatcgatgaggatgctgactcgtttgcaagaagagcagaaatgtactacagaaggcgtccagagttgatgtctttgctggaggagttataccgtgcttaccgagctttagctgaaagacatgatcatgctgctggggagctccgaagcgcccagcggaaaatggcggaagcatttcctgatgagtttcagttagacttggatgatgatttgccagctgaaaccttgtctacagaaactgaggctgatagtcgtgacatgacaccatttttcctctctttcataaattctggtgattc

SEQ ID NO: 96281 - DNA, 219 bp, Oryza sativa
  Clone ID: PAT_MRT4530_94392C.1
atgaatatgttattggaaaaattattgctgtctccagtgcacaatgatacctacaagttcatcagatttcaggatgagaagattagcgcctatatattatccaataaaataaagcatgagagctcatcttcccaaatggagtcacctcaagatattcagagcatttctactgcagtgaacattgcagggtgtggtggtctaattatgttcagcaaataa

SEQ ID NO: 96282 - DNA, 511 bp, Oryza sativa
  Clone ID: PAT_MRT4530_94393C.1
aggctgatgaggtacagggagaacggaagaacccgcgggttcgagaagacgatcgcggtacgggtcgcccagagcctacgccgagacgcgcaccccggatcaaggccagctttccagagcgcccgacgcaagcgagcgccgacgacgccgacgccgacgcgcgacgaccccagcgcaggcagtcaccaagtccttccgtacaatgctcggactttcgggtacggcgtcgtcccgtccattctgatcgccagcccagccagccggcgaacacagccgccgcaccgtcgggtgatctttgtatcaaatcatcgatcatttaggggctaggaagcccattatactcattgtgactactcacctatttttacactactactctactaattacgccttactacttagtgtaattatttttttgatcaccaaaatctactatattgtattagctccccccgcgaataaatcacagactatatgtattattcatcactaaaaaaaaaaaaaaaaaaaa

SEQ ID NO: 96283 - DNA, 876 bp, Oryza sativa
  Clone ID: PAT_MRT4530_94394C.1
atgacggtttggacggcggttttagttgatgtgcgcctgcacgacttccgtgctagtatccggagaaggggcgacggtgacacgctggaggacgcggcggtgctcggacatagatcttgctgtatggaggcaagcttctctgcaatcttcatcggtgtcacctggttcgtcctgagcgttgtaagggagcccttcgagattgtcaagaatagcgaaggagtcgccgtgctcgttctggccgttggcgtcgcaggctcgcagctcagtgggagagacctcgagcagccgatccggccagagggatgccgggggagggcagcggcggtgcgcgcggacaccgtggcggcggcggcgcgcggacgcggtggcagcggcagcgcacggacacggcagcgacccgttgcggcggcggcggcgacgtggttccccggcctcccctcccagatccgaccggagggaggccgggggagggcagcggcggcgcgcgcggacgcggaggcggcggcgcacggacgctgcggcgacccggtgcggcgacggcggctccccggcctcccctcccagatccggtcggagggaggccgggggaggacggcggcgacgtggttccccggcctcccctccaagatccggccggagggaggccgggggagggcagcggcggcgcgcgcggacacggtggcggcggcggtgcgcggacgcggcggctgcggctaccccggcctcccctcccagattcggccggagagaggccgggggagggcagcggcagcggctcctgttgctgcggcagcggcggcggctaccccggcctcccctcctagattcggccggagggaggccgggggagggcggcggcggcggctcccggagtga

SEQ ID NO: 96284 - DNA, 1868 bp, Oryza sativa
  Clone ID: PAT_MRT4530_94395C.1
tcttgagagagagagagcctttgaccgccggagcagcagcgtcaccgccatggcgggcgatcagatgcacgtgctctccgcgctggacagcgccaagacgcagtggtaccacttcaccgccatcgtcatcgccggcatgggcttcttcaccgacgcctacgacctcttctgcatctccctcgtcaccaagctcatcggccgcgtctactacaccgccgacggcgcgtccaagccgggcagcctgccgcccaacgtctcggcggccgtgaacggcgtcgccttcgtcggcacgctcacggggcagctcttcttcgggtggctcggcgacagggtcggccggaagagcgtctacggcatgacgctgctcttgatgatcatctgctccgtcgcgtcggggctgtcgttcggggacacgccgacgagcgtcatggccacgctctgcttcttccgcttctggctcggcttcggcatcggcggcgactacccgctcagcgccaccatcatgtcggagtacgcgaacaagcggacgcgcggggcgttcatcgccgccgtgttcgcgatgcaggggttcgggatcctcgccggcggcgcggtggcgatcgggatcaccgcgatcttcaggagccggttccccgcgccgccgttcgccgccgacccggcggcgtccaccccgccccaggccgactacgtgtggcggctcatcctcatgttcggcgcgcttcccgcggcgctcaccttctactggcggatgaggatgccggagacggcgcggtacaccgccatcgtcgccaagaacgcggagcgcgccgcggccgacatgtccaaggtgctccaggtgaagatcacggcggagcaggcggagatggcctcgccggtggacaagcccttcaccagcaagcccttcggcctcttctccggcgagttcgcgcggcgccacgggttccacctcctgggcacgacgtcgacgtggctcctcctggacatcgcctactactcccagaacctgttccagaaggacatcttcagcgccatcgggtggatcccggaggcgaagacgatgagcgcgctggacgagctgtaccacatcgcgcgcgcgcagacgctgatcgcgctgtgcgggacggtgccgggctactggttcacggtggcgctgatcgacgtggtcgggcggttcaagatccaggcggcggggttcttcgtgatgacggcgttcatgctggcgctggcggtgccgtacgaccactggacggcggcggggaaccagatcgggttcgtggtgctgtacgcgctcaccttcttcttcgccaacttcgggccgaacgcgacgacgttcatcgtgccggcggagatatacccggcgaggctgcgcgcgacgtgccacgggatatcggcggcgtcggggaaggtgggcgcgatcgtcgggtctttcgggttcctgtacctggcgcagagccccgtcccggccaaggcggcggcgcacggctacccgccgggcatcggcgtccgcaactcgctcttcgcgctcgccggctgcagcttgctcggcttcctcctcaccttccttgtgccggagcccaagggcaagtcgctcgaggagatgtcacgggagaacgaggtcggccagccgtgatccacccgttaattccaccgccgtccgtctgcatgcaagatccatgcatatgcgtggttagtccactagagatttttgttctcttttttctagaatccattggaatgcatatgttctttttttttctagaatccattagaggctggatgatgaaataatggccgccaattaattgttgacgacaatgtagtttagcattaggtgagtttttcatataatgaaactatcattagagttc

SEQ ID NO: 96285 - DNA, 642 bp, Oryza sativa
  Clone ID: PAT_MRT4530_94396C.1
atgacggcggggcggtttggagcggcgcgacgtcacgggcgacaggcgcgggctggcgcggcagagggtgacggcggcggcgaccaggcggcgcgggcaggcgcggcaggcgctgatggcggcggcgaccaggcgatcggccaccacgacgacgaggacggcgtggcgacgggagatgaggggcgcggcgtggcgacggggacggcaaggcgatgggggacggggcgcttggtgcggggtcgggggcgggcggagaagggtcagccgcgaagggcggcggaggcactgcagctggtggagtggatcgagggccggagctcgcagagtgacccggagccgccgccacgctcacccactgcttgccactaccgacgtcgatgctccgcagtcacgctcgcccgccaacgccgtcgctccacctaccaccagccgagcgcagctgctgccgccgccacctctcacacctctaccgctggcacgtgcccaaacaccctatgtgacaccctatataatattcgatgtgtcacgctcaaactttatctgaacaccccctttgaagccaagggcatctccatcgctattggcaaatggcgtaatggcttcctcctcgccattgatcgtcgccgtcctcggtctaattag

SEQ ID NO: 96286 - DNA, 522 bp, Oryza sativa
  Clone ID: PAT_MRT4530_94397C.1
atgggcccccacatgtcattctcactcctggacatttttcttcctccagcggtttcttctgcggcgacttcggcgcccactactaggaaaagcattttttacctgcacgtcgaccggtggcgaatgccggtgcgtcaaagggttcaagctgtcggacacgtacgaaggagtggggcggctcggctactttgtcaccggctgctcgaggtctctcccactgagctgcgagcctgcgacgccaacggccagaacgagcacggcgactccttcgctattcttgacaatctcgaagggctcccttacaacgctcaggacgaaccaggtgacaccgatgaagattgcagagaagcttgcctgaacaaatgctactgcattgcatactcaagtgaatatggatgcaagctctggtattacgacctgtacaatctgagctcacctaataaacctccatacagcaagatctatgtccgagcaccgccgcgtcctccagcgtgtcaccgtcgccccttctccggatactag

SEQ ID NO: 96287 - DNA, 827 bp, Oryza sativa
  Clone ID: PAT_MRT4530_94398C.1
attacccagtccaatatcttagcctagaccaaatgcccacccctagttctgaagtgcctattgtgctcaggagccacaacttcaatctaaggatgatcaaaaggagaagttgatggtatccgccttcagagggggtgagaaacgtgccaaggaaagagaagatgacccgaagaaggccactgaacttgccggaccaaaattctttgcaactgatgactgcccaaaaaagttccaacttggcaaagcatttttgctggatcatgcacttgatgatggtccatgggagatgagaagttacacaaagggtaaatggacgccagcaagaaaggcctaactaatttaacaattagatcaccgcctgacttcttcaccggcgaaggtttcttctggctagatttcgctgatctgcacgccatctatcatcacgaaaagatggacataaactttctcagtgcattgtgcctgatgcaatacatggatgctgagaagacaaagcaatctatcggatatctagatccaacaaggatctgtcaaacatagcataccatgacgctatcaccaaattccgagcagctcaagaacaagacgcctgaagagataatggaatataagaagggattgaacaagcagaaactgattactgttgcacagtacattggacgagtcttcttacactttcaaaataaaagagtcatccgggcagcatacaactttaacgatcattacttctgtttcattatctacccgaagtacggcaccgtgatagtcttggacccccttaattatcatcacatgacgtacaaacaatttctaacaatcttacaata

SEQ ID NO: 96288 - DNA, 500 bp, Oryza sativa
  Clone ID: PAT_MRT4530_94399C.1
cgggtcgggcattttagccttgatgtgacaggccggtggcctttaaatttttatatatggatgctgcgggatgtcgaattcagatgatataaaactattgatatgcacggtattcccccggaaccggcgacaatcctgggaatgggggaaatgtgtcctgtcccgctggagcctcgctgatcggaaagctcttcccatcggatctgtataaccagcactgttgtttccgtacagaatgggatcacggtgtggatctgatcgggttgggacacctctctaagatggatggcccccatctggtgcatccactaattccatcagacacctcgattgatctgcggagaagaggcccgaatcacggccgcccgtcttggatatgcaacacattccgactgtggccaaccttacattgggagaggttcgccggatctgactcctctaccccggacgaccaccagaaggtttagggttctaagaacactggacgactgaattttggg

SEQ ID NO: 96289 - DNA, 263 bp, Oryza sativa
  Clone ID: PAT_MRT4530_9439C.1
gttattataccatgcctgaagaaatggacgatgtttgcaagtggttcagctcagggctgggactagaccgatcctgtggctaattcgaaaatatgaacccggttcagcggctttggtagtgaggctcgatagcattgggtgagcacggaggacaaggagcacatcaatggagctgcagagacaaatcatgtaggggcgatcgctgttgaggatccaggctgacctcccggtgcatgacaggacgatgatgttgtatggggcgg

SEQ ID NO: 96290 - DNA, 757 bp, Oryza sativa
  Clone ID: PAT_MRT4530_943C.1
ccacgcgtccgcgccaacggcctcgcctactacgtccgctccaaccccaagccccgcatgcgcgccgccctctccctcgccgtaaggtcgggtcggtggtggaggaggaggacgagcgcggggtggcgcacatcgtcgagcacctcgccttcagcgccacgtcgcgctacaccaaccacgacatcgtcaagttcctcgagagcatcggggccgagttcggcgcctgccagaacgcgctcacctcctccgacgagaccatctacgagctgcttgtccccgtcgacaaacccggcctgctctcccaggccatctcagtcctggccgagttcagctctgaggttcgtgtgtcggcggaggatttggagaaagagaggggtgctgtattggaggagtataggggtggacgtaatgctactgggaggatgcaggattcccattgggcattgttgttcgaaggctccaagtatgcagaacgcctgcctataggtactgagaaggtgatacggactgttcctcatgagactgttaggcacttttaccataagtggtaccatctaagcaacatggctgtctttgctgtaggggacttcccagatacacaggctgttgttgaaatgataaaggagcactttggccagaaagccccaccttcatgtcctccaccagttataccagatttttcagtaccatcgcatgttgaacctcggttttcatgctttgtggaatctgaaacctgcaggtcagctgttggttgtta

SEQ ID NO: 96291 - DNA, 719 bp, Oryza sativa
  unsure (1)..(719): unsure at all n locations
  Clone ID: PAT_MRT4530_94400C.1
ccaaggngtccggcccagggtccggggaaaagcttatacctcccccgtatcagcttccaacttagtacatccctcctctcatcctcaccaatgttttcactgctgctctgatcatcagcaagaaaaccaatcccactgttctatcagcttcttctccccctgagatggcttctgcaaacaactggctgggcttctcgctctccggccaagagaatccgcagcctcaccaggatagctcgcctccggcagccatcgacgtctccggcgccggcgacttctatggcctgccgacgtcgcagccgacggcgcccggacgcgcacctcggcgtggcggggcatcatcacaacgcctcgtatggcatcatggaggccttcaataggggagctcaagaggcacaagaattggaacaatgagggggcttggactacaacgggcggcgcctcnggagctgtcgatgctcgtcggctccagcggcggcaagagggcggcggcggtggaggagaccgagccgaagctggaggacttcctcggcggcaactcgttcgtctccgagcaagatcatcacgcggcggggggcttcctcttctccggcgtcccgatggccagcagcaccaacagcaacagcgggagcaacactatggagctctccatgatcaagacctggctccggaacaacggccaggtgcccgccggccaccagccgcagcagcagcagccg

SEQ ID NO: 96292 - DNA, 771 bp, Oryza sativa
  Clone ID: PAT_MRT4530_94401C.1
atgtcggcggatggcggcgatcgagagcctgggggtttgattaatccatcggcgcggaggcgacagcgacagcttctgatcgacccggtcaccgtggcggcgcggaggaggcgtggacgggggcgtgacgtccggtgcccgacctgccgcagctccggcagggcgcccgccgcgtgctggcgcacgcccggcacccggaggtcaccccgggagtcggactaccgcgtgcacaggcggcactcctcccgcctcgtcccgccgcacgccatgcaccgcggcgcagatgtcagcgccccccaccgcagcaacgccgccgccggcgacgacgacgacgtcctgctgctgctcctcatgttcgccatcgccacgcctgccgagcacgcgagaccgaggtcgccatgctgcgcgccagcgctactggagactgggttgtggccttgcgggatggagagggcgcgaggggagctgaagctgaggctcgaccgtgtggatcccgaaggcgagattccgctggtggggcggatgacgggtggggcagggaaaggttgcggggcccacatggcggggaggcgtctcgggcgcgtgaacgccactagagaatgggaggcggcctgtgggatgtcgacaagtggaggacacggcgaatcgggtgcggttcgcgggacggacggtggagagcgaatcgcgccgatgagccgagccgagccgaggctgcgtatgaacagtgctggcttcagtggctcggcttgtggtagcaatcaggaggagtaa

SEQ ID NO: 96293 - DNA, 930 bp, Oryza sativa
  Clone ID: PAT_MRT4530_94402C.1
atggccggcggagataggaggaagaggaggacggagggcgtggttgcgccgccgccgctcggagcggagcggcgcctcctttcttgcctctttcttctcggtgcgctcttcggtttcgcctccgcggcgacacggacgcggcaggacatcaggtgccagttcatctcttccggttgcgtcggcaaccgcatggtcgccgtcgtcaccagcgacggcggcgagacgccgatcggcacgatcttccccgccgccgtccaggggaacaccgtcgacgtggccgtctcgaacgactcgctgcaggtggtgacgacggcatcgtgcaacgcgacgcatccggagcgcgcgccgctgatgggctttctgtatccgctcgatttccaggcccagcgcccgaaaggtgatggggccacacgtttcaacctttccgtgatgtcagcatccagagttcacggtgcgacacgtacggagaactccccccaggcgccgccgccgccgccggccgccgccaactcgcaccacgtcgccgccgacctcctgtacgatcatctccaatattcaagcaacaatggtctagaggtcgccgccgcgacgacgacgatgatcgccgtgctgatcgatctcgcggacaagatcaagaagaagaggagcagacgggggaaaggctcccggccggcggccgtcgccgtcgccatggcccttgtcatgctccttgccgttgctgcgctcgtcaaccctacggcggcggcgcggccgttatatggtggcggcggcggcgccggcgccggcggccatgacgaagcagcagctgctgctgctgctgcaccggcgatgacggtggcggtggtgaacgacgcagtcacagtcacaggacactcaggttgcaccaacgacccgaacacgctggagccttggcggtgcgtgcaccactag

SEQ ID NO: 96294 - DNA, 1063 bp, Oryza sativa
  Clone ID: PAT_MRT4530_94403C.1
atagaaaactgttatatacttattctttgtggttttaaagtcaaggctgaacaatatactacaagggaaaaataatcaaaataaactccaaattttaaaatctttgccatcagcctagtgtatgtgttgatggtcctcattttctcctacttttggatcaaacactccacggaaacttctgaactcgttcctgtttccgattggtctttaaagagtaataacactgaaatacaagagagaaagagatcaaggacaaggttatctgctcatgataacatatacacaccagaaaaaaccagccatgacgatgcaattattagggaagtcatttgcacaccaaaggggaaaaaacaagtcaacaaatcactacacacagaacagcatgcacccacaacagtgtcctgaattctgattacaagcctgattcctaaatttgtttagtatttgtacatcttggaatgaccaacactaaatggagagaatatctcttaatgatgcaatgcacatattttacatcctcaaaacttatcatatctaacaaaccttaccccttggtagtcaacttccagcggcaatcagcaatctgaatgttttcagttgatgcctcctaatctgatctaatccaagtgtctgtggtcactgttaatctgtcatctatctgcaaggccaaccggcactgatattggagattgctgatgctctgcaaacgatggaaccccattcctaatgacctttgatatctggtcagaggatcggttgaggctattttgctgaagtaactgaacgagtgacaagaatatgtccatcctagtaacattcttgtttgcctcgacgagaaatcgagccatgatcttgccatcacggagctccatcaggcccttcaagattgtcagtccaaatccccgaattgtgtctgctatctccaggaaaaatccgcgttcctcacaaagcatctccacaagcatctgaccaggtggtgaaagatcctcgatgattattgggcaaaccatggtccgtcctgcaacctcataggcccaagtggcaccaccattattgcttccag

SEQ ID NO: 96295 - DNA, 254 bp, Oryza sativa
  unsure (1)..(254): unsure at all n locations
  Clone ID: PAT_MRT4530_94404C.1
cgcgtccgcctatttcctactcaacacaaggganattccttcactcacttagctaattaatctgcnaccatgtcggacaagtgcggcaactcccactgtgctgacaagagccagtgcgtgaagaaaggtaccagctatggcgtcgtcatagttgaagccgagaagagccacttctaggaggttgtcttctgtaattattatggtagcttaaatttttgatgttcacttttccttgactattttttttttgtttg

SEQ ID NO: 96296 - DNA, 161 bp, Oryza sativa
  Clone ID: PAT_MRT4530_94405C.1
gtccaagtgtgaagaaatggagatactacccggatgatttgaagatcgccatctatctacaattgttggcaaagacagatcctcttgtgctgcaacgtggagttaccaaggcagttgcattgaattttgatttgccagttagagctgtgcagcaagtatga

SEQ ID NO: 96297 - DNA, 329 bp, Oryza sativa
  Clone ID: PAT_MRT4530_94406C.1
acgtgaaaggaaaagcaagaaaaaggcacgggggggggatttaaaaaaccgagaccgcgacccacaaacaaaaagaggagcaggcgaagccggcgcaacgcggacgaggacgatcaaggcgaaagccccaagggaagagggagagacaccagagggaccagaggaaggcgaaacacagagagaatagggatgaagaacccgaaaagaatgggcaaaaccactgaaagagacaacaggagcaggggaaaccagcaggaaataagcaggaagcacagaaagaagaggaaggacgacagaaacagaatatggggaaaaaaaggcatgaggcg

SEQ ID NO: 96298 - DNA, 1142 bp, Oryza sativa
  Clone ID: PAT_MRT4530_94407C.1
ttttttttttttttttctggtgtctttttccagcttcattttgcaagcccaatacacaagttggaagttggaaccactggtggacttaattccaacacatgagcagtacagggacagattcctaccttcacttctatcactgtcttaggttgcttgcaccagatacacaggtaaagttgaaacatatacatttgagtatgtttcctctgctttggagcaagtaaatcatgcatttgaagtagtagggaaaccaataccattatcaattgtagcatgcacatgagagcagctggacaaatcaaagcatgatcgagttaaaaatgaatgggaaacaggcaacattactacagtagtattattactccatgcctcatgcagagagcagtgctgcgaattgatctgccaggctcttcacagtcgtcggagaaactgcagattctccacccaggtaccacttctgaatcatctcggccacattcttgttctccactgtcagcttcgcctcgcccttgccttctgtcacaaatgatatctctgcaattccaggggtggtaggaaagtggaaggtgatgacggagttgggcttgaaatacttggactgaaagaattcggtgaccttctccagagcctcttcttcatcctcctcgtacttgtctactgacacgagacggtcacgcactgaactctccagctgcacgccgtattgtgatcctttgatctccttgatcaccactatcctcaacaatttctccaccggagcagaaactagggcctgaaagaagccatcatcctgcacaagctcctcggccttcttgcccttccaactctccaaatgcgctagcacattgtccttttcaagatacaccccgatggcgttgtatttgatctgaaggaaatggatctcaatgtctgtgatgccattagcaagcagtgacaatggcttactgacggttatctcctgaggaaatgggatgccctccacctccacggtggctatctctgtgcccattcttctgtagaggtaaattaataagcaatggagccgaaactgaaactgcttttgctccttgtgatgcggtaattgttgatgagagaaatagagaggagagagaatgtaaagagattagaagtgtcccggccgg

SEQ ID NO: 96299 - DNA, 262 bp, Oryza sativa
  Clone ID: PAT_MRT4530_94408C.1
ggactgttttctccaatcaaagaggcatttgatcccctttcgaagatctccgtggccttgtgagagactctacataggcgtagatgtagcctttgtgcaggtagtgacttccccgtggaagctgagatctgacttttcctttgtcccaatcgtgaatccgaaaaactcagagttagtccaagtactattgtataagtaatttacaatacggtagtgaagagcttgtgattcattatgagctacacaaccgcacagaattgaa

SEQ ID NO: 96300 - DNA, 833 bp, Oryza sativa
  Clone ID: PAT_MRT4530_94409C.1
cctcgaggccggcccgggaaaaaaatcacattccaaatcagaaacctcggacctccaacccaggatcggagcggatgacgacgagacgacggcggcgacgaggaggtggtggaagcgccgcggcggcggcggcggcgacggcgcggaagacggcgacgacctcatcccgatggacatccaagaccaggaggagatggtccggtcgctggagcagaagcaggcgcagcagagccgccggtggaggcgcgtcttcgccgggttcctcctcggctacgcggccttcctcgtctactccggctttcaccatgcggcggccccgtgggaactgcggtatcatgcttatttcatggaagatttgtcatcaccgatggtcgtagttgcagattggatagctgccctagcatgtttattctcaattaaaggattacttcactcctggaagaagtggatgtggtattcattctatgtcagcatactagtagccctcttctggacatactacctcttgaggttaccgagaattcgatgggatgtagcatggctcccgtttggccctttgattgcttctgcattgagcctctatgtggaccactctatgctggagtcaatgcaagatatcaacaccttgaggagctacatgtataactacaaggccttgtagtgtggagaatatggctagttgtatctatacatgtaataggtttgcacttttcattaactcccggtatagcttagagttcatctacttctagtttactgctaaacaatggagattcacaggtttcatctttgaatggaattattttggttaaaaaaaaaaaaaaaaaaaaaaa

SEQ ID NO: 96301 - DNA, 2895 bp, Oryza sativa
  Clone ID: PAT_MRT4530_9440C.1
atggcagccagctgcctcgcgcagaccaatgccctcttcaggaaaagcctcgtcatccagaggcgggcggggaagacgaactgctgcatcgtcctcttcccgctgctcctcttctcggccatcgggggcctccagatcgccatcaacgtcgagatgctgcgggagttcgccgccgccgcctccatcgactgcggcgggtgcggcggcggcgttgccgtggcggcgaacgccacgggggggttggactgcccgacgcggtgcgcgctgccgcgtgcccccaagtggccgccccttctgcagatcccgccgccggagcgccgcgccgtcggggacggggacctcctctcgtccgccggcgatctccccgacgccgcctcgtgcagagccgccgggtcctgcgccgccgccttccttgtcaccggcggcaaccgatcgtttgtagcaagggtgatggacaatatgttccctgctcataattcttcggcgaaactaccgtctgacatttccgctttgtctgattatgttctggcagaggcagatgatgagttggatttcaattcctttgaagtcagctcctttcttcagaagacatgcaccccaaaccagacactttcttttacatatcaaagtggcaatacaaccgagactaaacatgtgcaatgtacccaaggattaatgctctggcgtgacagtttgtggctcatcaacgatgaactctatagaggttactaccaaggaaataataagaagaagaccaatgaaatcgctgcagcttatgacttcttaagttctgatcaaggcaactttaacgtgttcatctcgtataactcaacaaaaaagtttgatgcttatgaacaagacatctcactcacttttaatcaaggagcatggcaagcacctagattggttcaagtttcacgactaatcaatatggcttcaaatgcataccttcacctaagggccagtggcctcaagatctcatttgattttgtcaaagacatgcccagagcagctcgaccaatgaggccaattgatatatcctcattaatagggcaacttccttatgtatggactatggaacttcttttcccggtaattttgaccaacattgtatacgagaagcaaaagaagctaaggattatgatgaagatgcatggtcttggtgatttttcatattggactatctcgtactgctatttttttcttctttcgctgctctatgtgatgtccttcacattatttggttctgttcttggtttaagattctttcgactgaacgactacagtgtgcagtttgtgtattacttcgcctatatgaatttacaaatttcgttcgcatttcttactgcgtcatgcttttctagtgtgaggacagctactgattatgaaatttactttgattatttggcatattgtgcctcagtgacaggatacttctacataattggttctggccttttaggagaattcttattcaggtcctatgttgaagatgttttcctctcaagaagctggattacacttttggagcttttccctgcattttcattgtatcgcattatctatgagtttgcacaatctgcattgctcgggaattatatgaactcttccgggatgaagtgggttgacttgaatgatcccaaaaatggaatgagaagtgttttgaccataatggtactagaatggtttctgttccttttattggcattctatttggatcacttcggttccttccaaaagggaataagaaaagcagcagtactatttcactcgcacattgataagaatcgttttcaagctactcagcagaccatccagcttcaagagttcaaagcttctgctgacaatgagaagacagatgttatcaaagagagagaaacggttgaacagatcttacaagaatcaaagaatagctactcgatcatctgtgacaaccttaagaaagtgtaccatggaaaagatgggaatgcaaaaaaaattgctgtcagagggctatctctttctatgccacgtgggcaatgttttggtgttcttggaccaaatggcgctggaaaaaccactcttattaacatgttgactggatttactaaacctacgtctggcacggcgtacattgaaggaatggacatacaattcgagatgaacaagatttatgcaggaatcggtgtttgtccacagcatgacttgctatgggaaacactgactggtcgcgagcatctgttgttctatggtagacttaagaatttgcggggtgcaccattatctcaggccattgagaaatctttgaaaagtgtgcgcctgtttgctggtggcattgccgataagcttgtaagcaaatacagtggtggcatgaaacgtcgtctcagtgttgcaatctctctaattggtgaccctaaggtagtttatatggatgaaccaagctcagggttggacccagcatcaaggaaagacttgtggaatgctgtcaagtctgccaagcaggacagggccataattctcacaacgcattcgatggaagaagctgaatttctatgcgatcggataggaattatcgcaaacggcagcttgcaatgcatcgggaactctaaagagctgaaagcaaaatatggaggctcatatgtcctcacagtaacaaccgcgacaggcgaggcggaggagatgaggagactggtccagtccatctcccctaccatgaacattgtgtaccacatctccgggacgcagaagttcgagatggcgaagcaggaggtgaggatctctcaagttttccgggccatggagcatgcgaagctcaggatgaacgttcttgcctggggcttggctgacacaacgctggaggatgtcttcatcagagttgccagggagagtgacagtgcatcatcctccgtggcctga

SEQ ID NO: 96302 - DNA, 1469 bp, Oryza sativa
  Clone ID: PAT_MRT4530_94410C.1
gtcttgggggaccatctctcggcatcgatcgatcgccgccggtgtcggcggcgaggggcggcgcggggatggcgagcggcaacagcggcgagccgagcacggcgccgcagccgaatcggtggtacgagctccggctgggctcctcctgccgcgacccctcccccaccgccaagttctgcacgctccgctatgaatttaagccagcatcaattgataagactcaagctgggtctctgcagaagaccaaagataacagggttactgtggaattccacaacaatcagcctggcaagccaaaggtgacatttgaaggaagccaagaagagtacaaggataatgatggtgtcttgttttttgatggtgaaacctttcgtctggagcggttgcatcgggctgtcaagagattaaggcatgtccgagttccaggagagtcttcggcagccacttcggctactactggaatgggcgaatcacattcccctccattaccgaaagttggaaagtcaccggccatgagtaaacctgctgtacactcagttcctgttgaggttgaacgcattgacattggtgaacctgaaaatccaggtctaagaaacaataacaggagcactacataccaacctgttaccacaaatccattttcattttcgcctgatccaaatgatcaagaggagaacctagacatacttggtgatgatgacaatggctcaccgaataacatgtcctctggacaaggagcttctgttcgtggttttgacatcaacataccaaaccagcttgacatagatgatgaaattgctgatgtagatgtcagtgatgaggctgatgagggactcaatgcagccgaggccctgcgagctcaagtcaatgcagaagggcagcaggatgagcaggaaacctctagctctagcgggagcagcagcagcagtagtagcagtggaagtgggagtggtagtggaagcagcagcagtgatagtgacggcagtgatggtgattcagccagctctgggggtgacgttgatatataagtttggtgtacagagttttcttgctgtgtatgccatggttcacaattttacaccagtatcaggaggtgtaagccttgaatgtttaactcatagttcacaggtaacaaaattaagtttcttctgttgtgatcttattctgctgtaatttgtttgttctcctcttggttagtctgctatgtttcttagatctagcctggagcatagcatttgtatgaaacctttgcatgatggattttcttcccaaatatgggatatattttctcttgttttgaagtacagaacggcatatattctgatatgtagacatacatagtgtgcaccatgttgtgggttagttgtttgatggaagtatctgcccactttttgtatcgtacttgctttgctttgcaaattaactcatggagctgttattttttgacaagtaatttatcatgatttggt

SEQ ID NO: 96303 - DNA, 228 bp, Oryza sativa
  Clone ID: PAT_MRT4530_94411C.1
atgaaggaccacttgggcttcggcagcgacatcgatcccgtaggggcgtcgcgagctccggccggcaacctcgccgatgatgttgtgtgcatgcagtcgccgttctgcctcgccgccaacgatcctgcgtttgctactccgtctgtctacggcctccaccggggattcagtcctcagtcgtcatcggccggcgccggcgccggcgaggcgaccacgggaaggcagtga

SEQ ID NO: 96304 - DNA, 656 bp, Oryza sativa
  unsure (1)..(656): unsure at all n locations
  Clone ID: PAT_MRT4530_94412C.1
gnaattgtaatacgactcactatagggcgaattgggtaccgggccccccctcgagttttttttttttttttttttttttttttttttttttttttttttttttttttttttttttttttttttttttttttttttttttttttttttaangganaaaaaaaggntttnncnncnttattcaaaaaacnggacantacntaccancaaaacaatngntngcaatttatttatttagttntcctttacccncaanccnacctaaaaggatnctgccgcnttanaaacttctgggtaccncttntttnggatnggattgaatgcnccnaacncnncnccnctnttntgcttnaccccctnaccccctncncttnaaatgcaatntgcttttgctaaaacnncnttngggaaaacacggaaaatggaacccttncctgcaatntgggttaccataaaattangattggncttnaatgcaatntnanccccctcccctttgtgcctccttaaaactgnatattnttgtggtaaaataaacactntccgcgggaaacccccttaaanctgtnttcccttnttnttnaaattnaaccggggnggcttaattttatccaacctttagtttanttccaatnggaaagatggttcggttaaataaa

SEQ ID NO: 96305 - DNA, 509 bp, Oryza sativa
  Clone ID: PAT_MRT4530_94413C.1
agaagaaagatgaagaaggtgggcacaaagacgttgacaacacagccgcccgcggcgacaatgatgatggcggcggcggcggtgacaacgatgatggcagccgtggcggcaacaacgatgatggcagtgacgacggcggtgccagcggcggcggagacggcgacaatgatgatggcggcggcggtgtcggtgcagcacacgccggcacaggtatcaatatcaagaggaggaggcactaccctcctgatgtaaaacgaaccatatatgccaagttattagagaaatcaaatcctggcatgatgaaggagggagtgacaaagtcagttgctaatgaaatgggggtgccgttgagagatgtccaacgcgtatggcgacatatacagattggagatggaattgaagcttttgagtccaagaagaagaagtattgtggcacaaaaaacttccgtgtgatcctagtgtcatcaaagatgtgccgcttggacaacgccatagcatccgtgacctag

SEQ ID NO: 96306 - DNA, 1506 bp, Oryza sativa
  Clone ID: PAT_MRT4530_94414C.1
gcacgagggcccaaccagccgctgtctcttccccccactcctcgactcgctctcgcttccgacgcggcggcggcggcgtgcggcgaggcgagatggcggcggcggcgttggcggggatggacgcgcgggggtgggacgaggcggcgtacaggcggggcatcctgcgggagcgggacctctcctgccgcaccctcttccgcgccgtcttcttcgaccaccacgacgacgaccccgacgtcctcctcgccgccgcctccagcgacggctccctcgcctccttctccctctcctcctgcatctcctcctcctcctcccatcccaccccacagacccacccggatgccgcggtctctctggttgatcccgtctgcatcgtccaagcgcacagtggcccggcctacgacgtcaggttctacccggattcgcagcagccgctgctcttcagcggcggggatgacgggcgccttcggggatggagatggcacgagatgcagagctgccttgtgccgctatctctgcaaggggatcatttggagccagtacttgatttggtgaaccctcagcatgagggtccttggggtgctcgctctccaatacctgaaaacaacgccattgcgattaacaaacaggaaggatctgtttatgcagcggccggggatgcatgtgcttattgctgggatgtggagagtggtaaatgtaaaatgaccttcaagggacatactgactatttgcacagcattgcagtccgcgaagcgaaccgccaggtagttacaggatcagaggatggcacagcccgtatctgggattgcagaagtggaaagtgcactcaggttatacgtccggtgaaaaacaagatttttgaggggtcatgggtcagttgtgttgccattgatgcaagtgaaagctggctggcttgtggtacttctagtggtatatcagtttggagccttctttcaaatgagtgcatctttaatgtggattgccatgctcctgttcaagatttgctgtttgacagaaaccaaatcttagcagtcggtgctgaacctctgctctctcgtttctctatcaatgggactcttctttcacaaatcaagtgtgctcctcactcagcattttctgtctccatacattcttcagggatggcagctgttgctggatatggaggccttgtggatgtaatatcacaatttgggagtcatttgtgcacttttggctgccggagcctggataagtaagatctattggaacaattagctaagcactcttaatagtgtaaagaactggaaaaacactgccaagatctaattaagtactactactagtaatcatacacttgggagctgttcagctgtaacactagttcatctctgtgctaacttatgtaattcaccagttgtgccgttgctgctccgatagagatgactctagatcccttaagtttattgctgttacaatttccctaatgaattcccttgtacggattaaaaaaaaaaaaaaaaaaaaaaa

SEQ ID NO: 96307 - DNA, 452 bp, Oryza sativa
  Clone ID: PAT_MRT4530_94415C.1
tttgtttgttgagaatgttagcgggcattgcagacacttttcttcatgtgctactcattaagttatcccgaatacaccgggagcttaatcgccatagcatcccaaagagcaagaaccttggcccattacgagtccggtcagtcctgatacacccagattgattgttgcttgaagagaaccacaagcacggatcttacatccggtttgccttactactgccctggcgaagccccagaatgctgagcacagggcataacagcacacttatgtggtccagatgctttgatttggcctggcctggtcacgtgtggcagactactgcttcaggtccaagcctggtggctactgactgcacactggtgcccgatgggcgctgaccttctcccagatatgccgttccgaaccctttggatcttgctagtaggatgtccaaagaaggtacagcctcagtt

SEQ ID NO: 96308 - DNA, 499 bp, Oryza sativa
  Clone ID: PAT_MRT4530_94416C.1
gggaaacttaaaaatccaacttttttttttaaaacatgggagcagggagcccggttcttgcctttttcttccccataaatccccttcttttttgaagtcccttgcaaatttttattggtttgggaccccctttgccataaaaactcacatgaatccggcgaccacccgggccgactttaattttttgctttccccgggggcgggaaaaattttttggttttaaacttggggattgcatccatgttcttaaataaaaaaccccccaaaacgtccccccttaaaagaaaaccttgcccagccttttgagctaaagggcgcgtttttttttttttggaacaacctcaacccgggggggcccaagtttggtggggggggattcccaactaaaaagcttttgccttaaccccggggggggggccaagtttccggataaccccgggaggccccgggattttccccccgggccccaaggggggcccccgttttaattgggaccccg

SEQ ID NO: 96309 - DNA, 419 bp, Oryza sativa
  unsure (1)..(419): unsure at all n locations
  Clone ID: PAT_MRT4530_94417C.1
ggggnnaancnanagncncntntncgngcagnnaagnacttnnngcnccnnngnannagncgntcattntcggnggnnncacnttccntcaagtccggntcgcnngtggcaagntacggcgtcatcctgtttggcaagctccgcatnccgncaatgccggcagacgggccggcgtacgtcncacttcccngcgttttcaacggggcccgacgacccggccaagtttcacagcttcctcaccgagatgaaggaggagcagggcggtggcaagacgttcagggccatctttaccgacaaggatgagctcgagtggttcgacaactgaaaatggaaagggaagaagggggaggagcgtgataagctttgtgataccatacttaatacaatacctatactgagtaaaaaaaaaaaaaaaaaaa

SEQ ID NO: 96310 - DNA, 1179 bp, Oryza sativa
  Clone ID: PAT_MRT4530_94418C.1
atggggaggccggtgaagcagaagacgacgacgtggctggtcgagcttctcagggagtactgccagcgcgcggcggcgcaggcgaccgcggggaacggggcggtggcggcggctgcggcggtggagggggagatcaacaccgacgggttggcggcgctggccgtggaggcggagggttttgcggccgcaaacggggagggctgggtggcgccggccgtcgagggagagggagagggtttcgtcggggcgccggttgtggagggggaggaaggtttgacggcggagcttctggtggcggcggagaggaagtaccggggggcgaggaagaggccgtgggggaagtacgcggcggagatccgcatccgcaacacgatgggggtgaaggagagggtgtggctgggcacgttcggcaccgccgaggaggccgcctgggcgtacgacaccgcggcgacggtgatccacggggacaaggcgacgaccaacttcccccgcgcgccgctgcggccggcgaccacgccggtgatgcgttccatgctcgtcttcttcgggatcgcccacctggtgcgctccctcgttccaagggctcgtggcccacgtggacgcggtggtggtgcccgtggacgcggcagaagccgacgccgtcgcgcggcggcggcggcggcgccatcagccccggcaagcgaggctcctcctcctcctcctccctcgtcggcgctggttcctgagcccgagctacaagttcaaggcggccgtggagagcgcgggcgcgggcgtggacgtggacgcggtggcggtcgcggcggccgccgcggccgcgggcgcacgccggcgagggtggtcgccgaggattctccgatgctgcaggcgactacacccgctgcagctccggcgccggcaccggcgctggcacctgcaccggccaatcaagccatcttccagccgatgatcatccctcccggcggcgtcgtggtggctcctgatgacttcctgctgtcggccatctccgacgacgagcccgtgctgccgcacaagaagccgaagctcctcggtgtctacaccccgccggacagccctgatcagttcgtcatggagttcttcgcggatctcggcgacggcgacgacatcctcagctcctcgttctggcaggatccggccggcgacggcgaggacacacagtaa

SEQ ID NO: 96311 - DNA, 255 bp, Oryza sativa
  unsure (1)..(255): unsure at all n locations
  Clone ID: PAT_MRT4530_94419C.1
gaactagtctcgagttntttttttttttttttttttttttttttttttttttttttttttttttttttttttttttttttttttggaccatggccacattgcatcgggatggcccattcatggggtttgcatttcattacaacatgtgggggacataacaaccttcacatttgcttgaaaaaaagggttagccctttttaatcgcattggaatcaatcatcaaaatttttgggggcctaaataccctttcagagt

SEQ ID NO: 96312 - DNA, 412 bp, Oryza sativa
  Clone ID: PAT_MRT4530_9441C.1
gcatgtagggcctctctccacctccctcgtttcgatctagctcgccggcggcgatgtcgcagccggcggcggtggccgctggggcggcggcggggcagcagccgcagggccgggcgcatgcggcgaggcaggcgggcggcggactggggcagaccatcgcctgtttcttgcggatggccgtgttctggtcctccgccgcccagttcttccggccgaaaccggcccccggcggatcccgggcatgctcatgtccaaacttttccagaaagggaaacccctttggattttctggatgtactatatcataaaaaggaaaaattccaatggcacttcaattattgggggagcccctctctcctgcgcttcagggccacacttcccatttgcccgcctggggcaccctctcactctc

SEQ ID NO: 96313 - DNA, 251 bp, Oryza sativa
  Clone ID: PAT_MRT4530_94420C.1
ggatctctctatagacggggcgctctttttttttttttgaagctgaagcacatccatcattctctctgcgttctttaatattatcatatacatgcggaaggcctactgatgggggcccgcccatcacctgtcggaaggatgatgaaaacttggtttaccgcggagaagccgagctgcgacatgggctctgtcatcatcaatacttccggaatcatgaacccctgccaccccttcatgatgaatcggatgac

SEQ ID NO: 96314 - DNA, 880 bp, Oryza sativa
  Clone ID: PAT_MRT4530_94421C.1
cccgtcccgccaagggggtgtgcgctgtcggacgttaggcccggcaccctgctcgatgcccaaactgttctggtggcctcctctgatcaatgaaccaggtaatggtgcagtgacatcccttacgcacgggctttgcgtccaccccgactcacgccaatccggaccgaccgtgtagcgtggccttttgcagtggtatggcaagagtgacatatgggctgccaagacgacataacttgtctggcacttgccgcctgatccgcaagcgcaggcaaatgggctgaatctcatctgccccgagggtcatcgtgcgcggacgagagggaagttaatggattggcagggacgtatgcgttttgcaggctgagcacatgaagaatcccagttaatgtgctcttttaactttccatccataaggagactcgtgcactttcctgacaccctagcacatagttatctacgctgtgcagacttttggctataccttacacaagatgcagcacagtattttggattgatgatctgtaagatttgagttcagctcatgctcgttgatagcacatgacacatcggttgaataactgtgttcatttaactctggacctacatatacataatttcctcttactttgattccttggctcaaaaggctcacagaagcctatattttgcaattaagcaacaagaagcagggcttgatttgcattccgattcaggtaaggtaacagctgacttcgagttttttttttaattggtgcattatccatgaaacccttttccaggttccagtattcttttggtaaattttctgataacttaataggaaagacattaattaactatgcatcacctgctctatatataatataaccataggacattg

SEQ ID NO: 96315 - DNA, 909 bp, Oryza sativa
  Clone ID: PAT_MRT4530_94422C.1
atgcacgtgtgcttccatggcggcggcggcggcggcggcggcaggctcgccaagtcattcaacgtcatcagcgacttcaccaagatcttgattggtcgtcgaggtggagaccacgcgctggcgcggcggcggcggatgcggcaatgcaaggatgccgcgccggccgcggcggcggcggcggtggcgtccgcgtccgccaagatcgcgccggaagaggagggggaggggggtggaggaggtaaggaagaagagttctgcgacaagtgctgctcggctctgtcgggaggcggtggcgcggaggaggaggcggcggcggagggtgagcgggacaaccggctacggaggatacggttcagggaggaggtgttcgacgcgtgggcggcgcagtgctggtgggcggacaaccacgaccgcatcgccgagctctactgcctcgtcaagcccgacgacgacgacgacgaggaggaggcgatagccgcggcggaggcggccatgttgccggccaccccatgccaatccgaggcggaggacgacgacgacgacgacggagcagagtcgtcgtcacggtcgccgtcgacgtccaccttctccggtggcccttccagcggcagcggcggcgggtcaaccggcacgttgggctcgccgatactgggcctcgtcaccgcgcccaacaccaccggaggcggcgagcacgacgccgtccgcgaccagcaccagccgacggcggcgacgtggagggagtgggtggaggagtacgagcccggcgtgttcatcaccgtcggagcctatcccggccaccgcctccagctccggtgcgtcgagctcagccgcgagaagtttggcgaggtgaaggcgagagtttggtgggaggagaacaaggccaggctgcaccacctctactctttctga

SEQ ID NO: 96316 - DNA, 1140 bp, Oryza sativa
  Clone ID: PAT_MRT4530_94423C.1
cgactcgactcgactcgagccatgtcgtcttggattctccccagctgcttcttcccccgccgctctgccgccgccatcgccgccgccgtcgtcccggtggcgactaaggaggagttgctcgagctggagaggcggctgtgggacatcgcccccgcggcggcgtacgagctgcagaagcggcggcactggacgccggagcaggtggcgcgggaggccgagaagaatctggcggcggcggcggcggcggcggcaggctcgctggtcgtcgaggtggagaccacgcgctggcgcggcggcggcggatgcggcaatgcaaggatgccgcgccggccgcggcggcggcggcggtggcgtccgcgtccgccaagatcgcgccggaagaggagggggaggggggtggaggaggtaaggaagaagagttctgcgacaagtgctgctcggctctgtcgggaggcggtggcgcggaggatgaggcggcggcaggaggtgagccgggattggtggccgaacccggacccgggggtggttgctgacgctggcgccgcgcgccgacggcgtcagcaaccggctacggaggatccgtcaagggaggaggtgttcaacccgtggcggccgcagtgctggtgggcggacaaccacgaccgcatcgccgagttctactgcctcgtcaagcccgacgacgacgacgacgaggaggaggcgatagccgcggcggatgccgccatgttgccggccaccccatgccaatccgaggcggaggacgacgacgacgacgacggagcagagtcgtcgtcacggtcgccgtcgacgtccaccttctccggtggcccttccagcggcagcggcggcgggtcaaccggcacgttgggctcgccgatactgggcctcgtcaccgcgcccaacaccaccggaggcggcgagcacgacgccgtccgcgaccagcaccagccgacggcggcgacgtggagggagtgggtggaggagtacgagcccggcgtgttcatcaccgtcggagcctatcccggccaccgcctccagctccggtgcgtcgagctcagccgcgagaagtttggcgaggtgaaggcgagagtttggtgggaggagaacaaggccaggctgcaccacctctactctttctga

SEQ ID NO: 96317 - DNA, 196 bp, Oryza sativa
  Clone ID: PAT_MRT4530_94424C.1
gtgaaggagaatcctgtccgccccttcgccgctgctacatctcgctggagcgtcgccgccgtcgtcaagccgagccgtgctgccgtcggagttcgtcgttggtcgtcgttcatcgtagttctttgcaccgtttccgacgttccggaggagaacgtttacattgaagaaggtttagaagcgtttgaggaagctcaag

SEQ ID NO: 96318 - DNA, 447 bp, Oryza sativa
  Clone ID: PAT_MRT4530_94425C.1
acgatcgatttattgtactgatgtagatatgaacacacatattgacctacgagtttcttgagtcatcgatcaatttcatatacgtggtcatcgctacatcaatcggcccctgtgatccccacgataatacgataaccgaaacacaggcgacacacaatttaacataatactgccccaaaaacccatgagcagagacacatgcactaacgatccatgtttgcatacatgaagcttgcgaaggttaacacaaaaatctttgcacacacacataagatgaaatctcggggggctaaaacgaccgaccaatcccaatagaggcgagcccccactaccactttaccgatggaaaaactaggcgccccaggcaaaataattaatggagcaaaacacgcaggggaggaatcattttttgaaccccatgattctcttgtttttccacttgatccc

SEQ ID NO: 96319 - DNA, 1068 bp, Oryza sativa
  Clone ID: PAT_MRT4530_94426C.1
atggcggcgaagctctccttgctacttcccgtcacctgcttcatcctcttcgttctgcatgctgttcatgtggaggcgcgtcccgatcctgccgctttcggcgactccgacaacgggttctacacgctgttcgtgttcggcgattcgttcgccgacaccggcaatctccccaagcgccgactgagcgagcagtcgcgcgaatggtactacccctacggccgtgaccgtggcaacaaccgcccaaccggccgcttctccaacgccatggtccagtccgatctcatcgcacggatgctggggcgtcatgaggcgcctccgacgtacaggagggtggacaactacgtgcacccgcacggcatgaacttcgccgccggcggctccggcgtgttcaagctgccgagcggcgcgccgacgctcgacaagcaggtcgaccacttcagggacctggtgcaggacggcaccatcacccgccggaacctccgtaactccatcgccctcgtcgccgtctccggcaacgactacgcccgcctcgccaacgtcaacgacactagcaagatgatcaagtttgtcgatgaggtgacgagcgagatcgcgaagcaggtgcacaggctgaagaacaacggggcgaggaagatcctggtgaacaacctgcaccccgtcggctgcacgccgtgggtaaccaggccgggcaactactccggctgcagctccaccggcaacatgggcgcctacctccacggcagcaacctccaacagaagctctcgcacctcgactacgtccaccatgtcgacctcaacactgccttctccaacatcgtcaatcccgaccaaggttcgaagcacaaggtgtcgagccagttcgagcacaagatgcagccgtgctgcgagagcttggacccgaacggcttctgcgggcagaagggacacgatggcaaggacctgttcagcgtgtgcaacgatccggagaagtacttctactgggacgatgtgcaccccacggaggctggatggaaggccgtcatgcagcagctggaaggtccaatcaagaaattccttcgaatcaactag

SEQ ID NO: 96320 - DNA, 499 bp, Oryza sativa
  Clone ID: PAT_MRT4530_94427C.1
cccacgcgtccggggatgcatcacctggccaagtgaaccaagattcatcacacggagtttcaacctagaagaataagtttgcttgctccgttttcccttgtgctggctgtgacaagaacaaggtaatttttattggaaagtggattactggattcctttcctgtgtagtgacaataaatctctttctagtctaaaaaaactcatagtccagcatgaggaccattgcaattatttatatagcagactgcaaagatggtgaaatattttgatgtcttttacctttatgattgtgatcaagcagtgtgatccatgaaatgtccttctatgctaattgttactaatggtcgttatattccgaacaataatccacatcatagttaaatttagtttaccatatcacttaaacttcttatctattgatttgcatcaacttgaccattatccagatatcatagttaaatttagttgctgatttaaactatagtaccaaggtaggcta

SEQ ID NO: 96321 - DNA, 342 bp, Oryza sativa
  Clone ID: PAT_MRT4530_94428C.1
gatttctccactgactcatccccatcatctcctcttctgttcagaatctcctcctgctaaagcatttcgttgctgattttttttttttgctggaattcttgttgtggggtaaggcgcaaagcgctgcgaggcaaggcataacagctgaaagttgcaatctttatcggttttggattcctcctcctcctgctgctgctctctctcctccaaggctccaacacatcctggtcccgagagaaaaaggggagatatttttttgggggcgcatgattcgatcccttgctgtttgctgttgctgccttgctgcgcacagatttggtcctttctcggtctgcttcttgg

SEQ ID NO: 96322 - DNA, 415 bp, Oryza sativa
  Clone ID: PAT_MRT4530_94429C.1
ttggtttttttattttttgggggtttttttttttttttttttttttttttagagcccccaacccagtttttcaattcaaaaagactgcccaaacagaccaaggggttcattatagcagcaaagttttttaaccccccacatcaaagagacccttatgccataagataacttggagcgcggatcactaacaaattttccgcttaggcaaccccctcgatcttggggccagaaccctttgcccctgccgggggaggattttccttgtccatgcccccgggcatggtcccgccagggccctgggacattttggggaatatgggggtgcaaattccctccagctcctttattttgtgataaaacttataaaccttggggagctgggtgccctcccgccaccggggggcccgatccaagg

SEQ ID NO: 96323 - DNA, 210 bp, Oryza sativa
  Clone ID: PAT_MRT4530_9442C.1
atggacaagcgcgccacgccgcatttaatgcggcgcggcgcacgcatatccggtccgtggccggtcgcagtgtgtgaccggtcgcagaccggtcagatcgcggacaaccgtgctcccacgttgcatctgcttccggtggagtggagggtgatcccctgtgtccgacgagtgacggcgctgggcatcactcaaggacaagcggtgatttag

SEQ ID NO: 96324 - DNA, 420 bp, Oryza sativa
  Clone ID: PAT_MRT4530_94430C.1
aactaattaaatctggaaccaaagcgtattccagttgtaattcaattgcaatgataatcttacatcagttgttatgactcatgatcatgatgactcatgatcatgatgggagcagcaattggcgaagagtatcatagagcgcccgaaggatccccttgtgctgctgctcctcaggcagcctcagcatgctcgctaccttgtcgaacttctcctgccccagtgcggcgtcctccggcgaggccgccaccgccgccaccctgtgctccttgtggagcaccggcggcgacagcgcccactgcatcgcccagacgccgagcgggcgcatgtagtgcagcgcccggtagccgccgtcggccgtccacgactccggcgtctggaacgcgtagccgaagccgtgcttgccccagccggcgtcgtgga

SEQ ID NO: 96325 - DNA, 516 bp, Oryza sativa
  Clone ID: PAT_MRT4530_94431C.1
gtcgtgccccaaccgcctctccccacgctagccactgtctccaccgccggctgccaactccagccgagtcgcgccgcctctccagtcgtccccgatctgcgccgtcgcctccctcggctttgcagtgaagagctctaccccggccacccgttcttttgccctgaaccccgccggaagtcgtcatcactgtgaaggccgaaccgtcgccatgttttgatctccggcgaagctttgccgtcgactccatggtcgccgaaccccgctgtctcctccgttggcatcgcagcgacaacagcaagcatggcagccgcccccgtgaagccacaagccatcggagcgtcatcgtcaccgtgaagccgatctaatccatcttcagccgtgccgctcatcgccgtccatcgccgccttcaattcgctgtcgccacccacgggatcgcaggagggaggtgaagactgtccgccccttagttgctgcctcccctcgtcaaaacgccggcgtcatcgtggacagagcca

SEQ ID NO: 96326 - DNA, 1970 bp, Oryza sativa
  Clone ID: PAT_MRT4530_94432C.1
aatcaaagtggacgttttccttttattggagtagccttttggaccgatcagccccggtggcaagcacacggcccataaaggaagctgctgggctgtcagcccatcaaaccttgttttttttccttgaactttacacatactgtcggctgtcgctattgctagctaggagtacaagattcttctgtaacacaatacgaccacgattgcgtgtaacctgatcatggtaagggagtaacgaacaatcatgacacgaccgtcttcaccttgtagttccgcgcgaacgcgctgtacacgacgaagttgagcgtgcacagcgccgacatgacccagaagaagtagtccaggtgtccctcgttgaggttgtccgaaatccacccgggccggccgtccacggcggtgaacgcgttcacgacggcgtagatgaaggagctcatgtagcttcccagcgccacggtgagcagcgccagcgacgtgcagatgctcttcatggactccggcgcctcgctgtagaagaactccagctgcgcgatgtagcagaacacctcaccgccggccagcatgaagtactgcggcatctgccacgcgatgctcagggactcgccgcgcgccgccgcgtcgaggcgcaccatctccaccagcgcggcgatggccatggcgaccgcgatgagcagacggccggcgcccatgcgccgcagctgcgacggctcgccgttggccggggagaagctcctgaggagcggcacgatcaccgagccgtagacgagcacccatgccaggacgcagaacacctcgaaggacaccatcgacgcggcggggatggtgaacgacatgatccgcatgttcatcgcggcgccctgctgcacgaacgtggtgttcagctgcgcgtacgccgccgacagcacgatgctcgtcgcccatatcggcagcagccgcatcaggatcttgagctcctccacctgcgtcaccgtgcatagcctccacgagcccgcggccgccgccgaggcgtcgttcgagtcctcttccaggtcggactgcacgatcaccgccgccttgtcaagaaagctgaactcgtcggtgtgcgtgatcttgggctgatcgatcttgtcatggacctcgtagaggagggcggcgtcggcggggacacggaggctgaccttccggcacgcggcgaccaccacctgggcgaggctcttgagcggcgtgccggtgggcatgctgcgcttgtacatgggcgtggcgagcacgaagccgccgaacgcgatcgcgacgcaaaccgtggcgatgccgaagccgagtccccagctcacgttctgctggatccacacgatgaataggcccgacacgatcatcccgaagtcgacgcacatgtagaaccagctgaagaaggacatcttccgctcccggtccaccgcgttgtcgtcgtcgaactgctccgcgccgaacggcagcagcgccgcgcgcacgccgccgctgccgaacgccacgaggtagagccccacgaaggcgatggtctgcgcgccaaacacaggctgctggcacgacgtcgagcccgccacggcgcacagcgcggtggtcggcaggaacgccgagaaggtgaccagcaccatgcccaggaggtagaacacgagggagacgaggatggtgttgtagttgccgaagaacgtgtcggcgatgatggcgccgaacaccggcgtgaggtagctcgtgccgaaccacgtcgtgacattggacgcgctcgcgaggctgctgccgtgcaggacggtctccaggtacaccaccaggttcgtggcaatgccgttgaacgctgtgctctccaagcactcgaatcctagcaccaccgccggcgctttgctcccgctcttcttgtcctggatgagtggcaccgtcaggctgacgtcgtcctggagtttcgggttccagctctctggcagccgctgctggcctctctccatggcgtcgccggcgtccat

SEQ ID NO: 96327 - DNA, 555 bp, Oryza sativa
  Clone ID: PAT_MRT4530_94433C.1
ctagcgagtagcgatagaccgggaggccactccaccccatccccacactctagaagcgtctataaatacctcgactcctcccactgtatccactaccatctcccgtgtcctcctcccacctcgctcccccgtaaaacccgaaattacaatcaggtcctcggcggacgccacccccaaatctgaaaccctcgccgccgccgccgccgcgcgatcccccccggaattccatcggatcggcccccgcctctccggcgagatgggcatctcgagcatgccggcgcccaaggacagcgtggtggcgtacctgctgtacaacacggcggtgtcgatcgccatcctggcggacatggtgcgggcggcgctggtgttcctcggcctccccgtgccgccctcggcgtgggaggacggcgacgaccagctggcggcgatcgcggcggccgccgcggccgcggccgcggcggcggggggcccgagcctggcggacaggtttccgagcaaatttaagcccgccaaagttttggcgggggaaaaagaggcccctgcccccaataccat

SEQ ID NO: 96328 - DNA, 473 bp, Oryza sativa
  unsure (1)..(473): unsure at all n locations
  Clone ID: PAT_MRT4530_94434C.1
ggtggtgatgcgtcacggcgaccgcgtggaccacgcggatccattgtgggccgccaacaatccccgcccctgggatccgccgntcaccgacgccggcctcctccgcgcctccaccgtcgccagtcgcatcctcgccgacggcttccacatccaccgcgtcctcgtctcccccttcatccgctgcctccagaccgccgcccaggccatcgccgcgctctcccccctgccccgtatcaacatcaaggtttcaattgaatatgggttgtccgagatgatgaacactcaagcaatgggcattctagtcagccagatagctccaagcatcgacaggtggtttcctgacattgtcacaactggaagctgctttgccagctgctaccattgatcactccgcggagccactctaccaggaggtacttaagtggggggaatctgtttgggaagcaagaagcagatattgctagtgtaatcaa

SEQ ID NO: 96329 - DNA, 1867 bp, Oryza sativa
  Clone ID: PAT_MRT4530_94435C.1
tccggaattcccgggccgaccccgcgtccgatctctctctctccggccggggtcttgtctgacttcttgttgcctcttgcctccttcttcttcttcttcgtcttcgtcgtcgcgaaatacaggcgtgtggggcgagagtgatcaggtggcagctgggtgtttcttcttcttcttcagctcgagttcttccttagccatggcgctcctgctgctgcgtatgggcgtctccgtcgcgctgctcgtcgccttcttctcctctctgattccgtcgtcagaggcatacgatccgcttgatccaaatgggaacataacaatcaagtgggatgtgctgcaatggactccagatggatatgttgctgttgtttcactatacaactatcagcagtatcgacacattcaatcacccggatggaaactcggatgggtgtgggcaaagaaggagataatctgggcgatgaacggcggccaagcgacggagcaaggcgactgctcaaagttcaaatcaaatatcccacattgctgcaagaaagatcctgagatcgtggacctgctcccgggaaccccttacaacatgcagattgccaactgctgcaagggaggagtgctcaactcgtgggcacaggaccctgcaaatgccatagcatcattccaagtcagtgttggtcaggcagggacgacgaacaagacggtgcgggtgccgagaaatttcaccctgaaatctccaggtccagggtatacctgtggcagtgccaaggttgtgagacctaccaagtttttttcgcaggatggaaggagaacaactcaggctcacatgacatggaatgtgacttgcacatattcacagattgtcgcgcaaagatctccgacgtgctgcgtttcgctctcgtctttttacaatgataccatagttaactgcccaacatgctcatgtggctgccagaataataaaccaggaagctgtgtagagggaaattctccttatttggcttctgttgtgaacacccataacaaggacagcttgacacctctagtccagtgcacttctcatatgtgcccaataagagttcattggcatgtgaaggttaactacaaggagtactggagggtcaagatcacagtgacaaacttcaattacaggatgaactactctcagtggaacctagtcactcagcaccccagttttgacaatctgacaaccattttcagcttcaactacaaatctttgaacccatatggagtaataaatgataccgcgatgttatggggaatcaagtactacaatgacttgctcatgacggcgggtccagatggaaatgttcagtctgagcttctgttcaagaaggaccccaagagtttcacctttgagaaaggctgggccttcccaagacgtgtatacttcaatggtgacaactgtgtgatgccaccaccagatgcatatccatggctgccaaatgcttcaacaagagtgatgtcttcaattctccttccattcattaccatttggacagcactgacattcttgatggtttacgcatagtgaaaggaaatcgtaattttacgtattcaggaaagttttgaccttgttgtgcattacaaagttttagatgatatgttgcatgaagagaagattcagtgcagatacctaaccataaaccgtcgttgatcattgtataaacttacttgtatacatttaatctcagacaagataagatgcaaacacagtacttcttaaggaattttatcctctcttcctttatgaaccttcacacatttatcagatgagcatgtactgcaaaatgaagttagttgatttttcctatgatcatatatgaaaactaacagctcatttcaaaaaaaaaaaaaaaaa

SEQ ID NO: 96330 - DNA, 2186 bp, Oryza sativa
  Clone ID: PAT_MRT4530_94436C.1
ggaccgtatgggaaaatttccttttttatgcagttgcattatccgcatgaaaaaatacgattgagtggaatagtcttttcttagaggatgcttgaccaagtcgagtttcgctactttctagattaaaactggtatgaggtgtgtgatcaccgagatccgttatgcagtaatagtcaatggagagttgagtgatcctgtgatccctacacgtggtatatggcaaggtgatcccatttttccatatatattcttaacctgtacatagggattgtcttgtctgctgaaaaacaaggaaggggaaggttctctatagggattacaaaatggtagatttggtcctcctatatctcacttactctttgctgatgataacattttacaaaagtatctttgctgatgatagcattttacaaaagtacagaaggccttgaaatcaactctacaggccttgaaatcaactgccacacatgtcaaatcttaattggaccaggatgtcacacacaagaaataatgttatggttagactgcagatttagaatgatgctttgaagtctacatacttggacgtgcctatcgaagtaggacattctcccactaagtcctctaatttcttgcaagagagaacatggaaatagataaatagttggactgatcacttgatcaactgttatctatagctagaaaagagacccttgttaaggttgtggttcagtcgattttaactttgttatgagatgcttccatattctagctacaacttgttaggagatgaggaagtcgattgctaatacttgttgggggttgaacacggaaagaaaaagatgcatttgcattcttggattagcttttctcaccgaagttccttggtagtttggggtttagagatcttcaacttttcaactaggccaagttaggaagacaagtggcaccttctaacatatctcgattcctcatgtgctagagtacttaaatgtcattattttcctaatatgattttttggcatgcaagttgtcctagaccggcttcctatacttagcatagtatcatgcgtggcaaaaaaaaaacttttggaacaaggtattctatggaaaattggaaatggatatgttctaatttgccaagacaaatggatacatgatgacataagttatcaatccggtgctaaaagtttgctcatgatatccaacaatctaggcaatatatttgctcctgataactcgaagtgagcagatagtggagttatcatgagaaaatagtgaatctatttggaaatcaattttatcaatccggagcaaaccgaagacttgtttgaatttttctcatgattgtttggccacaagatatcaacttcagaggctacatattcctgccctttgtgttgtttctatggccatgaagtgaaagttgagcattacttcttattgtgtccttttgcgacatctatctagaatattatcaaaacacggtttgacattcaattgcaaaggaaacttctttgtaatgctaagctgtggttgtttgatctactgaatcgttgcaacgaagtgtagtgtgtggtagtggctggtacttgttggcatgtctgagtagtccagaatctatggtatgccccaactaatagttaagaaaataaacttatgtggatataattgttatggactgtttgaagccaaggtagtcgtcaaaagacaaaaatttcctaaacaagttcagaaatgtagcccaccacaagctggtttggctagcctcaatgtcgatgcatcaatcttttcttcttcatcgagtttggctattggtgtggtggtgcagggccatataggaagatgtctattaggttcctgacgagtttttcaaagcatcactacacccgagattgctgaagcacttgctcttcgatttgttgtgatctttgtgctatgatgaaggttttcataggtgatttttcattctaattgattgaagctaatccaaagagtgaatattatgcaaagattgtaaatgtcctattgttcccgatatcaagtctttggtaagaaactttgtttcgatttcatttcttcatacaaaccgtaatactaatgagatggctcagctgttggcaagaacaagtgagtatgatagttatttgaccattcgatagtgtgttcttggttgttctagaacattgtaaattttgaaagtttct

SEQ ID NO: 96331 - DNA, 481 bp, Oryza sativa
  Clone ID: PAT_MRT4530_94437C.1
cccacgcgtccgcccacgcgtacgtggacgcgtgggcggacgcgtgattctatatataaagatggacagttcctatatagaagcggcctatgataagggtggtgacataagcataattgagcaaaactactgttggagctccatgggtggaaaaggtgatagaagaggactgaccagacggacttggtcactctcgggattattgaagactgtcaatgctcgtatggagctatctcagaacacattctatgttcgcacattggatgacgcgactatctggagctgactcttactaagagcttgagtgctttaatcaaatcgccttcacagacagaaagtttacaccatacgggaggccagctagatgatttatgttgactagctgaaagacaacttgaccaaagatcttgctaccagagtcattttttgtatggaaattgacaggggacccactaaaatctacagtgagggaatacacctt

SEQ ID NO: 96332 - DNA, 279 bp, Oryza sativa
  Clone ID: PAT_MRT4530_94438C.1
atggcaccgtcgggggccactgttggcagcgggaccaagaggattgaggtggagaacatggaggtgttcaaggagaccgtggagctcatatctctgtgtgaggatctcacttacaagaccaggctgaccaatgacgagacaactcaaaagccatggtccatggaggagcaagtgtggtcggagtcggagaggaaaccttggtcatcaaccctgttgccgccttacttgcacacgcgtgaggtggcgcacttgggccacgacgagacatggttgttgtga

SEQ ID NO: 96333 - DNA, 744 bp, Oryza sativa
  Clone ID: PAT_MRT4530_94439C.1
atggatccaggccccccatggccggatttgttgctccgggcggcggggagccgagctagcgcgtgggcggcatcagcggtgtggttggcggccggtggcatgcatgctgctagcggggttgtacacgaggcgttcggtggcgagccggacgaggcggcggcatggacgaggtttcgcggcggcggcatgcatgctgctggcgacctcagccggcggcggtggccagcggtggtcatgcaacagggtgcggctgcatggagggaacggggaggccgactcccgtgtggcgacggcgacgacgtctatggcggctgcgtggctgtggctagggcggcgaccgtcgcggctgttgtggaaatagtcggcgtgggtgtgggcggcagcaagtggaggcggggaaggagtctaccggtgagatgcacggcgcgcaggcctgacggcctcgggcggcttgctggtgtggaggcgaccgtgagtggcgcagccgatggcagcggaggccggctcagcgcgagaggcgcgggcgacggagatggaggccggcttggcgcgagaggcgcggccggcggtggaggaggcgacctcagtgtaaggaggagctgccggtgggtgtggcgcggtcttcggtgcacgaagactagccggcggggggcgtcggtgcagtggtcccacatgtcggtagaggttgagtggtggaggagcatcggtgcgttagccgtggatttgcaggtggtgaacggcggg

SEQ ID NO: 96334 - DNA, 181 bp, Oryza sativa
  Clone ID: PAT_MRT4530_9443C.1
gagagaaaaaaaattggaattagaatgagggcacagatatggtaggagtatacatactaaatacaccgactgaaaaaaaaaaatcttttatgcaatctaagaaatggaacttattcatcttctccttgatcttatgatcaaagatcaccatataaaaggggaaggtgaaaattctgttgag

SEQ ID NO: 96335 - DNA, 936 bp, Oryza sativa
  Clone ID: PAT_MRT4530_94440C.1
atgaagcgaaagagttcgatagtagcgcgtaaggacgcaaagaaggtgcagtcgtgggcgactgtcacgacgtcgctcgcgaggttcagggaagaggtggctcctggcttcttgtcgctctcgccgtcgtccgtcagccccggcgacgctgccgcccaattagccccccagacgacgacgataacgacctcgaacagcgccgccgccgttggaaattccacgagcgcatccggtaccacggcggaagtgtccgccgcgggggagcccatgctcatcgacgcggctgcaccgattgcagcggagcccatcgacgccgtcccgttgcaggcggtggcggcgcacgtccctcgcgccgccgtgccgcaaagagtagatgatgacgatgccgctcccccgccgccggcgtggatacgcggcgagctgctgccgctactaggcctacgcggcgacctgccgctgcacttcatctgcaggaagcgagtggaggcttccgacctgtcggcgcagcagagccgcttcctcatcccgcaagccgccgccagcctccgcctctgtccgctcctctcagcggcggagcgcgaggccgccaagctggtggaggagttcttgcacaagaaaaagaaatcgccagaaccaaagccgagggagaagggggagaagagccccgggctcgccgtgcgcgtggtcgtctaccgtgcatccccgctcgacgtgatggccatggagttgaccaggaggctctccaattgccacaccataatccggcaaaaagaaaccacaaggctcgtcgaccgcggcgtccaggtgaaggacgacgtcgccgtgtgggcgttccggccagaccccaacagtgctctgcacttcgtgatcgccaacaccgccgcccagcagcagcagccaccgccggcagcagcaccgaacgcgttgccgcaatag

SEQ ID NO: 96336 - DNA, 594 bp, Oryza sativa
  Clone ID: PAT_MRT4530_94441C.1
atgccaaaacgacgtcttcaagaagagaagcgacggaaaactgctgccgccgtccgtcgaggctcaaagaagctccgactgggctttcacccggcaaacacccttaaggggaccgcgccacacccaccggcagctcctccttacactgaggtcgcctcctccaccgccggccgcgcctctcgcgccaagccggcctccatctccgtcgcccgcgcctctcgcgctgagccggcctccgctgccatcggctgcgccactctgcgccaagccggatccgacccctcctccaaacgttgccgtgccggccagatgcagccccacggtcaccacaaccgtgcctcctaccaccgcaccacggtcgcctccacaccagcaagccgcccgaggccgtcaggcctgcgcgccgtgcatctcaccgccgccatagacgtcgtcgccgtcgccacacgggagtcggcctccccgttccctccatgcagccgcaccctgttgcatgaccaccgctgctacaaccgccgccgtgcactgagcctgggtagggaggcggatctagccacctcgccccccaacccctacgccaccgccgccggctga

SEQ ID NO: 96337 - DNA, 495 bp, Oryza sativa
  Clone ID: PAT_MRT4530_94442C.1
ttttaccccactaccaaacccacaaaaccggtcatcaatttaggcagggaggcaggcagggctgcatcgtgggaatgatagcgtggggggagtactgcaggtctttgtactccttgtctgctgtgctgccggttgatggattggaagccacacctgctgctgctattgctaacgcttagctgcatctttcagtctttcggccaacaattttttttgctttgttgccatccgtttttggtccctgtttcttttgctcccttcagcatcaatccacctcacacgttcaccgcccctcgctacctcttctactaccattcgacgcacacctcggaaaacaaatcgtcatttttctttcttttttttttttgccttttgttaaagaaattgactgctaatgctaggttgctatcctctgagccataattcattctgaagaaagtatatgtaaattattggatccacaaatcatatataatatttagaaagaacatgtac

SEQ ID NO: 96338 - DNA, 525 bp, Oryza sativa
  Clone ID: PAT_MRT4530_94443C.1
agggagatagattgccacatttgggattgtctgtccttgagctttgttgatagtcattgcaaaactaagacggatgggaaactgcttccgcttgaacttaaaaggcaattgaagatcctccgaggggtataatggaatccgtggtatgaagaccctcttcccagcatgtgcaccactgacaatctcagcactaatggaataattctgaaatgctctaatcataagcctagttccattgcacaacccgttgtgcaggtcgagattgcgcagcaatatgacaagacaattaactttgacctttaaaagatgtggcaatccatttggtgtgagtgaattcaggtactcaaatttatagaaattgggcaaaacgtggaatattttgttccattaacctaatttacaaatcgctcctcgaaaatgaagaacaacattacctagtgcattttgcataagtggccattaacatttaaagcttatacatattatatttgaaggttgattttcgtttatagcgtttgctcaaaa

SEQ ID NO: 96339 - DNA, 303 bp, Oryza sativa
  unsure (1)..(303): unsure at all n locations
  Clone ID: PAT_MRT4530_94444C.1
aggagaaaaatttccgtgaaataatctaattaagagaaggccctcgtgccgctcagccccagggcggcacgggcggcgaccagacgagcggccgcgccaacctcttcctcttctccctccaccttccgccgtcgancnccgcggnaagcgggggacgaatacanggcgcgagctcctactcttcgagcgcgcgctgggcgtgcatacgagaagttgggtcangtcgcgcggcaatcgcgngtagncgttcgtccaacgntgttcgggttagcgtggncagaagagcgacgtaacgagagccga

SEQ ID NO: 96340 - DNA, 480 bp, Oryza sativa
  Clone ID: PAT_MRT4530_94445C.1
gaaaaagaaatacaagggcttacatatttaacaaatgaaacaattttaaaacatttaagctcaggcaaaaaactcaagtacagcgtaccacattataattgataagaagtttctctccgtccctaactaacatttataaaatttaaacacatatatataaagggacatacatagagcatgtatgaatctattcaaaacaaaacatctaataatgtaagatacatgaagtgcgtggagtttaggacaaagcacatattaggccattcgggtgtacgcgtattactgttagggccaaaagcaaaacacggtgagatctaccagaccaccgtatgtgagcttctacactactttgcgggccctttttgggcaacaaggcctctggtatactgggctactgggatgtctcccgtggaaaggcattcgcacaaccttggaattggggagttttatttatttgcctttgacccctgacccaacaag

SEQ ID NO: 96341 - DNA, 162 bp, Oryza sativa
  unsure (1)..(162): unsure at all n locations
  Clone ID: PAT_MRT4530_94446C.1
ctcacgcgtccgatcaacacacggactcacgcagtcacggcctcactctttccgtcgagattgacggcgccagctaggcaccaatctagtataaggctgntgaccacaatggcccatatgacaacctgaacgaacgttcatagaagggaaggaaccatgggg

SEQ ID NO: 96342 - DNA, 1180 bp, Oryza sativa
  Clone ID: PAT_MRT4530_94447C.1
cggacgcgtgggccggttgcgttgcgcaatggcgctgcagcttcaggccgccactccgcatccccctcttcctctccgctcctcacgccgccgcttcgctgctccgccgtcgcctctcgttctccgcgccgtagcttcctcccgcgatggcccctccacgcgcctctcctctcctgcgcccgcgccgcctcgccgccggcggcgtgcgagcgtgagggcccgcgccggcgcgggcagaggcggccggggggagtccccgtacgacgtgctcggcgtgcctccgtcggcgccgcccgaagagatcaagcgcgcgtaccggcggcttgctctcaagttccacccggacgtcaacaaggagcccaacgcgcaagagaaatttctgcggatcaagcatgcgtacaacacgctcatgaattcagagagccggtccaagtacgcgagcactagcagcaacacatattattcgtccaggacatacgggaagagcagcactacttcagctgatgaagaagagccattctatggctttggggatttccttagagatcttcaagcagaatttcagaactgggaagccggtctgaattcagaacagaaacctaaaagcttgtgggaagagttggcagccattggtgaagaatttgttgagtttctggagaacgaactcaagatcgatgactcaagtgatgcggaagacaatgcaaatgatccgtacacacagtctggaggcaaaaacaagcaagatgttaatacatcgacaagtagctttgatgatagcgtatctgagatagaggctgctttggagaagctgaagaaggaacttgggctcagctgagccatttgataccgatagcatagcatatcatactgctgcaactataggtctatagccatctgcaactgacttggtgttcttacgaagttatttcttatactcaaatgttcttggatgcatgatacctatagccatcgcaacctgcttggttgtctgtgtgcaggtatttgatgtacccattcttgtcttcagaaggtgatggtagctcagatattgttagtttaggtgatacagctcacaagttcagggcatccagcctctttataagatgtttgtggtgtcttgggtgtgttctgcacttgtgaaatttttgggagtaaaagatgatatcctgttacacagtgt

SEQ ID NO: 96343 - DNA, 843 bp, Oryza sativa
  Clone ID: PAT_MRT4530_94448C.1
atggccggagaggagtttggcctcgcagcggccgccgccgccgccgcctccgccaccgtggacgccgcttccggccgcagctcccgcgtcaccgcgctgcgctccgtcgaggacatcttcagcgacttccgcgcccgccgctccgccatcgtccgcgccctcaccgaagacctcgagaagttcgccgcgctgtgcaatccagatctggactgcttgtgcctgtatgggaactcggacgggacgtgggaggtggcgccgccgccggagatggtgccgccggagctgccggagccggcgctgggcatcaacttctcgcgcgacacgatgtacaggagtgattgggtcgccctcctctccgtcttctccgattcgtggctcctcgccgtcgccttcttccacggcgcccgactagatcgcgacgacagaattgaggctggtgttgaggctgtgcttcgaaagatccttgcattacgctccccccagatctcccagacccttttccagtttactttacacttgccaccagagatagtctcgccccctgcccagaggaattttctcctgatcttgtcgatgtcctccaagggcggtaagaagcccgagatctgttgctttctccagaaggtgatgaagagggaggtcaatgagattgtgaacatacatgaagttatcatgaatgcttctcctcttaatgaaagcactctgggcctgactgatcagggctcccatgtggggttgcaagcggagagcaagaactttggagatcaacttttcgataccatgaatgaggctgattggcctgaagtcgcctatcccttcagccccttccttttttggaattag

SEQ ID NO: 96344 - DNA, 243 bp, Oryza sativa
  Clone ID: PAT_MRT4530_94449C.1
atgtcgaggcagaggcccaagcatggcccaacaccaatcgggctgggccagcatggcccgacagcagtcgagccatgccatgcttgggccggaccaaaacgccgtgttgttatcactttagttactcggtggctccgtacctgggctatcctccaccaaccgggactgtgggatactattgcggtggtatcacgacagttggaccaggtggcgcaagagttttttacccaggagcatgggtag

SEQ ID NO: 96345 - DNA, 154 bp, Oryza sativa
  Clone ID: PAT_MRT4530_9444C.1
aggagtaatttgcatggattattattattattattattattatatatatgtatggagctgagtacaaggcttaatggttttacttttgctacgtaaagtcgtcgatcgactattagttagcctcgataggcagccggagcagctagacaagcaa

SEQ ID NO: 96346 - DNA, 717 bp, Oryza sativa
  unsure (1)..(717): unsure at all n locations
  Clone ID: PAT_MRT4530_94450C.1
cggacgggctgngnacgcgtgggctggacgcgtgggcggcggcgaggaggagtagagtaggtgaggtgaatcgggggagggaggaatccaagaagaagcaggtaattaatcgatcgatcgggagggggagatggctcgcgcgggcgggcatgggatggggaacccggtgaacgtggggatcgcggtgcaggcggactgggagaaccgcgagttcatctccaacatctccctcaacgtccgtcgcctcttcgacttcctcctccgattcgaagctactacgaagagcaaacttgcgtccttgaatgagaagctggacatcctagagcggaaactggaggtgcttgaggttcaacctagcagcttcatcctgtatgtcttcatttccacggtgcttccttaccgcagtaacgcttcctctaataatttgtgcaggcagctatcgaggtgtacgcttggagtgatggagcgaggacagcgctgccgcgatgaattgatagaaggagaggagagcttggacctcaccgagaaagcccacgactggtctcgccaggccacaccgccggagacacaagggatgtgacgctgccgcgcttcgccgcttctcctcgtcccattgccacgtacaattgtaacgtgttccaagtttgtgtggagataactaaccgattgttgagtgcaaacctgcaatgttgcctgctaaaaaaaaaaaaaaaaaaa

SEQ ID NO: 96347 - DNA, 367 bp, Oryza sativa
  Clone ID: PAT_MRT4530_94451C.1
agagcaaaacaaagatccttgattgcaaaccaaacaataaaaacttccattggtttctagaggaaacaaagaacattacataatcatttaatcatccagcttcgggccaggaatattcttctatcatctcaaaaactgcttgcaacaggagaccttagtttgtactgttccaatgaaagctgacttgttatccaatgccgaatgcactggtcctctgtgttacttgagtatccagaagataaggtcacctgacatggataatgccaaaagtgggcatgattaatcttaataacagcaacttacatgttatttagattgtgaactggttatcgacaacctggggctgtaaaggtcactttatttacac

SEQ ID NO: 96348 - DNA, 198 bp, Oryza sativa
  Clone ID: PAT_MRT4530_94452C.1
atgggggaggggaaggaggcggttgtgggggaggaggaagtggaggtggtggtggacagaatcgatgtgagctgttgcaacagaaggcgaaaaccagatcaagctacacgccatgaaagctcacggacagcaagacacagcatggcttctattgcaatactccttgttaagaacagcttggcagagacacaagtttga

SEQ ID NO: 96349 - DNA, 423 bp, Oryza sativa
  Clone ID: PAT_MRT4530_94453C.1
tcgccgacgcgctcgccgccccccagcgccccgcggcagcgccgctacgggcggaggccgccgccgacgagaccgagatggagaggtgagggtttcgtggtcaatcgtgagttcatcacacgatcgatgatgctggattcgattcgatggctcggaaattggaacggctcggggaaaaaataagggcgattaattagtggattattattgcgagagggtttgggatttgaggagggtaatggcgatgattgatgctgctgataatgcttgctgctgctgctgctcctgatgatgatgatgtggacgttcttgatacttgtataagtaatgctgctctgctcctctcttgtttttttctccttgattcttgaaatgtttttctcctcctgatttccaaatcatgttggggattcctgatttcct

SEQ ID NO: 96350 - DNA, 357 bp, Oryza sativa
  Clone ID: PAT_MRT4530_94454C.1
tttgtttttttttttttttttttttttttttttttttttttttttttttttttttttttttttttttttttttttttttttttttttctttttttttttttttttttttttttttttgggccccgggggtccccccgggaattcgggggggggccctgggggggtcccagttttccctatgggggggcgtttaaaagctgggggaaataaggggaaaaggggttcccgggggaaaatggttatccgctaaaaattccccaaaaaatacgagcccggaagcaaaaagggaaaagccgggggggcctaaggggggagctaaccaaaattaattgggcgtgggcctaactggcccgttta

SEQ ID NO: 96351 - DNA, 293 bp, Oryza sativa
  Clone ID: PAT_MRT4530_94455C.1
gcggccgcccttttttttttttttttttttttttttttaacctatgtttttttccttttgatatcacacagaaaagatacactttttgccacataccataagaataaacccgcactgttaatttccacagggaacgttcaacccgtaacgccgaacctgaaaccgaagcgaacgaccgatcacggcaatctaattttatgaaaatccatgaaatgctccccacaggcattcccatcccaaaaataccttggaccccccgcgcatgttaaaaatgccgtcgaataagcattttt

SEQ ID NO: 96352 - DNA, 125 bp, Oryza sativa
  Clone ID: PAT_MRT4530_94456C.1
gagcttattaaattttgccggggtcaaacttatactgatgggcaacaccacaaatgagtcaactacaatattatggaccccaaagcagggcacgtcttcagatactttcaaattttcagatgttg

SEQ ID NO: 96353 - DNA, 3175 bp, Oryza sativa
  Clone ID: PAT_MRT4530_94457C.1
atggaggcgcaggccacggcggcggtgaagaaggcgctggcggcgctgtaccaccaccccgacgacgccacgcgcaccgccgccgaccggtggctgcagcagttccagcacacgctcgacgcgtggcaggtagctgacagcttacttcatgatgaaagtagtaatatggagactcaaatcttctgctctcaaaccctcagaagcaaggtacaaagggactttgaagaattaccttcagaagctttccgtccgctacaagattctctatatgcattgctgaaaaaatttagtaaagggccacaaaaagttagaacacagatttgcattgcaatggctgctcttgcggtgcatgtacctgtagaggactggggaggtggtgggattgtgaattggctaagtgatgaaatgaactctcaacaagactttatcccaagcttccttgagctgctaactgttttgccacaggaatgttctagtcataaaatagcagctcgtcctgaaaggcgccgacagtttgagaatgaccttcgttcatcagccgaagttgcacttagtctattgactgcttgcttgggtattgatcaactgaaagaacaggttctggagggttttgcttcttggcttcgtttttgtcatgggttctataaaaacaaagtgcagtttccagttacttccgaattgatacattttacggtatctcgagaatctaatggcatcaccgaacagcttccactgattcaagttctcattccttatgttatgggtcttaaggagcaactcaaagattcatcgaaggatgaagaagatgtaaaagctattgcccgtttgttggcagacatgggtgattcttatgttgagttgattgcagcaggttctgatgatgccatgcagatagtgaatgcattactggaagttacttctcattcagaatttgacatttcctccatgacatttaatttctggcatcatcttatgcgtaacctgaccgataggggttcgtacgcatcatatggatctgaggtctcaatcaacactgagaggaatagaagattgcagctatttcgtcaaccttttgaaattcttgtttctctggtaagtttccgagttgaatatcctgagctctaccacaccttttcggaggaagaccaaagggatttcagacattccagatatgcggttagtgatgtattacttgacgcaactgatgttcttggaggtgatccgacgctgaaaatacttttcacgaagctgattcaggcatgtggaaatggacagaaccaaaaatggcagcctgtcgaggctgcgctgttctgtatacaagccattgctaagtcagtctcagttgaagagaatgaaatactaccacaggtcatgtcactgcttcccagctttcctcatcaagaacagttgctgcaaacagctcactgctttgaattttatactgtgactgggattcaggtttcactccttgttatgagttatgacgatgattggagctcaaatgtacttgaaactgcagtttgttcactcgttggagcattttcaaaatggattgaagccgcaccatctgaactgttgatactaccacctctggttgatattctcaacaagggtatgagtacatcagaggaaacagctgcagctgcttctgtggcattcaagtatatatgtgaagactgtaggagaaagttctctggttcgttggatggccttttccagatttaccaaattgcattaagtggagttggtggttacaaagtttcttcagaggactcattgcatttggttgaagccttaagcaatgtgaaacttccacaagtagttgctgacgctgtcaatagatattggccaacattgaaaagtatttttgatcaacgggcatgggatacacggaccatggagtcactatgtcgttcttgcaaatttgctgtaaggacatgcgggaggttcatgggattcaccattggtgcaatgcttgaagaaatccaaactctgtatcagcaacacaatcaggcttgcttcctttacttgtcgagtgaagttattaagatatttgggtccgatccagcatgtgcaaactatcttgcaagtctgattcaggcactttttggccatacaatacagctccttcggactattcaggattttacagctagaccggatatagctgatgattgcttcctgctagcatcaagatgtattcgttactgtccagatttatttgtacctacagagatgtttccaagattggttgactgtgcaatggttggtataactatacagcacagggaggcatgcaagtctatattatcttttctatctgatgtatttgatcttgcaaaatcacctgagggggaaaagtaccgagaattaataaatacagttatacttcagcggggtgcagtacttactagaataatggttgcttccttaacaggagctctgccatctagtcgcttggaagaggtctcgtatgttctggtgtcccttagcagatcatttggtgggaacatgttgagttgggcaagggaatgtattacccttataccaccacaagccttgacagattcagaacgttcaagattcttgaatattatatctgatgcatcatcaggatctagtcttggttccataacagatagatttgcagaaatctcagaagtttgtagaaggaacaaaactgtgcaagacatagttcaaggtgctttgcggccacatgatttatccttcacggttgcccccccgccattgtgagaacaggacgtttatacaagaccaactgaaagtccatggcggttcatctttagtcagtgttggtttatgcctccacagcttctttggatctttttttctacttcatacaggtttgagttgcggcaccatactgttcagatttgttcagaggatagataggttagtggtggtcactgtaattcttttgtatttcgtcgtcactgtacatgttccatgcattgtgtatctgggaggaaagttgtgttgtattatgtcaaaaacgaggtgggtatacatcactgggggagatcacacggatggtgatctgcctttgggcctgatttttcaacggccggccagcttctatcaatttagatggccttcaatttttttattgttatgaagacctcttcatttaaaatcctgcattttatgtttaagt

SEQ ID NO: 96354 - DNA, 102 bp, Oryza sativa
  Clone ID: PAT_MRT4530_94458C.1
atgctctccgcggcaacgtccgacgccctcgtcaagatcaagccaggcgagataagcatggtctccggcatccccaaggagcacctccgccgcaaaggatag

SEQ ID NO: 96355 - DNA, 210 bp, Oryza sativa
  Clone ID: PAT_MRT4530_94459C.1
tgaaaccatctcgtcaagcggcaaatggggccgaaacagccgccaccgtcctcgccggcgccgctcggacggatgaagcgttcctcatcgtgcctcccttgctcggccgacatagccttcctccaacgctgttgccgacggagctagggttgggaaggagagcggccggcagtggagggcaggttgaggtcgttgtcgctgccggatttg

SEQ ID NO: 96356 - DNA, 427 bp, Oryza sativa
  unsure (1)..(427): unsure at all n locations
  Clone ID: PAT_MRT4530_9445C.1
gtttattggactatgtggatgcagcatactactcggcctttcttaacttggcacaggggtcggcctctgctggatcaaaaggatacatatgctttagaaactagaacatatgatgtggaatttggagtatttgatcccatggctaatactcgggctagccgatataaggcatttatttatcttgccttggattcctcagctgtgatctctctttggatgtcatcactatagatgtggacttactcctttcttgaattatttatgttcttgctgctcacacgtgagattgtgcctgaaaactcaatatgaagcgcttatcatctgtctgctgattaattgaaaactagaccttctagagtcctttcaatgattgcactgaggggtntgggtatattccagtgaaaaacatatggaagcttagagatca

SEQ ID NO: 96357 - DNA, 732 bp, Oryza sativa
  Clone ID: PAT_MRT4530_94460C.1
atggggctgtgcgatggcgcggggctcgggtgctcggctatgcggcggcaagaggcagggcgtggccacgcggtggtcagcggtcgcctccccctcctctccatggccaacgccacctgcctcttgtcgctgcctccacagggtgcggcggaggagacgagcggtggtggggtgtggcggaggagacgggcggcggcggggtgtggcggaggaggcgagcgcagcagcagcggtggcgtcgcgggccacgcggagccgcctcgccgcgacgagcgccaccacgaccatggcgaggcaggccgtcgcagcgtctggccggtcgaccaggctagcgtcgtgggtcacgcggagccgcctcgcctcgacgagcgccgccacgaccatggcgagacaggtcatcgccatgtgggcgccgatgcgctggagcatcgtgatgccgccgccgcctcgcctcctccgcccccgccgttcgactcgccgccgcgctcacctctccaccccatcgcctcctccgccgccgcctcgcctcgcctcgccgccgcgctcgcctctccaccccctcgcctcctccgccgtcgccgcctgtcctcgccgccgccaccgccgccgccatctcgccttgcctcgccacagtgcgtctctagggacgagcctgctgatctaaccgattcattggttgattgggaatctaattctacagagaaagtgtggttcaggtcaccgctgacatag

SEQ ID NO: 96358 - DNA, 230 bp, Oryza sativa
  Clone ID: PAT_MRT4530_94461C.1
gatccaggtcgaccacgcgtccggaataactatagaaaacagagctgaccatccaatactgcgccctgagctccgaggacctggctgacatgcccatggatgccggcgcgggcgtcgtgcatcgcctagttgccgtcgccgttactcgcgaccactttccagctctcagcgactgagacaagcagctgcagccagagccgtcgctcgcgagggcctacctcatcagccac

SEQ ID NO: 96359 - DNA, 2280 bp, Oryza sativa
  Clone ID: PAT_MRT4530_94462C.1
agtaaaatggcgaccatgctgccgctgctactgccgccgtcgccgccgcgcgccttgtcgccgcggtgctcgctccagccccgcgcgcgccaccacctgctcgacggggaggccagcccgaggcgtggcgccccggcggtcggcgcgaacgcggcggcctacgcgcgggagatcggcgcctgcgtgcgcgcgcggcggtggggcgcggcgtgcgaggcgttcgcggcgatgcgcgccgcgggggccgcgcccgacaggttcctcctcccgcaggtgctccgcgcctgcgcgggggcgcgggaggggcgcctggccgccgcggcgcacgcgctcgccgccaagggcggccccgcgttcgcgggcgacgccgtcgtcgggaacgcgctcgtcgccatgtacgccgcgctcggggacgtcgccgccgcgcgcgcggcgttcgcgggcctccccgagcgcgacgtggtggcttggaactgcatcatctcaggctgtgtgcagaatgcgaggtatgacgaggctttgaacattttttgcgagatgtgcgagagcgagagtcctgatgcagtgactgtggctagcatactccctgcttgcactggcttgatggcactgggcattggaaagcagctgcattcttatgttatacgatgcggaatcaagttaaatgtttacattggctcttcgttgattggaatgtactccgagtgtggagaatttggttatgcgagaagcgtgtttgcagccattgaggagaagaatgccactgtgtggaatgaattgattcggtcatatatcaatgaggagaggatgaatgaggcttgggaggcttttcgcttgatgaaggagaatggattgcagcctgatactatcacatataatagcttcattgctgcatatgctagagcaggtcagaaagaacatgggaaggaagtacactgttatgcttttcggagtggtttgatatcaaacatatttgtttctagcaaactggttgacctttatggtaagactggtgatgtgggcaccgctgataaagtcttccggagaatcagtaacaagaatgttgtcacatggaacagtatactagcatcctacaggcaaaataggaagccagaaattgctttgaaactgttccatgaaatgatcaaatccaatttacttcccaacttagttacattacagattgctcttttgtcttctggtatgactatggcattgcagcatgggagagaattgcatggttacattaggaagaactggccagatggttatccaactgctcttgcaagtgctttgattgatatgtacgggaaatgtggtaagattgaggatgctagattggttttcgaatgcactgatgaaaaggacatagcaacatggaatgcaataatgagtgcatacttgctacataggatacctggagaggttaaaaaattgttcaagtatattgaacaatctggaattcaaccagatcctgtgactttcattatacttctttcagcttgtaagcaagaaggttccatggaggaagctcgcagatatttctacagtatggaagatgtatacggcatacaaccaaccttaaaacactatacctgcatggttgacatcatgggaatggctggcttactggaggagtcactagaacttatccagaagatgcaacttgaaccagatggatgcctatggtctatccttctgaaagcttgtaagctgcactcaaatctggagatcggtgagaaggctgcgaaagcgctttttgagcttgagccaaacaatacttcaaattacatgtcgctgtccaatatatatgccgacaatggcttgtgggagtccactgaggctttgagggttgccatgacagaacaggggttaaatgtagagagacaatgtagccgcttgtatcttggtacagatgtacacacatttgaggctggagattcctcgcatcctgcattcgaaaagattttgagtacatggaatgacttatctgataggatggaacagtcagggtatcctcctcaggatattgagccctattctaatgccgaagctgatccattgtcatgccaacacaccgagaggattgcattatgttacgggctaatttccgtgcgtgttcatgatctgatccgtatctcaaagaattttaggatgtgcatggaatgccattcatcaatcaagttcatctcgagggatatgaaccgggaaatatttgtttcagatggttgcacctatcaccattttcagaatggagcatgcagctgtggagatatgtgg

SEQ ID NO: 96360 - DNA, 1716 bp, Oryza sativa
  Clone ID: PAT_MRT4530_94463C.1
atggctttagctcacgaggtcgctttcgaggtgaacctgatcgaggacgacggcggcctcgccggctgggcgccggtgggcacgcgcacggcgctgtcctcgcacgccgagcgcgacacggccatgctgatctcgggcgccgtgtcggccgcggagccgaatgagcgtattagacgatcaagcggacggtacatcgtcgcgtcgcgccgcgccgacgaggaggacgggctgcggcgcgcggttccggcgggcgcgctcgtgccacgggtcacgtaccgtgtcgtcgggtgggtcagcgtgcagggccagggcgacgggaggcaccatgcggtgcgcgtcggcctccgcgtggacggcgacggcggcgacgacgagcgcggcagctggctagactgcggcgcggcacgcgtcgaggtgggcggcgggtgggcggagatcaacggcgcgttccggctcagggcgagcccacgcgtcgcggctgttcacgtccatggcgcgcctgccggtgttgatgttaaggtgatggatctgcaggtctacgcgacggaccgcaaggcgcggttgacgcagctcaaagagcagactgacaaggttcgcaagcgagacgtgattctcaacttgggcggcggcgcgaccatggccggcgcgtcaatccgcgtggcgcagctgctggagaatcgcttcccgttcggatcctgcatcaacaagacggccatccgaaaccccaagttcgtcgacttcttctgcgagaacttcgactgggccgtcttcgagaacgagctcaagtggtactcgacggagccgcagcgcgggcagatcaactaccgcgacgccgacgagctgctcgacttctgccaccgctacggcaagtcggcgcgcggccactgcatcttctgggccgtcgacggcgacgtgcagcagtgggtcaaggacctcggccgcgacgacctcgccgccgcggtgcagggccgcctccacggcctcctgtcccgctacgccggccggttccgccactacgacgtcaacaacgagatgctgcacggccgcttctaccgcgaccggctgggagacggcgtcgcgccgctcatgttccgcgaggccgcgcggctggacccggccgcgcggctcttcgtcaacgactacaacgtcctgcgtgggaacgaccccaacgcgacgccggagaagtacgtcgagctggtggacgcgctgcggcgcggcggcgcggcggtgggcgggatcggggtgcaggggcacatggacagcccggtggccgggcaggtcatccgcgccgcgctggacaagctcgccgcggcgggcggcgcgcccatctggatcaccgagctggacgtgagcgagcccgacgtggggctccgcgccgacgacctggaggtggtgctgcgcgaggcgtacgcgcacccggccgtggagggcgtcgtgctctgggggttcatggaggggcagatgtggcgccgggacgcctacctcgtcgacgccgacggcaccgtcaacgaggccgggcagaggttcctccagctccagagggagtggaggtcggacgcgcgcggcattgtcgacggcgatggccgtttcaagttcaggggcttccacggcacgtacgtcgcgcaggtgacgacggcgacggggaagatgctcaagacgttcaccgtggagaaaggggataattctctcgagttggatttggatatcgaaatttga

SEQ ID NO: 96361 - DNA, 753 bp, Oryza sativa
  Clone ID: PAT_MRT4530_94464C.1
atggctgctcagcaagctgttcgtttcctacaagctaaccctgaaatgctgctcccacggcattttgcgctggcgtggacgctgccgcgtcgcgacacgtcagcgcgcgctggaaaacggtgggatttcgcgagcactcctgcctccacgtcgtcgctggtgacggcctcccccgcgcactctctgctgtcgtgcccgccgccgcccggcacgcgggccgctgccgtcgccgcatcgttgtcctgcggtcgccatcctctcgcactcgccgccgcatccgccaacgaggaggccgggaccaccggatccggtgactccggcctcctcgccggcagatccggccactctgaggcgagggggtctcgccccgctgtcgccgccgcccgctctcttcgcagcgccgtggctgccgtccggtctgctcgctacgccgttgccatcgcccgctcgaaggggatgccgtcgatgcctgctttcctcgcagcgccgtcattgcctcccgctctccttgctacgccggcgccggcgcccgctcgtcggggaggtcgtgggtgccggatccgacagccacggtgtccccgccggccgatctggtcacccggagtcgacggcaagcggtaccacagcaggctcatcggtagtaacgagggcgattcctttgctagatcgcaaactagccgatctagaggtgtggtgccggaaattatgttagaggtgacagtggccagcgacaaggtcaacctggcggtgtag

SEQ ID NO: 96362 - DNA, 1064 bp, Oryza sativa
  Clone ID: PAT_MRT4530_94465C.1
ataagaccacattcctttttaaaaatatatgtaatacatgattcccgaaaagaactgtattgtcacatgaagaattacaattcatttttttttgaactaactacaactcaaaattagtcatggtgaataataagacggatcctggatttctagcttagaaggcagtggtactatttgggggaaaatttctatgaacatttagcgctttctcaaaaaaaattaaataaaaatatttcatgtagcagagattggaaatgtgtacctttatgctctatcttcatatgaatattcttctgatggttcttgcaacagcgcgagacagaagacgattagttaaatctgctggcaggaggagaaactgctgttgggactctggtggaagctcaggaatgacagaaagtactggcaacaactctggtagagatctcatttcatataacacaagagaaatctcatctgtactatcaccttcgttctcctcagtgctattgtatcctggaattggagatgaatcctccttctgagggaccttggacaaaagtaggagaaggcgatgtaaatttctcaagttagtggcatcctcattgtctagtgagggtgatggggatggaacagcaacgggcaatctggaggctgcagcagatgttgcagaactcaatgtagcagctccaagtgcatctaatcccttagcaatctcctgaagaagtaaatccttcacgaaggcaccctgttcagtaagagtaaatgacaagacttgtttaattgcaaatttggaactatcagtttcctcttgttgatccctggtcagggactgctctgttcttgctcgaagcgactcagttagcaaagactccaaacggtcaatctggaaagtgccatccttataaagaagcgtctgcaaagttgatcggagctttggtgagctgtctgtgagaacttttcttgcaatccatgggtatgaactgcccaagactttgtagttgggattgaagctgattgcaatgccttccaagacagcaaggcttcgaattacaagagagaagtaagaaggtatctggaacttg

SEQ ID NO: 96363 - DNA, 1887 bp, Oryza sativa
  Clone ID: PAT_MRT4530_94466C.1
atggcgaaggccccttcgacaaccgccgtcacccagtttcaagcagcggctttgaaccaagccacggcctcaactcaacaagcggcgaccctgacgcaagaaggcatcgacctcgaaagccaagatgggggcgatgcgacagaatatgaacaagctacaagacatgcttcgtcaaatgcaagagcagcatcaagcctacgaagcggcgaagcaagtcaagccagccccatcggccccccacccggtttcgacagcgatggtcaccacccaagctttcggccaagctgttcaaccccttgctgcacaggcttcggctgtctctggacaacaagtgaactagtcaaatcagtgcggcatgacttggacacaagcaccatgacccaggcagtttcggccaacatgcagggagcactgttcggaaccggacctcagctgaacacaatggcccagccaaacatgcaggcaatggcttcgccattcaccgtcccgtacccaagcttgaactcaccttttgagggcgcaatgatgagaggcgggggcaaaaagaggctaccgctaagctgggggctaaagaatcatcccatcccaccccaattcaagtacccacccgttgcaagatacttgggagaatcagacccaagcaagttcttgtcaatctatgagtccgcaatcgaagcagcccatggcgatgacaataccaagaagaagaagccgggcaaaacagcaagggagcatattcgatgcttttcgcaagcgcgctgtcaggtgcaagacatcacggaggcgtccatcatcaacgctgcttcggcagtgctccttccaagcgagctcacaagaagaatagcaaggaaagagccccagaccatcgagcgcttgtattgcatcatcgacggctacgcgcgtggcgaagaggacacaaacaaaggctggagatacaagccgactatgacaacgctgttgccgcccttgcagctgttgcaagtcctaggccaagttcagctagctgtggcttttggcatatgtcccaacatgcgtgaggagatgattctcttcgaagtcgtcgatattccatacaactacaacgccatctttgggcgcgccacgttgaacaagtttgaagctatcgcccaccacaactacctcaagctcaagatgcctgatgcctactccgggtatcatcaaattcttatgaacccgggagacataccgaagacagctttcatcaaaccattcggcaccttccaccacatcaggatgcctttcggactaggaaatgttggggctactttcgccaggctgatatgcaaagtactctgttcacagctggggtggaatgttgaagcatatgtcgatgacatcgtcgtgaaaaaacgcaaggctttcgaccatgcgtctgacctccaagaaacgttcgacaacctgcgctcggcgggcatgaagctaaatcatgacaagtgtgtctttggtgttcgcgcgaataagttgctagggtttttggtctccgatagagggattgaagccaacccggaaaaaattgatgccatccagcaaatgatgccaccaaagagcgtacgcgaagtacaaaagctcatggggcgaattgtggcactcggtagatttttatcaagagcagccgaaagaggtttgccattttttaagacccttcgaggggctggcaagttcaattggacaccagagtgccagacagccttcgatgagcccaagcagtgtctgcaaagcccgttggcattggtcagtcccgcagcgggtagcgaattgctactttatctcgcagcttcgccgattgctgtcagcgcggctctagtacaggaaactgaagtgggcaccaaaccagtgtattctatgtccaaagcacagcaagggtaa

SEQ ID NO: 96364 - DNA, 179 bp, Oryza sativa
  Clone ID: PAT_MRT4530_94467C.1
gctaccttttattgaatgctgctatctaatgcactgggttccccctggcgaggaatcatgagtctgacgacgctgcgaaagttattgataaagcattaacaacagcaggcatgtgggatattatcgacagtactgccattgctatcggaaggagggatgcatggacatattacaccggc

SEQ ID NO: 96365 - DNA, 315 bp, Oryza sativa
  unsure (1)..(315): unsure at all n locations
  Clone ID: PAT_MRT4530_94468C.1
ggtattaatctacacaanctggtattagaacctattgacaatgcttgacgatcgaatgtatcttgattcacaagcaactatagatgtaaatagatctatgcacgtgccttttcgcgatagtaccaatgcgtacactaggaatagtgcaaaattctaacacagacattgatatatgantgcttgatgttgttcgacccagcatacagacaagccagtgttcaagcagcccaagttatatgatacctgtgtgcagatctttctagggcagcacgcgccttagagccgatgtggagaggtgcttgcgccttgtacgat

SEQ ID NO: 96366 - DNA, 1488 bp, Oryza sativa
  Clone ID: PAT_MRT4530_94469C.1
atggctgcggtaggcgtgaagcgcaaactcatcgtcgacaaatcccctacccatcacctcctccatttgcctccgtcgcccatcgctttgcttagaaggagggggctaccttcagatctggaatcctctgagggtttcttcacatctctccgttcggacgctgcttacaccgccaccaccgaagaagatgtgcaagctgtagctcgcgccgtcatctgcatcgccttgaacttccctgaagccatctgccagttggtgcgccagctcaccccggggaacgttgctgtggcgctcgattgggacctcctcgactccgatcaccttcggaagatggctgctgggcacaccacttggaacgaggcggagctgcaagctttcctcgaggcttacatggaagagatcgaggcacgaaccatcacgagcacctgcccaaaccgccaaggctacgccaaccttgaggtcaagatgtaccagaaggcccagaagttgaagaactttggggacacttatcgccgacgcttccaaacatggtgctggctggagtcgatggcaactggccttgggcgctgcccattcacgggaaacatccttgcaagccctgagtggtggacaaggatggaccagatgaggagaggtgcccgtgccttccgcaacggtccccttctcttcactccagagaaccacacggtgtttaggggtagggtatgtaccctaaaccgctctggggtccctgtgagcccatgcgccatctctgcagctcctcaacaggctgaaatcctcgacattgaggatttgactgagcaagcgcagcaagaacccgaggatcaaactccacggcgtggcaagagaacactcactggtggaacatcctctggcagcagctcgaagtggtcaaggggatcttatgccagtggcgcactgaaccgtttggcgaacctccgcattcagtcaaacgagagcagggccaggcgcgaagagctcaagcaagcaaagagtgctagggcctgcatggagctgttgaaggcagacggagtcagctccagggacccaatataccacatggccctccgggtatttcgtgatggcttcttgcgcgagtttttccttgatgactgccccacaccggaggggaggctctacttcatccagtcccagtatcaggacatggcccagtaccagccactacccccgcctggttttggaggatacctccagtcagctcctcccggtattgtggttggagagggttctggttatgctgccgaagctgaaagagttggagctggagatgatgaggacggtgctgatgatgacggcgagagagttggggacaacaagggaggacaaggtggtcatggtaaaggtggtgatgacgacggcgatgatggaaatggtggtgctgccggctatgggggatctggttatgggggtgctctctacgggggcgtccctggaagctatgatctttccggatatgcaatgttttaa

SEQ ID NO: 96367 - DNA, 196 bp, Oryza sativa
  Clone ID: PAT_MRT4530_9446C.1
tacgcgagagagaggcagggcagcgcaggagtcggcgcacacggcgaggctgagcacgtctataacctgctcgcgcattacgacaaaggccaccttcgcgctgctgggcgccacccgtacggcctcggcgcttacccgcgagggccacccttacgacaccggcgtctaaccgatacttctgggctaaacagactgg

SEQ ID NO: 96368 - DNA, 497 bp, Oryza sativa
  Clone ID: PAT_MRT4530_94470C.1
cccacgcgtccgctggcaggccagacccgatacacaaagtatagggactaaaaatagacatataaatgtcaatgtctaaagaatagggaccttaaatagacttattttagctatttatataccacatcacaaagaagagggaggtaaaatagactttttttagctatacaatgtcatagcccaataggagggagaaaatttagacttattctgaggaaaagcacgatggcccatcgtgccttcgggccggcccggcacggcccgaggcgtgttgggccgtgcctgggctgtgagtgcagcacgtgggctggcacggcacggcccggtgcgtcggtcgggccgtgccggcccgacaagcctaggcccaggcacggacgggcctgggccgtgccgtgccgggcggcccacatggccatctatagctggaattcagatagaagagatcaatagattagcaaacaattgcaagatgtgttttcaccctggaggagaaaaca

SEQ ID NO: 96369 - DNA, 156 bp, Oryza sativa
  Clone ID: PAT_MRT4530_94471C.1
atgctgccggatatcgacttcagggataggcatgaatattcccctacggtgtctccggataccgtcaggagatacgaaagcgctaactctgatctcgccgggcacagatctgaggaggaagactaccctgttgtcgactacgagttatacctttag

SEQ ID NO: 96370 - DNA, 213 bp, Oryza sativa
  Clone ID: PAT_MRT4530_94472C.1
atggtggtgcttgccgtcgacgaaggctacggccatggaggtgcggtgcccgactggatcggctacgaggtggatggccggcgctgcgggcgtgcagggtacagccatggccttgcccttctgcttcttgggaggaaagatgaagagaagcctgtcaaggtatccccgtggaatcagtaccgactagtcgaccgggaagctgagcaggtttaa

SEQ ID NO: 96371 - DNA, 113 bp, Oryza sativa
  Clone ID: PAT_MRT4530_94473C.1
attaaatatctaaagccggagctatcatataggggattcacttatacctgacccaacatcatatatacgtagcaaattacttctcttacatcatagttatatcgagatcattt

SEQ ID NO: 96372 - DNA, 468 bp, Oryza sativa
  Clone ID: PAT_MRT4530_94474C.1
atgctacgaaacccctatcctcttgtcaaaggatcattgaagtctggcctgcggcctgcccataagcctgaagctgccgtttcttctcccctcacaacgtcccatccccatccccatcgccggcgcccctccctccccatcgtcggcgccctctctcccatccccatccctgtcgccagcgccccttccctccctgtcgtcggcgcgacgagccgcgatcttgagatgaacagtcgtgcagtgcagagagcgcgggaggagaagaaacacgcgcgcagagagggcgatttggggatgaagcgcgccgggaggaaccgcgcggcgaagacacgcctcagcaatgcgtcgtgccctcgtttctccacgccgccccacctcgatagcattgaagaacgggacgtggcggcgatttttggctgctcaactacgtggaccgctcgggctgaatgccagcagggtgcactgtga

SEQ ID NO: 96373 - DNA, 138 bp, Oryza sativa
  Clone ID: PAT_MRT4530_94475C.1
atgattgatgtacccatcgggcgagatataagctggtttgcatgcgaccatgtcagcgtaggacaaaacactaggggcactgttcagctgctccaggacgtcgacaacatggcgtgcgccgtgcaaagctctaactag

SEQ ID NO: 96374 - DNA, 1226 bp, Oryza sativa
  Clone ID: PAT_MRT4530_94476C.1
ccccggctgcccggagcgggtagctaagctagggtttcgctcggaatcagggttcggtttcctccaccggaattggcggcgatctggagctcggcacggcggcgcgcggcgtgatccggacgctcgggtaggtgacggagggagggaggagatgaagtcgtcgctgcggaagctgcggggcttcgcgctgcagcgccacgagcagcgggtggaccgccgcgggggccactccccggccgccgccgccgccgcgaacgagctcctcgccgcctcgcaggatatggcagatatgaggagctgttatgacaatctgctttctgttgcagcagcgattgcaaatagtgcatatgagttctcagaagcactgcaggaaatggggacttgtttacttaaaagagtcacaccaaacaaggacgggattaatgataaagttttgctgttgcttggaaaggcccagtttgaactgcggaagcttgtagatagttatcgtgtgcatgttcttaataccatcaccactccatcacagtcccttctcaatgaacttcaaactgtagaggaaatgaagcaccagtgtgatgaaaaaagagagttgttcgaatttctgctgaatgcacagaaagaaaagggaagatctaagaatgccaaaagtgacattggtgcgtcagagcaattgaaacaagctcaggacgattatcaagaagaagcaactctttttctattccggttaaagtcattgaagcaaggacagttcagaagtcttttcacacaagctgctcggcaccatgctgctcagctaaatttattcagaaaggggctcaaatctcttgaggctgtagagccacatgttaggcttgctgctgagcagcaacacattgatcatcagttcagtgcacttgacgaggaggattactctgtggatgaagaaaatgaggatgattacaatgacagtcatgaagatttatcctttgattatggagaaaataaggaaggcacagaagctggtcatgcttccaggagccctacagaggaacttcttgacagaagcaaagcagagtattcctcttttcctggtgaaaggcagagatctggaagtcagtcagccccactttttcctgaaaaaaaacttgaggcagcagagagaataaaagagttgcggcgttctgctacgaggaagctaaatacttatgttttgcctactccaaatgatgttagagacacctctcaga

SEQ ID NO: 96375 - DNA, 710 bp, Oryza sativa
  unsure (1)..(710): unsure at all n locations
  Clone ID: PAT_MRT4530_94477C.1
gnaaagaaaaaagtaagatttgtttgtcatatcacgatcggaacttagatgtaactctttcttgagtagggggaaaaggacacctatcacgcggtcatgccttgaacgcagtaaagaaattaataagcttcgaataatagctacgctagtctccaatagcgtcttaagcgttggttttctttgcgggcatcgtaatggattggtggttcgttgcctctattttaaatagggtacggcatacttgcctgaatcttctctctcggttactcagtggagtgatctctctcttaaattcccataaggataaggaaaagtagacggttcgaaacccgtgcttaaatcctactcaaggcccactacgggtagcgagcaattaacaaatagagacaaggatgaggagaaatgacgcatatacggccggcctgggtcactcatgatgttggtagttcaagtgaattgtcgtagtgtaaggaagattgattggttttctgattgctacttggctggcataagaaagaaggcgccccggcaggaattctgtaagcttgacttgcgcgcagcgtttgggaatcaaagataaaaaataactctatgggacttacggaactggaaagaaggtagcacctaggcgtaagaaagaaagtaaatagagacagcacctactacgctatctattgaagcttactatataatataaaaaaaaaaaaaaa

SEQ ID NO: 96376 - DNA, 593 bp, Oryza sativa
  Clone ID: PAT_MRT4530_94478C.1
atgtcagggtgtccacgtcacctttctttcccttctctcccttctttcttccgtctctcttgctcttctcactcgcgccgaacacgttgtgggaggcgcggccgggggcgacgccgaaaggcgaaagaggactccgcagaggcgagggtggactcgacgtcatcgacgcggccagcgccgaagagcgcggagaggagcgccgagagggagacgttggagcaggcaacgggcgcggagtcggagaacgcgcggagggcgttgttggggcccgagaagagggagatggcgcgggtgagaagaccaggggacgccagggcggagtcgaggagggcgcagaggagcgagacggcgaggtctaggcggcggaggcgcgggagacaggacacggcgagggaaaagagcgggcgggagccgtggaggcacgggtaatcgtcggggcgggagagcgtggtggcgacgagggagtggatgcgggccagatcggcctcgccgcagacggcgagatcggggagcgcggagaagcgacggaggaggtgggcggggacgctagcggcgaggagcgggttgggatgccggcgaaggagggagaccat

SEQ ID NO: 96377 - DNA, 569 bp, Oryza sativa
  Clone ID: PAT_MRT4530_94479C.1
cccccatctatctctcccttgctctgcagtctgcaaggagcagtggcgagcggcggcgcgtgacgacaacggggcggcgggcaggcggatagctcgcgggaatcgaggtcgtccgggggactggcgacggcggccttggatcccggcggtgaggacacgctcggccgttgcgcacctctcccttcgcccgtcaccatcgaacccccacccacggtgcctggccatccccggcgaggagctctattttcggtgggtgtcagccgggttggagcggtggaggtcgttcttggcaacgatgccgccatctctacccctctaccaccgctgccgaccccccatcctcctaactaccgatccctccccggcatctagaaaatcctcgcccgacctcgtcaacaagagcgatgagcggcgagcagcggcgggaggagataacccgccacagctgtcgcgctcgccagcaacctccttctttgcctcctcctcctccagccacctccgccgcccgcggcccgccggcctgccgccggcatgcttcggccgttgttgtcatcggaggcggtgaggac

SEQ ID NO: 96378 - DNA, 462 bp, Oryza sativa
  unsure (1)..(462): unsure at all n locations
  Clone ID: PAT_MRT4530_9447C.1
gcatacactggtcgttgtagatgctgaatgcatcgtcgaattaagctaggaatgtnattnaggggccgatgatgattatggtgtttgtcacgagtaacattgacctgatggtgccggcgttcaacacaacgggtgactagttgaatggtcaagcggctgcttacgctggtgcctaggttggtagacctggcgtgctcaagatcaccagcgcggtgagcatctctgccaccgatgctaggtggttgctgaggtgatgttcttcaacagtgggatcccattgctgctcattgtcgaatgggatggcaagccagttggtgatggtacctaaactaagttttgattaattggagcagtnctgatttggaaagagaatattatttggagcaatattattggggaaatgtattttgtgggancagttttgcaagggttttattggngcaattctggttggaattatat

SEQ ID NO: 96379 - DNA, 461 bp, Oryza sativa
  Clone ID: PAT_MRT4530_94480C.1
gcgggaggaggaggtcggccgcctcgtcgtcgccgtcgccacggcggcgacgcggcggcccggcgaggccgccgtgaacgtcggcgagcggctcaccgtgctgatcaccgacatcgcggtgcgcacgatcatcggcgaccggttcgagcggcgggaggatttcctcgacgccgccgccgagtgggtcaagatcatgtccgggttcagcctcggcgacctgttcccgtcgtcgaggctggccagcttcgtcagcggcacggtgcgccgggcggaggcgaaccaccgcaagaacttcgagctgatggattacgctctcaagcagcatgaggagaagagggcagctgctgcagctgccggcgccggcgccgtggaagacgatgaggacatcgtcgacgtgcttctcaggattcagaaggaagggggcctcgaagtgcccctcaccatgggcgtcatcaaaggcg

SEQ ID NO: 96380 - DNA, 904 bp, Oryza sativa
  Clone ID: PAT_MRT4530_94481C.1
atggagtacgcgatcttattcgccacgtcgttggtgatcaccgtgctagcagcatccggcttcgcgccggcgcatggctggaacaaagggacggcgacgttctacggcggcgccgacgcctccggcacgatgggtggcgcgtgcgggtacgggaacctgtacacggcggggtacgggacgaacacggcggcgctgagctcggtgctgttcaacgacgggtggtcgtgcgggcagtgctacctgatcatgtgcgacgccgccgcgacgccgcagtggtgcagggcgggcgccgcggtgaccatcacggccaccaacctgtgcccgcccaactgggctctccccagcaacagcggcggctggtgcaacccgccccgccctcacttcgacatggccgagcccgcctggctccagatcggcatctacaaggccggcatcatccccgtcctctaccaacaggtgaagtgctggaggcagggagggatcaggttcacgatgggagggttcaacttcttcgagctggtgctggtgtcgaacgtggcggggagcgggtcggtgaggtcggtgtcggtgaaggggggaagcacggggtggatcacgctgaaccggaactggggcgccaactggcagtgcaactcggggctcgtcggccaggcgctctccttcgccgtcacatccaccggcggccagacgctctacatctacaacgtcgtgcccagctggtggagcttcggcatgacattcaccagcaaccagcagttcagttattagcagggagaggaatttgttcgtctgcatgatctcaagctgggaaattaatttgttagtactttttttggattaattgtacatgtatgtacatcttgaattcgtcaaatatattcattatttgaactcaaaaacaaaa

SEQ ID NO: 96381 - DNA, 765 bp, Oryza sativa
  Clone ID: PAT_MRT4530_94482C.1
atgggttgttctatcagtgtctataatgaggtagccatgaaacagaagactggctctccctctgttggtgtagaaggcacggccaagaagagaatgaggggctctctctctctgatgtcccaagctgctaggatgaccaccgtgtcgaagccttctttgtccgccttgttgatggatttcctgctgtcgcaccaccaccagagaaagggctgcgggttggaagggaagcactatggctgcttgttgacgctgaggatgagccaccagatttggcatgattctgcgcaaccgactaggatgtgccatttatcctcccagaacagcatcgtctttccatcacccaaatggcagattgttgaagccacgacaaggttgcagacctgcttggagacagccagacagccaccaaagtacgagattgacatagcagaagtgattctcctacttcacgaaggtatttgtatactcctatatgaacaagttagtgagcttggaattagagcaacatgtgataacaaggctcgttttggtgtttgctggtggtgcaggtggagagaaaccttgaatcctgaaagttcaaaagtggggagttggtctctcgatgaggacaaacgcctcatggtacctgtgaagttgtttgggtctggcagctggaataagattttgctcagttcattcctggtcgcacagagtcaatgcaatgaaaggtggcctagtgttcgtgatccagatatagatcttggggaatccagatatagatcttga

SEQ ID NO: 96382 - DNA, 333 bp, Oryza sativa
  Clone ID: PAT_MRT4530_94483C.1
gagccttaatttttcttaagtttaaatgccatctttagtggacaaatccttaaatgatttttagatattccaaaaaaatcccgccctcccggaaccataatgggggggggtacaccagggtggggaggaaaaataaagtgatcctaggaacaaaaaacacgcgtggctttgcgccatctaaaaaaattctatacaggtctggagaaagcaaatcccacaaccccctgaacaaaaacgattcccccagaagaaagaaaagcctggactgagggggtagtcatcattaccctgtgtattacactatacaggagagctccaagattcatgcacata

SEQ ID NO: 96383 - DNA, 393 bp, Oryza sativa
  Clone ID: PAT_MRT4530_94484C.1
atggaatggcctggacatacctgtctggctgtctccaagcaggtctgcaaccttgtcgtggcttcaacaatctgccatttgggtgatggaaagacgatgctgttctgggaggataaatggctgcatggtgcaaacatccaggagctggctcctgccatgtgggagcatgacaacattcttgagcaagaacgggacaacaccttcagctggaagtgggagcactcggggcagtactcacctgaatcagtttatgccacacctgttccttgggaggagatgctgcatggcggacagattaagaaaacagggaaatccatcaacaaggcggacaaagaaggcttcgacacggtggtcatcctagcagcttgggacatctggaaggaggaaaaatag

SEQ ID NO: 96384 - DNA, 806 bp, Oryza sativa
  Clone ID: PAT_MRT4530_94485C.1
atggcgcctttgctcctccgcggcctccacgaactctcccccgcccccgccgccgcctccttcttctccgcctcagggaacaccgcgtgggattctgaaggtccattcaagccgttgcatctgatgaatccaactcgactgtcttttatccggtccactctctgtagacatttcaggcgggatccaaattcttctaaaccacttgaaggccttaaagttattgatgttggatgtgggggtggcattctctcagagcctcttgctcggatgggagctacagttactggaattgatgctgttgacaaaaatataaagattgcacgtgtccatgctgcatccgatccatcaactgcttccatagaatatttctgcacaacagctgaggatttggtgaaagagaacaaacaatttgatgctgtgatttctcttgaggtgatcgagcatgtggctaatccctcggggttctgtgaatctttgtcagctttgacagttcctaatggggccactgtgatttctacaatcaaccgctcaatgagggcatatgcaactgcaatagtcgctgcggagtatattcttaattggcttcctaaaggcacacatcagtggtccaaactagttacccctgaggagctggtccttatactggaaagagcttcaatctctgtacaagaaatggccgggtttgtgtataatccgctgcgtggagagtggtctctgtcagatgatcttactgtaaattatattgcttatggcatgaagaaagtcgaaacaccctctgagtcaaattgaccctcttcttgacagct

SEQ ID NO: 96385 - DNA, 416 bp, Oryza sativa
  Clone ID: PAT_MRT4530_94486C.1
tttttgtttttttttttttttttgtttttttttttttttttttttttttttttttccggaactactagcatatccattgcatttttttttaaaactacccggttttttaaaatccagggaaaagttcaccaatttttcaaaaacatatccccccatttcactcacatatactacaaactagtcactaatggaaatttttacaaacttttccaagaaaaagaaaaacctccccctcgtccggaagcgacaactagagttgttccagtggggaaaagagatgcccccaagggttaggggaaaccactccctgggggaccacccccgcggacaaattacttgggggaggccgcctcctcgtcgtcgccgtggggaacctcctgggagataacctggagcgacatgcccttggactccgg

SEQ ID NO: 96386 - DNA, 217 bp, Oryza sativa
  Clone ID: PAT_MRT4530_94487C.1
gccatcatcctcggaggtgctccgctccttcaaggagctatgctgcctgcgtttcgagctcaccatggtagaaggcgtgttgcccgggtctcctctataccccaccgccgccaccccgctccgcccgctgtcttctccggctatcgtcgttcctcctgcctgcttcatgcatggctgctccgcccgacaccaccccgcttgccctgctcctggctga

SEQ ID NO: 96387 - DNA, 390 bp, Oryza sativa
  Clone ID: PAT_MRT4530_94488C.1
gctgcacccttgacttccgttgatctatcacttttctctggacaacaaattgttattgaggagagatctcccaaggaattgttgaattcacgtggaggacttggagagcaggttgctgcctcaggaatatctgtctggaatccggcttttgatgttacacctgctaatctaatatctggggrtyattacagagaagggtgtyattacaaagacagcagctggtgatgcttttgacataaaagctttygtacagaaaacaattttaggkggaacgtatttcagtbcgaatkaccctsgkggatttttytcaactttcatccattktagggtttggaaarwwttttttwggggagagtttayayytykgggggkcavtccgtccaaagtaag

SEQ ID NO: 96388 - DNA, 755 bp, Oryza sativa
  Clone ID: PAT_MRT4530_94489C.1
aatccaccaaaacccagccgccatcgcccccttcctcgccaccgccatccactctaccaccgatctcctcacccaccaccatcgacggcgactacctccaccgttgcaatgtcccaccgtgactcctccattggctcatccactgccaccgcgtcgtccaccaccggcggtggcctctcctccctgttccccaacctcgacgtccccctctcttcccctcaatccaccgatccacgccgccacagcccccctcttttcccctctctccatcgctctcgctccccctcaacagccgccgcatctttgtcaggacagcgacactcgctgccctccgctcactcttgtccgggccgcccccgttcttcgcctgcgcgcccgcctctgcgccgccagatcaccatcgtccggagtcgccggggccgttgtcctcacctgccaagccgatctcctacgcgttgccggtgggatttgcaacagggatggcgtcgtgccctgctcgtctctccacagcagtcggcgccgatcccctgcctctcccacgccttgcgttggcctggcaccaccccctcgcctctgcatcgccttgcatcgggctgctcctccgtcggcagatcccaacgccgacatatcaaggactccgcctcgctgccgtcaaggtggtggaggtggttgcctccggagtccctgtgacgacggcaacgcagctcggccacgttgattgcttggatgcggctcagcaaatgcctggcgggtag

SEQ ID NO: 96389 - DNA, 387 bp, Oryza sativa
  Clone ID: PAT_MRT4530_9448C.1
ggggttacatcttatggggggggggccacgccaaaggttttattttaattgggcggacaagaaaaaatgagccttttttaattggaggtttaatcacgcgtggggcaaaaattagccaattgttaaaatttttcccgtttgggaatttttaaaaacacattttttgagttagcctttttgcccttaaaatttttcgtacgtttgtcgcccccttttattaatttttgatccggagcgttatgggcttgcccttttgcaggggaatgggcggaaacaattttagttttcagtcaagcggggggaggtttttttttttgaggagcaccctgtcgaccagccgaagtaattttttttatatttgggggccgtgggaccacgagtgcccct

SEQ ID NO: 96390 - DNA, 477 bp, Oryza sativa
  Clone ID: PAT_MRT4530_94490C.1
catatgggatatagcccgctgtctgtgtctgtgtgatgacattcatatgagatgcccgccactgtcatagtgatatgactcacatacgagagcagatgatatgatacatctgtcggatactgacataggccacagacagggtgcgcacatacattgtctgcacgatataggcctgtgtctgtgggacaaaggcacacagtggcggtcccacatggccctggggaaaggcccccaacgcttccggtggcgtgggttggtggggaatagcggtaagattgcctgcccactttgccacgagcctggatgcactgtgtctacgatgcactacacacatgtctgtacatggtgtatgttatgccctacgacccctttgttgtggaagaaatgttgttggcacccatgcacgttgggtgcctggagtacccactgacacaatggagaacttagtttgatacccaaaaaaaaaaaaaaaaaaaa

SEQ ID NO: 96391 - DNA, 462 bp, Oryza sativa
  Clone ID: PAT_MRT4530_94491C.1
atgggtggacctcatccagatgctgttacgggaaggagaaaagttatccatgtcctgagtatgcggcggctgcagcctgcggcgtgggatgcggaggtggcgtgggacactaaggcggcggtggtggcagcatgggatgtggaggcggcgccggcggcgtgggatgggaggcggcagcagcgcgggacaccgaggcggcggcggcggcagcatgggatgcggtggcagatgccagccatatccccccctgacgtgtcgcacagggatgcagttcacagcctgataccatctcatgacaaagatgtcgcagtagtcatacgccgcctccccacccaagagccgctcgtccactacaccgccgcatcccacgccgccgccgccgcctcccatcccacgctgcagccgccgccactgcctccgcatcccacgccgcagccgccgcctgccgtgcttgccgagtga

SEQ ID NO: 96392 - DNA, 664 bp, Oryza sativa
  Clone ID: PAT_MRT4530_94492C.1
caagccggtgtttaggtggatccaccgccttctcgacgagatggacatcgagatcctctgcctccgtctcggccgcgtccacgtgatcaccgtcgcctcgccggagatggcccgggaggtcctgcgcaagaacgacgccttgatgacctcccggccggcgtcattcgcgtggcgggcgttcagcttcgggtacaagaacaccattggatcgacgggcgatcagtggaagaagatgaggcgggcgctcgcatcggagatcctctcgccggccatggagtgccaccttgtcaattacgtctacagccactgtaacaatggcactgtagacgtccggcacgtcacaaggcatttctgcggtaacatcgccaggaagcttgtgtttggccggagacacttctcgacgccgccaccagccaactccggtggccctggccacgacgaggaggcccacatcgacgcgctgtttacggcgctggattaccccagcgccttctccgtctccgactacttcccggcgttggttgggcttgacttggatggccatgaggaggtcgtcaatggcctgctgaacacattcggtcggctgcacgatcctatcataatggagaggatgcaagaatggagagctctcaggagaaatggtgatgagaggagagaagtagcc

SEQ ID NO: 96393 - DNA, 184 bp, Oryza sativa
  Clone ID: PAT_MRT4530_94493C.1
ggagggggggaaaaaaccccttttattatttttcccgggcccctttggggttttgggtagagggggggtgcgagacatcgttgggctaggccctctctttggtgcgggatacaatactttgacctgcttacatgggattggttcggcaaggtctaatcttaaatgctgttcttgcggttgtagg

SEQ ID NO: 96394 - DNA, 218 bp, Oryza sativa
  Clone ID: PAT_MRT4530_94494C.1
tcgtaagtcttattgaatatgctcgtaggggcgctgaaccactccagcaaggggcaaggcccgcatcaaggccagcgagctacagcctgcatgcgaccacctccaatgaactcaacaatgcaacgatcaacgcatgctctaggcgtaatcatgtcatctgcctcaccaccagaagctgcagcaggtgctgcacactgcaccgctgagcatgaaccttt

SEQ ID NO: 96395 - DNA, 284 bp, Oryza sativa
  Clone ID: PAT_MRT4530_94495C.1
gacacgcgtacgattcttgttacaccatctacatcctcaaggccaagatccatgacagggagggcattcccacagaccagcagcgtctcatctgtgccggcaagcagctaagatgactgcaggacccttgctgactacaacatccataaggagtcaacgctctaccttgtcctacgatgaggggaggcatgcagacctacgagaagactctgaccggcaagaccatcaccctggaggcggagtactctgataccatcgacagtggcaaggccaagatccatgac

SEQ ID NO: 96396 - DNA, 386 bp, Oryza sativa
  Clone ID: PAT_MRT4530_94496C.1
taagagaaagagaagaaaaagaacaagatcaaggaagtctctcactattggggggtggggaacaagcagaggaggcgtttggtttatgaagccatatgatatcactcaaggatgagtactctgctttctacatgagcttgtctaacgactgtgaggaacattttgctggtaagctcttctctgtgtagggttagctcgttttcaaggccttcctgttttgtacctaagagagtgccatttgtctcttttgacatctttatgaatcacatctacatctttcttgttttactccttgtgtttttcatttgaccttttgtcttatttttctcttctttgttttctttttttttatggccctcttcactcttttatccttttcccttttt

SEQ ID NO: 96397 - DNA, 309 bp, Oryza sativa
  Clone ID: PAT_MRT4530_94497C.1
gtggacacgactcaagcttttctaaagagaaaatacaaacaaatccattcggcagactcttgccatatctctaactcaaaccgacataaatattctaattaatagatacaactgccttaaatgaactatatctctaaacggcaatgacggttatctcaatcgaggcccaaactgagcctaagtagagctgtatcggctacctgccatatcgactcaaccaaattccaactctttggtaagattctatctccttcgattccgctttgatatccaactccaattcgagtctatcttgccaaatttcactgt

SEQ ID NO: 96398 - DNA, 309 bp, Oryza sativa
  unsure (1)..(309): unsure at all n locations
  Clone ID: PAT_MRT4530_94498C.1
agagaatcacatccacacccatngcgaaanaggacagagagagaagggggagggactcgtcngcgcagggaggagggcagcnctgcgactaccactncngcggtgacgaagccattaccacngccatccttncnccgctccccgacgagccgtcgccacgtggacgaggcggcgcngcngcngcgaggaagacgcggacgaggcggcggggacacgcgagaggagacgtngccaagcccgccgtcgccgactgttcatgtcagcgcggctgngctgcttgagcccggatcttgctgcccggccgccgct

SEQ ID NO: 96399 - DNA, 1207 bp, Oryza sativa
  unsure (1)..(1207): unsure at all n locations
  Clone ID: PAT_MRT4530_94499C.1
gtgagctaagaaacaactagctagagtgagtgagtgagtgagtggttttcttgatgagccacaacccctatataacctcactccccctcacccctctcctcaaaccacccgacctcacacagttcacacaaccacaagcttcaaagctccctactacttctcctcctccttcttctccggcgccggcgacgatgacgctgacgatcccggacgacgtgcgggcgaaggcggaggtgtacgtcggcgacgaggccgggcaggagaagacgcggctgctgctggaggagacggggctccccagcggcctcctccctctccgcgacatcatcgagtgcggctacgtggaggagaccgggttcgtgtggctgaagcagcggcggaaggtggaccacttcttcgccaaggccggccgccacgtcagctacgccgccgaggtctccgccgtcgccgagaagggccgcctccgcaagatcaccggcgtcaaggccaaggagctcctcatctgggtcaccctccacgagatcgccgtcgacgacccccccaccggcaagctcacctgcaaggccatcggcggcctctcccgcagcttccccgtcgacgccttcgaggcccccccgccgccgcccaagaacccctcccccgccgccggcgacaccaccaaggtcgatgaggagaagaagaaggaggaggaggtcgccggcgacgccgccgccgccgccattgacgagatcgaggggaagatgaaggagatgaacagcaaggaggtgcaggtgcaggccgagggagtggcagccaagaactgaagaagatcgatcgatcgatatacacagatcatcatacatctcatcatcatcatcagcagcagaagcagcagcacgagatctcactatcatatggagattcagatgagctagtagctgagatgatgagttattattaattaatcgttttatttggttctgaataatctgcatctgcatgcatgcactgctttaaattaattattattaagttgttactacttcttttcttgctgctgttaaacagagagaaaatgatatatatatatggagagatcgacgacatgtattattattgctatcatcatctgatgagattataatatgagcaatggaaatattatttatttaaaaaaaaaaaaaaaaaaaaaaaaaaaaaaaaaaaaaaaaanaaaaaaaaaaaaaaa

SEQ ID NO: 96400 - DNA, 2969 bp, Oryza sativa
  Clone ID: PAT_MRT4530_9449C.1
atggcgccgccgccgccgccggtgcaggagcaggaggaggctgagcagcagcaggcccccggggagccgaagctgccgctgttcttggcgagaggcctcgggatcgaccgcatcgcttccggcctgttcaccgccggcggcggcggcgacggcgacggcggcaacggtggcgctgggaggatgagcgccgtggaggaggagcacgccgagaaggtggcggcgctcgacgcacagttgggcgggatcatgggcgagcagccgggcgacgcgctgttcctgcgcaactacgcgcagttcctgcacgaggtgaagggcgacgcgaggagggcggaggagtactactcgcgcgccatgctggcggatcccagcgacggcgagatcatgtcgcagtacgccaagctggtgtgggaggtgcaccgcgatctggacagatccctcacctacttccacaagtccgtgcaggccgcgccgcacaacagcaatgtcctcgccgcgtacgccagcttcctgtgggaacaggacgacgacgacaacgacgacctcggagaaggcgagcaggacgtggccgtggcggcgcagccggggcatgtgaggcagctggcttccgtggccgtttgatccgtgcgagacgggctgacaacgtgctaaatgcgctgtgctttctactactaaatgcgctggtgcttacaaaccgaagaataaataataccgcggttggaagttggatgtaactatatcatgaagttctctttttcctttcacgaatcaaaaccgatgaatgtattttgcatctaccccaaaatagtttgcttttgcctcgcggtggaatctcaatgtttcgccccgaaaaagaagagtatcgcccattactggttctaccgcgaggcaaaagaagagtctcgcccattcctggctataggacgccggagaatggcacggagatgggcgcatgcatcagtcgtcagcgcatggcttcatgcatcaaggcagctagcgagtgagacctgtgcgtgcgactaggcggtagatggacaccggccatgtgattgttcgccgcccagtgcacgagctcgtgccaagtggcactgctccacgcacaaattagaatgaagcagtgaaccaacatactatgttaagattctaagagataacatgagattttataagctaatgtaaaaggtttatcaagctatttgcaagcaggaatcgctcctgccgctgccggtgtgaaacaagacatggcagcaaaaggacaattcctaaaacatatcactgagactagaacttttcaatggtgttctcaacggacaccaattcagcgataacattatgaaatctttccaggtcgatgcagctgaggttttgttctgaccaaacgacggcaaaaaccagcaacaaaatggtaacagatgcccatccaaaaatgactaccacctaatattacgctttgttgtgacaaaaatatggccggaccgcaccatgtcgagatcaccaagggggtacaaccattcaccagcagagcaggtgagaaatttgactttagccatcgtactggcgtcaaacccttctttggtacccatttccctttgaccgagtagcataatccccatcataccgcccacccgattgacccctagagaagtcagcaggtcttcctctcccccgtcttgctccacctccccgatagatttgcctcctctcttcaacatgtattaagcggccattcagctctattggagatgccctcaaagcattatggataccagacatgtcttcgtactcaacaaagccaaagaaaattccagcctccttctcaagatcaaagactgaagtagatggagaaaggttcccgatataaactgacaaaaactcttcttcatcctcagggccgctagcatcataacgggtgtccaggttggctttttcatgcacaggctgcacctgcttagtcatatgtccattcagttgtgactccacactacttgccgtggccttgttgagaggaatggagtgaatagcctgatggctagggtgtccttttgttcgcagcactgaagcgtatgtttgtttggctggttctcccataggctcttcctcaggggtagttacagaaggatggacaatggggccaagaggtgcatcctgtttactgtcagtagaactggggaacgaaggagtaagctcttcagaaggagaatcatcgtcgatcacaaccccatattccaaaggatcttgctgctgaacttcatgattttcaggcataaaagcaggacccctttcctcaatatcagcaggagctaaagcttcctttgcctcaagttcttcaggcatacaatcagacgctaaagaatcaaccaacaataaaaagtaaacattatcactataatcacggttaccattggagaaattttctgtttcagtcatggtattatgagcatccatctggagaatgttgtcagtgtgactgtaatcagccccttcatagtaatcatattcatcacagataagcttaaagatgtcactgaatacataatatccattatcctgaggagcaagaagcatagtctgagcaaatctcttgcgaacagggtagtcctttaattgcactaggccagtaaccaacatctggagagccccaccccatgactgcacgaaattagctgtcttaacctcaatcttgtgtacattcatggatatgatcatgtcattgatttcctcaacagtctccccgaacgaggatttcatcgtctggcagtccagcctcacggcggtgctgtaatccgtgtagaattggcacgccagctccgggctgttcgcgagcacgttgtagtacccctgcaagaagtacgagcacacctcgaaggcgtaggggtggctggcgatctgctgctgcacgcggtccagctccctcatcccggtgggcatctccatgtggtaccgcccccccatgccgcgcgtccccctcgtgc

SEQ ID NO: 96401 - DNA, 589 bp, Oryza sativa
  Clone ID: PAT_MRT4530_944C.1
gacacccatataaaccagtgtgtgtgattagtaccgtaccggcagtctagtgagatcgggtaccacgagatatacttcttcttgtcgcgctgcttaccgttgatgcgcttagccgccgcctgccatggcctccgccgtcgcgagtaacttgcctgcagctgcgcccgcggctgtcatgccgttcggtggatggcatggtccgcgtgtctcgttcagccgcgacgccgccggggctgaggaggctgccgcggtggtcgtgtgttcttcgcccctggccgccgcggcggcggtggcgacgacgacgacgccggagccggcgatatccaaggacttcatcgacttcgagttcagcctcgggggctccgccaccatgctcccggcggacgagctctttgccgacgggaagctgctcccgcttcggaaggcggcggctgtgccggagatggatgcggcggcgccacggccgccgcagcctgaggcaatgccggcgccttcggagccgatgaagccactacgggcgggctaccgaccgaggttgacgccgccgacccgtacgttctctgtcctaaggcgcccagctgctcgagcc

SEQ ID NO: 96402 - DNA, 411 bp, Oryza sativa
  Clone ID: PAT_MRT4530_94500C.1
ggggggacgacggtccttgcccgtacgaatatcccggttgcaccgatctgcctgctctcctagatcctgtacactcttaatgaagacctccagcttttgcttgaactgctcaaccccaaactatgaccgcctcctcatactcgctcagcgaagctctacgcagaacgatcatgggggctagatctaccaactggcacaccgggtgagtgaggcactcctgtatacgtgtaccaatatcctctgagggcaagtgtaatcgtgccccgacctgtcgttgccgccttacacaccctgccttcctgtacctacgtgagaggcgcctctgataacccctttcagttagaagaattcgatccactggccccataagaatcccaccggaaatggaagcaggctgcggccaatgccggc

SEQ ID NO: 96403 - DNA, 719 bp, Oryza sativa
  unsure (1)..(719): unsure at all n locations
  Clone ID: PAT_MRT4530_94501C.1
ttgttgtattaaagctttttgaaatggggaaanccctccgcgttaaaaccgggggggggaagttaaacttcttnaacttgttccctaaagggttagccgaaaaatttcccnttggttcgccattaaaatttnnccgaaccttgccaccgaaattgtgtggttntacgaacttgcccccgcctgttctcccgaacattgggaaccccgggtggaaaatttgaaatttcctcccgttgaaannattgccgggaaattncccnaccgggggttagaacggggtnagaacccccntggcaccctttgaacttattaggctttccnccaagttgaacaacccnttgaattcnaaatgtttttntggataaaggtggggganagttgggttnaacaccnccnancnaacccaaatcccttgnaaaagaaacacctccctttccctcctaaagggatgccctaacccgcccnccacccnattcatttcccgggggggggggggggggacacctgcccaaaggtggggtttntttttatcctgggggggcgggattnccccccccnnananaaatttnccngaaaggttttttccnaaaaggtttnggcnncnannccttttnaaatcccngcncccntnaaaccntttnntnggttttnanncccnngcccnnnaanntnttnnaaaaacccnanntggggtcccaaancnnnaananncnaaaan

SEQ ID NO: 96404 - DNA, 432 bp, Oryza sativa
  Clone ID: PAT_MRT4530_94502C.1
atgacggctaatcatagcggcgtggaggaagaacaagatggggggaaaaccttctggagcgtggcagtgcatggcgacagttcaaacgacatcaacggtcgccctatcccctccttcacaaatgtggggtggccgccggcgagctgcagttccatcgacccgtcatcgtcgtcgcttctagatctcgcctttattagttgtggaggagggatcatggagtatacatgggtcggtgtggtacgcccctctcctctatgtgctcgtaccccctggccgtcgagccacttcctcgcaacagtggcggccttggcgacaggcaccccaatgcctccatgccgagagcttgggggtgaggccctgcaggctggttcacatgacagcggtgaagattcgtccatcgccagcgaccggagggccttaaggaggcaatag

SEQ ID NO: 96405 - DNA, 4350 bp, Oryza sativa
  Clone ID: PAT_MRT4530_94503C.1
atgaagctccccgatgatttggctgcggtcttcaccacaaggatgtcctctccccgtaggtctagatgggatccggcctcggctccgatccaatctagcttcagggaagtcggtgtcatacttcagcctctcgggacggtttcaacggaagaattggatggctacctcagctctcctggtgtcgactcacggccaacggagatcctcgactacgacgacttcggctacaactacgacttcagcaacctcgacgactttgacgaagcctatgaagacaattatacgcctctctttttcggtgttttcatggctgataacgagacagtggagcagcgtcaagcccattgctacgacgacgatgaagatggagttgcagctttcacaagtgacctgcgtcgagtggactggccggccggcttcaagccgactgggatcgtgaagtatgacggcaaaacaaatcctgagtcttggctcaccgtctacggtctcgcaattcgtgcagcaggaggagatagcaaggccatggcaaattacctgtcagtggctttagcggattctgctcgatcctggcttctcaggttaccctgtggtacgattggatcttgggcagagcttcgcgaacacttcatcgccaactttcaaggcaccttcgaaagtcctggcacccagtgcgacatctacaacgtgatccagatgcccggtgaatcccttcgagattatatccaacgcttttctgagcaacgcaataagatctctgacattaccgacgacgtcatcatagccgatttcactaagggtgttcgtcatgaactcttagtcggcaaattcggacgcaagcctccaggacattcaagcagatgtttgaaaaagccaatgaattgcttcatctatcagcagttcgcagagcaatacgccaagaaagcacggaagccgactgatggagaacaaagcacttcaaaaaagaaggatgacgaagatgacggaccgactggtttccaagactctcgcaaggaattcaaccatactttcggtggaccccaagcttacgagtccaagcggaagcaaaagctaattgaaagggagatcaatgccgtccagcccgatacgccccaatatcttcggtggtcagagacagcaatcaagtttgaccgctcggatcatcctgaccgagtggtccacccggggcggtaccccctggtactagacccagtggttcgcaacgtcaagctccgacgatccctcattgatggtggcagtgcactcaatattcttttcgccaagactctggacgatatacaaatccctcgtactgagctgaagccgagtagtgcgccctttcacggagtcatccccgggctgtcttctactccactcggccagatcactctgctggtcaccttcggcactcgggagaactttcgtacagagaatatatgcttcgaagttgctgatttcaagacgacttatcacgctatacttggacgcccggcgttagccaaattcatagcagtcccacactatacctacatgatgatgaagatgccaagaccccgaggagtcatatctttgcggagcaacatcaagcaagccgtcacctgcgacaaggaaagctgtgagatggcccagacgcatgagattacacttgttcgggatgagatccaactgactgcatcaactgcaaccgaaggagaagtgcctgcacccaagatatcaaagaccggagaaagcgacgccaagaccaagaaatttccccttgatccctctgatccttccaaaactgctattggtcgcaatgttgaagcttatgttgatgatgtagttgtcaagaccaagcagaaggatgatctgatcgccgatctagaagagacctttgctagcatccgtttcttcgggataaagttgaatcttgaaaagtgcaccttcggagtactgtcagggaagctgcttggctttatggtatcccgtaggggtttacaagccaacccggagaaaataaatgccatccttaacatgaaaccgccaagttctcagaaagattttcagaaaccgactggatgtatggcggcgctcagccggtttgtctcacgactcggcgagcgggggatgccctttttcaagcttttgaagaagaccgacaatttccagtggggacccgaggcccagcaagcctttgaagatttcaagaaacttctcacaactccgccggtcctagcatcaccacatccgcaagagacgttgttattatatgtgtcggcgacatctcaagttgtgagcacggtcatggtcgtcgagcgagaggaggatggccacgtccaaaaggttcaacgaccgatttacttcattagcgaggttttggccgactccacgacaagatatcctcatgtacaaaagttgttatatggtgttttaattaccgttaggaaattatcccattattttcaaagtcactcggtcacggtggtcatatcgtttccactcggagatatacttcataattgcgaggcaaatgggcggattgcaaaatgggctttggagttgatgtctctggatctatccttcaagccatgtacttccatcaagtcccaagctttagcgtatttcgttgccaagtggacggagtgtcaagaagacacgcctgcggagaagctcgagtattggactatgcactttgacaggtcgaagaggcctttaggcactggagtaggggtcgttctgatttccccgactggagaaagattaagttatgtactgtggatacacttctctgcatcacacaatgtggcgaagtatgaagcgcttcttcatggactaaggattgcattatctctagggatttggcgtctgatagttcgcggtgattcccagtttgttgtcaatcaagttatgaaagaatggtcatgtcttgatgataatatggctgcataccgacaagaagtacgtaagctggaagacaagttcgacggcctagagttaactcatgtgcttcggcacgacaacgaagcggccgacagactggccaactttggttctaagcgagaagcagctccttcagatgtttttgttgagcacctttatgagccgacagtaccaaggaaagatgtaatcgagatgacaagtacccaagaagtaagcatgattgacgccgactggagagagcccttcatcaaatttttgactaaacaaaagttacctcaagacaaatatgaagccgagcggatctctcgacacaataggctttatttcatgattgaggatgatttgtacaagagaagtccgtcaggaattttgcaatgttgtgtttctttggaagaaggaaggcaattgttacaagacatacattctggcatttgcgggaaccacgctgcagcacgaacgattgttggcaaagcttatcgacaagggtttttctggcctactgtggtatctgatgctgagaaagttgtgcgaacatgtgaaggttgtcagttctttgccagacagattcatctaccagctcaggagttgcaaactatccctccctcctggccttttgcggttttggggcttgatatggttggtcctttcaaaaaggtcaccggtggtttcactcatctttttgtagctgtggataagttctccaagtggattgaagctaaaccagtcgtcacaattacagctgacaaagctcgagatttcttcatcagcatcgttcaccgatttggagtacctaatcgtatcattacggataatggaacccaatttactggcgatgtgtttaaggatttttgtgaagactttggtatcaagatttgttatgcatccgtagcacatcctatgagcaatgggcaagttgaacgcgccaatggtatggtacttcaaggcatcaaagcacgagtttttgaccgactgtgtccctacgacggcaagtgggttgatcagttgccgtcagtactttggtctctgcgcactacacccagtcgggctacggggcaatcgccgttctttttagtctatggtgcggaagcaatgttgccaagtgagctagaatttgagtccctgcgctttcgcaatttcaaagaggagcgctacggagaagaccgagtggatgatctcaaccgactggaggaagctcgcgaggcagccttgatccagtcggcttggtatttacaagggttacgacgctaccacaatcgcaatgttcaatcacgcgcatttttagtcggagacatggtcttgaggaaaattcaatctacacgagatcggcataagttatcccctttatgggaaggactgttcaaaatctctgaagttactcggccaggttcttatcgactcaagcgtgaagatggttcagatgtcgacaattcttag

SEQ ID NO: 96406 - DNA, 1252 bp, Oryza sativa
  Clone ID: PAT_MRT4530_94504C.1
atgggggaaaaggtaccgccataccagagttacatattcaattcaccaaactgcgttctcgcaccatttcttcgactcgttaacttactcgacccgacgccgtcctttctttacctattgtcatctgcaccctcaagctttaccgcctgttcggactcgccttggggcccgtggcctacggatgtcatctctgaatgtttcggatcgctagcggtaggtcaacagaagacggcagcaccgtcggtagcccttgggtccagatctcgagctggtcttgtgaaggctcacctcgcgtgtactcatctgtagttgcgtactaaaggtacaagcgagtgggagatctgcccgcacgtcgtggtgaatattccccctctcgaggcggaagctagtagatggtttaggctggtgtgggctgaatttgcagttgttatatgcggactctgtcaggatattctggtatcagtttctcttgacgtttcctcgcttcctctgaacaatataataagggctcttatagttttcgttattgtttggtttctgaggctaggtctaaagtgctgccaggaatggggctccaggacaggcatgccgaggctgccgatggacggcagcatggcgcccagtggataccaccctgtacgtttatggcctgctgtgctttgcttgggatgggtttcttcggaaaccgtaaagtttggaaaattttcacaggaattggagcgcctcctcgggttcgccctgggctccgtctccatgggagggttcgtcctccaccagcggcgcgccatctaccgctccctcgccgacgccgacgctgccgctgccccgtcgcccttctcctcctaccagcctagtgaaaccagaagtagaacaagctcaactgaattggctcacgtatggaacaagggagtggatgagactctcggacgacttgttgcatacctcagctctcgtggatgcgaatattcgtgttggcaattcgtattaacaggctatgataatactactgctgatgtacaaggcatactagtatcagacagagggattgctatccaaagttgtggaaagccaccttctgttgggtatgagtaatgtggtagtctagtagttcacatgtttctcctcccttggagggagacgagctcaaatccaaagcttcttgttgttgagtgatgaccacgatatcgaatcgtacaccggtgtaaatattcagcgcggaatgctcactttttcaaaaaaaaaaaaaaaaaaa

SEQ ID NO: 96407 - DNA, 6033 bp, Oryza sativa
  Clone ID: PAT_MRT4530_94505C.1
atgggattcgtctccggcatcgacgatttcgtcttccctcccgggcaggcattccggttcggcagcctcgacttcatcaccaacaacttcggcaagatctctctccttgactcgaatttgaaccagtcaggaagagacaaggtctccgccccgttcggtctcccgaactcggccgagatctactccaagatcatctcatccgagttggcttcaaaccactcggacgagatctcatctactccaacacgacctcatcaagatgatggggcctatccttcaatcctgatgaagctcctcgatgatctggctgcggtcttcaccacaaggatgtcttctccccgtaggtctagacgggatccggcctcggccctgatccaatctagcttgagggaagtcggcgtcatacttcagcctctcgggacagtttcgacagaagaattcgatggctacctcagctctcctagtgtcgactcacggccaacggagatcctcgactacgacgacttcggctataactacgacttcagcaacctcgatgactttgacgaagcctacgaagacaactacacgcctctctttttcagcgttttcatgactgataacgagacagcggagcagcgtcaagcccgggaagcaaaagaacaacgcacacgacaggaagccgagcgtcgccgactagaagaggaacgacaagcacaagagcgagaccggctacagcgtgagcaacaggagcgcgaatgggctgcgaaggaggctgaggaccggcgacaacgcgccttggaggctgggcggtgagcacgcgaacttatcggacaacaagacgttgaggggacaacggtttttcgcaccctacatcagaacgcggtagcagcaatcaccattctagacactctacttcaggaggacgcgcccaaacacgtcgtcaacatcttaaaccaaacaaagaccatgatcgcctcctcggtcccacttaacttcgcaagcatccgtacgccgacaggcagccaagttccacctcttcaatctcaagattatcaccaaccaagcctcatcgtcaccgcctcagggtctaatcgtaggagcaaggatcatgttgaacgatctgttcactcacctgccgacagacacagagagcgccgagctgaacagcctcgctctccacgtcgcaggcatcccgtcgatcttcgcgagacaatcaaccggcattgcgcagaaagaggctatattccacatcgttcaccagaccgctatgatgacaatgtagatggagttgcagttttcacaagtgacctgcatcgagtggattggccggccgacttcaagccgattgggatcgagaagtatgacggcaaaacaaatcctgagtcttggctcaccgtctacggtctcgcaattcgcgcagcaggaggagatagcaatgccatggcaaatgatctgccggtagctttagcaaattctgctcgatcctggcttcacgggttaccccgtggtacgattggatcttgggcggagcttcgcgatcacttcatcaccaactttcagggcaccttcgaacgtcctggcacccacgagctctacaatgtgatcaagaagcccggtgaatcccttcgggattatatccgacgcttttctgagcaacgcaataagatctctgacattaccgacgatgtcatcattgccactttcactaagggtgttcgtcatgaactcttagtcggcaaattcggacgcaagcctcccaggacaatcaagaagatgtttgaaaaagccaatgagtacgccaaagccgatgatgctgtcaccgcatccaagcagtcgggcagtaattggaagcccaagaaagatgcaccagcgacaggggggagtggaagtaccaaccataaggaccgcacgcgtaagcccgaggaccttgtggcaactacatcaccttcttctcgatagcgatcgcgcatcaataccttcgacaagatcatgaattctcagtgctcgcatcacccgaattcaaatcatgcggccaaagattgcttcatctatcagcagtttgcagagcaatacgccaagaaggcacggaagccgactgatggagaacaaagcacttcaaaaaagaaggatgatgactatgacggatcgactggttttcaagactctcgcaaggaactcaaccatattttcggtggacccgaagcttacgagtccaagcggaagcaaaagttgactgaaagggagattaacgccgtccagcccgatacaccccaatatcttcggtggttagagacagcaatcaagtttgaccgctcggatcatcctgaccgagtggtccagccgggatggtaccccctggtactagactcggtggttcgcaacgtcaagctccgacgatccctcattgatggtggcagtgcacttaatattctttttgccaagactctggacgatatcagatccctcggactgagctgaagccgagtagtgcgccctttcacggagtcatccccgggctgtcttctactccactcggccagatcaccttgccggtcaccttcggcacttgggagagcttttgtacagaaaatatctgctttgaagttgctgatttcgagacagcgtatcacgctatacttggacgcccggcgttagccaaattcatggcagtcccacactatacttacatgatgatgaagatgccaggaccccgaggagtcatatctttgcaaagcgacatcaagcaagccgtcatctgcgataaggagagctgtgagatggcccaaacgcgcgagattacacttgctcgggatgagatccgactggctgcatcaaccgcaaccgaaggagaagtgcctgcacccaaggtatcaaagaccggagaaagcgacgccaagaccaagaaaattccccttgatccatctgatcctaccaagactgctgaaagcgcgctcatcacctttcttcaagctaataaagatatttttgcgtggaaaccatctaatattcctggtattcctagagaggtgattgagcactccttaaatgttaaagaagacactaaacccatcaagcaacgactccgccgtttcgcacaagacaggaaagatgcaatcaaggaggaattaaccaagctgttagcagcaggcttcatcaaggaagttttacatcccgactggctggcaaacccggttctggtttggaagaagacaggacaatggcgtgtgtgtgttgattacaccgacctcaacaaatcctgtcctaaagatccctttgggttacctcgcattgaccaggtagttgactcaacggccggctgcgagttactcagctttttggattgctactcgggttttcatcagatcagcttaaaggaatctgactgcttgaagacctaatttatcacaccttttggggattattgctacatcaccatgccctttggattaaagaacgctggagcaacctatcaacacatggtccagagatgtttttcaactcagattggtcgcaatgttgaagctcatgttgatgatgtagttgtcaagaccaagcagaaggatgatctgatcgccgatctagaagagacctttgctagcatccgtgcctttaggatgaatttgaatcctgaaaagtgcaccttcggagtaccgtcagggaagctgcttggctttatggtatcccgtaggggtatacaagccagcccggagaaaatcaatgacatccttaacatgaaaccgccaagttcccagaaagatgttcagaagtcgactgtatgtatggcggcactcagccggtttgtcccacgactcggtgagcgggggatgccctttttcaaactattgaagaagaccgacaatttccagtgaggacccaaggccccgcaagcctttgaagatttcaagaaacttctcacaactccaccggtcctagcatcaccacatccgcgagagccgttgttattatatgtgtcggcgacatctcaagttgtgagcacggtcctggtcgtcgagcgagaggaggatggccacattcaaaaggttcaacgaccgatttacctcattagcgaggttttgaccgactccaagacatgatatcctcaggtacaaaagttgttatatcgtcactcggtcacggtggtcacatcgtttccactcggagatatacttcataatcgtgaggcaaacgggcggattgcaaaatgggctctagagttgatgtctttagacctatccttcaagccacgtacttccatcaagtcccaagctttagcggatttcattgccgagtggaccgagtgtcaagaagacacgcctgcggagaagctggagaattggactatgcactttgacgggtcgaaaaagccttcaggcactggagcaggggtcgttctgatttccccgactggagaaagattaagatatgtactgtggatacacttctctgcatcacacaatgtggcggagtatgaagcgcttcttcatggacaaaggattgcagtatctctaaggattcggcgtctgatagttcacgatgattctcagttggttgtcaatcaagttatgaaagaatggtcctgtcttgatgataatatggctgcttaccagcaagaagtgcgtaagctggaagacaagtttgatggcctagagttaactcatgtgcttcggcacaacaacgaagcagccgatagactagccaactttggttctaagcgagaagaagctccttcagatgtttttgttgagcacctttatgagccaacagtaccgaggaaatatgtaaccgagacagcaagtacccaagaagtaagcatgattgacgccgactggtgagagcccctcatcaaatttctgactaaacaagagttacctcaagacaaagatgaagccgagcggatctctcaacgcagtaggctttatgttatgattgaggatgatttgtacaaaagaagtccgtcaggtttttcgtaacgttgtgtttctttggaagaaggaaggaaattgttacaagacatacattctggcatttgcgggaaccacgctgcagcacgaacgattgttggcaaagcttatcgacaagggtttctggcctactgcggtatctgatgctaagttctgcgaacatgtgaaggttgtcagttctttgccagacagtttcatctaccagctcaggagttgcaaactatccctctctcctagccttttgcagtttgggggcttgatatggttggccctttcaaaaaggccaccagtggtttcactcatttttttgtagctgtggataagttctccaagtggattgaagctaagctagtcatcacaattaccgctgacaaagctcgagattttttcatcagcatcattcatcgatttggagtacctaatcgtatcattatggataatggaacccaatttactagcggtgtgttcaaggatttttgtgaagacttcggtatcaagatttgttatgcatccgtagcgcatcttatgagcaatgggcaagttgaacgcgccaatggtatggtacttcaaggcatccaagcacgagtttttaaccgactgcgtccctacgccggcaagtgggttgatcagttgccgttagtactttggtctctgcgcactacacccagtcgggctacggggcaatcaccattcttgttagtttatggtgcggaagcaatgttgccaagtgaggtggaatttgagtccctgcgatttcgcaatttcaaagaggagtgctatggagaagatcgaatggatgatctcaaccgactggaggaagcccacgaggcaaccttgatccagtcagttcggtatttacaagggttacggcgctaccacaatcgcaatgttcgatcacgcatttttagtcggagacatggtcttgaggaaaattcaatctacatgagatctgcataagttatcccctttatgggaaggactgttcatattctctgaagttactcagccaggttcttatcgactcaagcacgaagatggttcagacgtcgacaattcttggaacaccgagcatcttcgtcgtttttatgct

SEQ ID NO: 96408 - DNA, 2685 bp, Oryza sativa
  Clone ID: PAT_MRT4530_94506C.1
atggcggccattgcgtgtagagagaggtcgacggtggcggctgcgtgcaaagccggcttcaagccgactggaatcaagaagtatgacggcaaaacaaatcctgagtcatggctcaccgtctatggtctcgcaattcgcgcagcaggaggagataacaaggccatgtcaaattacctagccgtggctttagcagattctgctcgatcctggcttcacgggttatctcgtggtacgattggatcttgggcagagcttcgcgaacacttcatcgccaattttcagggcaccttcgagcgtcctggcacccagtttgacctctacaataaggatgatgaagacgatggattgactggctttcaagactcttgcaaggaactcaaccatattttcggtggaacccaggcttacgagtccaagcggaagcaaaagctgactgaaagggagattaacgccgtacagcctgatacacccaaatatcttcagtgctcagagacaacaatcaagtttgaccgctcgaatcatcctgaccgagtggtccacctggggtggtaccccctggtactagacccagtggttcgcaatgttaagctccgacgatacatcattgatggtggcagtgcacttaatattcttttcgccaaaactctggacgacatgcagatccctcggactgagctgaagccgagtagtgcgccctttcacggagtcatccccgggctgtcttctactccactcggccagatcaccctgccagtcaccttcggcactcgggagaactttcgcacagagaatatttgcttcaaagttgctgattttgagatggcataccacgccatactcggacgcccggcgttagccaaattcatggcggtcccacactatacttacatgatgatcaagatgccagaaccccgaggagtcatatctttgcggagcggcatcaagcaagccgtcacctgtgacaaggaaagctttcggaagaagataggacaatggcgtatgtgtgttgattacaccgacctcaacaaatgttgtcctaaagatccctttgggttacctcgcattgaccagattggtcgcaatgttgaagcttatgttgatgatatagttgtcaagatgttttttcaactcagattgatcgccgatctagaagagacctttgctagcatccatgcctttaggatgaagctgaatcctgaaaagtacaccttcgaagtaccgtcagggaagctgcttggctttatgctattgaagaagaccgacaatttcctgtggggacccgaggcccagcgagcctttgaagacttcaagaaacttctcacaactccgtcggtcctagcatcaccacatccgcaggagccgctgttattgtatgtgtcggcgacatctcaagttgtgagtatggtcctggtcatggagcaagaggaagatggccacattcaaaaggttcaacgaccgatttacttcgttagtgaagttttggccgactccaagacaagatatcctcggttagttgtcaatcaagttatgaaagaatggtcatgtcttgatgataatatggctgcttaccgacaagaagtgcgtaagctggaagacaagtttgacagcctagagctaactcatgcgctccggcaagacaacgaagcggccgacagactagctaacttcggttctaagagagaagcagccccttcagatgtttttgttgagcacctttacgagccgacagtaccaaggaaagatgtgatcgagacagcgggcacccaagaagtaagcatgattgacgccgattggagagagcccatcatcaaatttttgactaaacaacagttacctcaagacaaagatgaagccaagcggatttctcgacgcagcaggctttatgttatgaataaggatgatttttacaagagaagtccgttaggaattttgcaacgttgtgtttctttggaagaaggaaggcaattgttacaagacatacattttggcatttgcgggaaccatgctgcagcacaaacaatcgttggcaaaacttatcgacaagggtttttctggcctactgcgattcatctaccagctcaggagttgcaaactatccctctttcctggccttttgtagtctgggggcttgatatggttggtcctttcaaaaaggccaccggtggtttcactcatctttttgtagctgtggataagttctccaagtggattgaagccaaaccagtcgtcacaattaccgctgacaaagctcgagatttcttcatcagcatcgttcatcgatttggagtacctaatcgtatcattacggataatggaacccaatttactggcggtgtgttcaaggattttttgaagacttcggagcgctacggagaagaccgagtggatgatctcaacggactggaggaagctcgcgaggcagccttgatccagtcagctcggtatttacaagggttacggcgctaccacaatcattatgttcgatcacgggcatttttagtcggagacatggtcttaaggaaaattcaatctacacgagatcggcataagttatcccctttatgggaaggaccattcataatctctgaagttacccggccaggttcttatcaaattaagcgtgaagatggttcagacgttgacaattcttggaacatcgagcatcttcgtcgtttttatgcttag

SEQ ID NO: 96409 - DNA, 4470 bp, Oryza sativa
  Clone ID: PAT_MRT4530_94507C.1
atggtttcgacagtagaattggatggctacctcagctctcctggtgtcgattcacgaccaacggagatcctcgactacgatgactttggctacaactacgacttcagcaacctcgatgactttgacgaagcctacgaagacaattacccgcctctccttttcggcgttttcatggctgataacgagacagcgaagcagcgtcaagcccgggaagcagaagaacaacattcgtggcatgaggcaagaaactttgtggtggaaattgttcccgctctcccttcaagagagaacaaagcaatggtaaactttaccgttggatgtgtaaacggtagttgggaaaagttgcgagacagattttgtcttgccttcttcctagttactcgtattactgcccttcgagtagaaatactcagttttaagcagatcaaaaacgaatcaatcggtgcagcctggtcgagattcactattttagtgcagtccggaccaaccttgtccttacccgagtatgtgttactgcaacatttccatacgggtttggataaggagtctacattctatctggacataaccgccggaggatcgttcatgcacaaaacgccgtcagaaggaagaacaattttggatcgcattctagaaaatacttcctgcatgatgcaatccgatgaaccccagctggaggcatccgtgtccaagatagaggaacctctgacaatcgagccactcttcgaaccatccacttctgctagctcgattgatgagaaggttcctgagcagccgtctgttgagaatgaagaaattcaaactccggagcgtgccgcaattctgttcagggatggtcttgacgaagactatgggaacaacgtcggtattctctatagtccaactgtcggggccaatctcgtctccgagtcttttgcattcgcttatttaagcgataaggcagtgaccccgacaaacaaatttttcaagcatccaaatggaaatatcaatgaaggatttgggattgtacaagatgtgcctgtctgctttgaagacagggatgcgatcttggatttccatgtctttgaaattcaacatttcgacatcctaatcgagctgcccattaagaaacttcttatcaacacaccccgattagatagcctcaaaataacgctgggagggaatgaattttcagttccattctcacgggcaaggatcgccttgaccgactctctcccagaaattgagccagccgacgaggttacaacagttccccctcatgagtctcccgaggcccttctggaagatgaggtccccgatttcatcaaggaggaagtggatcccggtgagactctcaacctgccaatcatggaaccaccacctcgacctccgcttgagctcaaacctctacctccaggcctacgctatgccttcttacacaatgacagagaagcccctgttatattcagtgacaagctctctgaagatgagactcaacgtcttctcaccgtgttggaaaagcatcgttctgttcttggctactcgcttcaagatctcaggggaattaatcccgcgctttgcacccatcgtattcctattgaccccgagagtattccctccagggaacatcaacgaaggctcaataatgcaatgcgagaggttgtaaagaaagaggtatcatcaaattcctatccatcaggaggaccaaagatgtccttcggactgtgcaatgcccctgtatcttttcaaaggtgtatgatgtctattttctcagacatgatcgaagacattagggaagtcttcatggatgacttctctgtctatggaaagaccttcgatcaacttcctcatcctgtgaacatcaaaggaatccgcagctttttgggacacgccggcttttatagaaggttcatcaaggacttctctacaatcgcccgacctccaactaacctgctggccaaggatgcgccctttgagttcgatgacgcgtgcctaaaatcctttgaaattctcaaaaaggcactcgtccctgctccaatcattcaacctcctgattggactctgcccttcgagatcatgtgtgatgcaagtgattttgctgttgatgcggtcttgggccaaaccaaggatacaaagcatcatgcaatatgttacgctagcaaaactctaaccggagctcagttgaattgtgcaactaccgaaaaagagctgctcgcagttgtttttgctatcgataagtttagatcttacttggtgggggctaagctgataatttatactgatcatgctgctttgaaatacctgctcactaagaaaaatgctaaaccgcgtctcttaagatggattttgctgctccaagaatttgacttagaaattaaggataaaaagggagtgcgcaactccaaccgatggtatgccaacatagtaaactacatggtatccaagtacataccaccaggagaaaatcaacaaaaattgaagtatgaaagtcgccgtcatatattggatgagccatacctatatcgggcctaccctgatggtttattacgaagatgtgtgccaactgaaggacttaagatcatagagcgatgccatgcctcaccctatagtggccattacggtgcattctgcacccaggccaagattcgcgcagcaggaggagatagaaaggccatggcgaattacctaccggtggctttagcggattctgctcgatcttggcttcatggagcttcgcgaacacttcattgccaactttcaaggcaccttccagcgtcctggcaggctggcacccaattcaacctctacaacgtgatccaaaaccccgatgaatcccttcgggactatatccgatgcttttctgagcaacgcaataagatctctgacattaccgacgacgtcatcatatctgctttcaataagggtgttcgtcatgaactcttggtcggcaaattcggacgcaagcctcccatgacagtcaagcagatgtttgaaaaagccaatgagtacgccaaagccgataatgctgtcaccgcatccaagcagtcagactctggcaaggaactcaaccatattttcggtggaccccaagcttacaagtccaagaagaagcaaaagctgactgaaagggagatcaaagccgtccagcctgatacaccccaatatcttcggtggtcagagacagcaatcaagttcgaccgctcggatcatccagaccgagtggtccacccggggcggtaccccctggtactagacctagtggttcacaacgtcaagctccggcgatccctcattgatggtggcagtgcacttaatattctttttgccaagactttggacgacatgaagatccctcggactgagctgaagccaagtagtgcgccctttcacggggtcatccccgggctgtcttctactccactcggccagatcaccttgccgatgccaggaccccgaggagtcatatctttgcggagcgacatcaagcaagctgtcacctacgacaaggaaagctgtgagatggcccagacgtgcgagattacacttcctcgggatgagatccgactggctacattaaccgccaccacaggagaagtgcctgcacccaaggaaagcgcgctcatctcctttcttcaagcaaataaagatatttttgcgtggaaaccatctgatatgcctggtattcctagagaggtgattgagaactccttaaatattaaagaagacgctaaacccatcaaacaacgactccgccatttcacacaagacaggaaagatgcaatcaaggaggaattaaccaagctgttagtagcaggcttcatcaaggaagttttacatcctgactggctggcaaacccggttctagttcggaagaagacaggacaatggcgtatgtgtgttgattataccgacctcaacaaatcttgtcttaaagatccctttgggttacctcgcattgaccagcttaaaggaatccgattgcttgaagacctcatttatcacaccttttggggcttattgctatatcaccattccctttggattaaagagtgctggagcaacctatcaacgcatgatccagagatgttttcaactcagattggtcgcaatgttgaagcttatgttgatgatgtagttgtcaagaccaagcagaaggataatctgatcgccgatctagaagagacctttgctagcatccgtgccttcaggatgaagttgaatcctcaaaagtgcaccttcggagtaccatcagggaagctgcttggctttatggtatcccgtaggggtatacaagccaacccggagaaaatcaatgccatccttaacatgaaactgccaagttcccagaaagatgttcagaagctgactagatgcatggcggcgctcagctggtttgtctcacgactcggcgagtgggggatgccctttttcaagctattgaagaagaccgacaatttccagtggggacccgaggcccagcaagccttttaa

SEQ ID NO: 96410 - DNA, 414 bp, Oryza sativa
  Clone ID: PAT_MRT4530_94508C.1
gacttcgcaaattacaatgcatttacccttcttgagaagtaccgtgcaaacaatcttgtcttcaatgatgatattcaggtagtaggttcagatctcacttttttactcttcgtattggtctcgttacagttcctaaatgaaagcgaactagtgaatgtgcatttatactgggtttcacaacaataggagtaaaccatgaaactgtggtgtaaacagggaacggctgctgtagtgcttgcaggcctcattgctgctcaaaaattttgtcagtgggactttagctgatcacacattcttattttttggcgcaggagaggtaagctgaccttccctttcagtgatatggagggtgcattctgcattggtcacatttactttagactggtgcaacatgtctgaactctgaacattcat

SEQ ID NO: 96411 - DNA, 1140 bp, Oryza sativa
  Clone ID: PAT_MRT4530_94509C.1
atgaaggaatgatcctgtcttgatgataatatggctgcttaccgacaagaagtccgtaagctggaagacaagttcgacggcctagagctaactcatgtgcttcggcacgacaacgaagcggctgacagactggctaactttggttctaagcgagaaacagctccttgagatatttttgttgagcacctttatgagccgacagtaccacggaaggatgtgatcaagatagcgggcacccaagaacaagagttacctcaagacaaagatggagccgagcggatctctcgacacagcaggctttatgtcatgattgaggatgatttgtacaagtggagtccgtcaggaattttgcaacgttgtgtttctttggaagatggaaggcaattgttacaagacatacattctggcatttgcgggaaccacgctacagcatgaacgattgttggccaagcttatcgacaagggtttttctggcctactgcggtatctgatgctgagaaagttgtgcggacatgtgaaggttgtcagttctttgccagacaaatttacctaccagctcaggagttgcaaaatatccctctctcctggccttttgcggtttgggggcttgatatggttggtcctttcaaaaaggccacaggtagtttcactcatctttttgtagctatggataagttctccaagtggattgaagctaaaccagtcgttacaattaccgctgacaaagctcgagatttcttcatcagcatcattcatcgatttggagtacctaatcgtttcattacggataatggaacccaatttactggtggtgtgtttaaggatttttgtgaagacttcggtatcaagatttgttatgcatccgtatcgcatcctatgagcaatgggcaagttgaacgcgccaatggtatggtacttcaaggcatcaaagcacaagtttttgaccaactacgtccctacaccggtaagtgagttgatcagttgccgtcagtactttggtctctgcgcactacacccagtcgggctacggggcaatcaccgtttttcttagtttatggtgcggaagcactgttgccaagtgaggtggaatttgagtccctgcgatttcgcaatttcaaagaggagcgctacggagaagac

SEQ ID NO: 96412 - DNA, 367 bp, Oryza sativa
  Clone ID: PAT_MRT4530_9450C.1
gaaattcgtcgtctacattgagaagatccaacgtgaaaatgccaatggcaccaatgtctacgttggcattcatccatcaaatgtttgattgtcaaattgaaattggacaaggatcgcaaagcgattttggatcgtcgtgccaagggacgcatggctgctttgggcaaggacaagggcaaatacaccgaagagacagccgctcaagcagtttaaaaacacaaacacaattacctacaagaaaataagaaataataaataattttctttaaaataaagaaaaaatgcgacaaaaaaaagtgaaaaagaattctttacattaaagagaaaaaatgttattacgaaaaaaaaccacaaaaaaaaaaaaaaa

SEQ ID NO: 96413 - DNA, 432 bp, Oryza sativa
  Clone ID: PAT_MRT4530_94510C.1
atggtggctgggaggagggtggcggcacgacggccgcgacagcccggcggagaggaggacctctccctcgacgtggacctctctggcgcgcggatcctcgacgagctgctggagatgccatggctgtcggcgccgggggaccagcacgcgctcataaagcagttgctttgctccgcctccccgaccctcgttgatgtcgagggagaggtcctcgcggagctactgaagggaagcgggggcgacggcggccacaaggatacctgcgccgtgtcgtcgtgtcgtcgccacaaggatatccctacctccacatccacagggctccaagttggtcgagtccaccgccgcggcacctggcagccccgcctccgcctccgcgcccaacgccgcggcgcccgcccacgcggggctgcttcgctggcggcggcgacgtag

SEQ ID NO: 96414 - DNA, 432 bp, Oryza sativa
  Clone ID: PAT_MRT4530_94511C.1
atgacaggtggggccggggaagggtgggcccacgtgtcggtgtcgttgggggcggtggtgtggcgggcgagtgttctggagaggaggcgtgcggcgatctggatccgtaccgtgaggggattccgcgttcttggtgtcgatgacaggtggggcccgctggaggtgggtttcggtttggcgtgtattggcggctacgaataccgcgtgttggagactgactgctacggtggtggtggtgggcccacgggtcagcgtgagtttgtgtttttgaggcccactgaaactgggccgaccatgggctggcccatcctgctccaacatcaagcattcaaaacccagcctttcttgcaggttgggccttcttgtcaggacttaaaagcattcatcaccttaggacatgttgaaagcatgttcacaggtggaatctggtag

SEQ ID NO: 96415 - DNA, 281 bp, Oryza sativa
  unsure (1)..(281): unsure at all n locations
  Clone ID: PAT_MRT4530_94512C.1
atgccgccgccgccgccgacgccgncgccatcgccaccggtgcgcgtggtgtcgacgcgcacggtgaagccatcgcggccacggccgcgggagcgcatcccgctcaccacctgggacgtgtccctcctcgccgccgactacatccagaagggcctnctcttncggcncaccgccgccactcttcacctcgtngaacatttcgccgncgcccttcgcgacgcgctccacgtgtactaccccgtcgccgggccgtttcgccccgacaagcacccccggcggcg

SEQ ID NO: 96416 - DNA, 317 bp, Oryza sativa
  Clone ID: PAT_MRT4530_94513C.1
caagagaataatttcacaaggtttttacgttaaccactcttaacaattccgactagcaatactaaattagttatgtatggtcaagcaataaaataatgataatatattttggatggatgaaactagattaattatactaattatgtaacatacatccaaaatctataatattgggttcatcatctgatttaaaaacggaggaggcagcaatataaaacctaaagagtccagcttgaaaaaaaaacaagaacggtaacgaaaaaaataccgaatcccttaccctaccaagtaaagcaaggaagccctgacaaaatgaa

SEQ ID NO: 96417 - DNA, 225 bp, Oryza sativa
  Clone ID: PAT_MRT4530_94514C.1
atggataccagggaaatccaacgtgcaatctgccgcgaggtttaccgggcggcgggcggcgagttgcttggcttgagcggccacttctccgctccgcttgctgctgtggcctgtggcatgtccgcgctgcttaacaacagtcagtcagcagaaggcagtgacgtgaagccgtcaactgggcaagagaaaaatcaccatctagatcatggcgtccaagcaaggtag

SEQ ID NO: 96418 - DNA, 384 bp, Oryza sativa
  Clone ID: PAT_MRT4530_94516C.1
ccggccggaatccctagagcagtgcgaaataagtgaataactatggcttccatgtctaccattctgcatatgagtcttggactccttctcttctgtccaagggtgcatggaacgaactctgatttggttgaacccctcttcagaggccacgtggattatacgctagcaccaagatactcctactacatgtcgattggatcacctcatcgcccgttgagcgcaacacacccagagagatctgaagctgaactccctgagtactacaactttgaggcaagaaatgaactcccatgtgtcgggagagagcgggaggcgcttactcatggtgagcaagggcttatctctaccacctggatgttaatgctcgccagattgtctgacgtc

SEQ ID NO: 96419 - DNA, 447 bp, Oryza sativa
  Clone ID: PAT_MRT4530_94517C.1
atggcggccaggctctcatttctcctgctcctcggcctcgtcctcccggcttccggcgatgacgccgcggcgcccgccaggctgccgcgggcggcgctcgtcgagctcctctccgtccacgtcgtgctcgactacatcgacgccgcgaagatcgccgcgctgccgcgggggaggcccaccgtgtcgacaaccctgttccagaccaccgggaacgtgtgccgccgcaccaggtttcttgccatcaccccgacggccaagggtggcgccgtcttcacctccgccgcgctctccgcgctggtgaacgccacgctcaagagggtggtcgccgcggtgccgtacaacatcttcgtgctccatatcagcaacttcgtcgtgccgccgagtgtactcacgaggccacggccggcgctcccaccgtcaccgccgctcccgagagataagggatag

SEQ ID NO: 96420 - DNA, 1326 bp, Oryza sativa
  unsure (1)..(1326): unsure at all n locations
  Clone ID: PAT_MRT4530_94518C.1
ttaaacttgatagcttcgaatggactcctcaaatctaagtgtcatttgttcaaactcagctattcctcccctgaaaaccaaagagtcaagaacaaatctttttgcctcgccaaactttcgctctttacataaactatcaatcagcattgcatcagtaaaattatttggaataacatccctattgatcatatctgtacgagtttgctgaaccctgtctaaatccccagctatgcagaacccatgaatcaaggtattgaaagccacaacatcatacttaatccccttattttctataaggcactttgccagccgaagtttcccagctcggcagaggctccgaattgcaatggtaaaactaaacttatctggtccaatgcccttcttcaacagatcaaccagcagcttcaagaccctggcaaaatcatcaacgtcacaaagcctactcatcagagtgttatagcaaaacacatcaacatcccagcccagctcttcactatgttccagcaagcacactgcttctgaaaacattgcatttcggcacaaacaatcgaagagaatatgcactgtctcagctgtcacggacagccctctgccgcgcatgatatctacttgacgaaatgcctcatccaagaaccccatcctgcacaagccagacatgtaaatattatatgtaacagcagttggcatccacccttgcgactcactttcacctaagatcatttccaccgtgctgaattccccaacacggcagagcccctcaatgagcacggtgtatgatactacatccggtgggcaaccgttctggatcatcgtatcgactaatctccctgcgtcgaagaaccttccctgctcgcagtaagcacgtagaatcgctgtgaaggagcgagcggtgggtcgcggtccgttctcgagcatgtggtcgaggaaccccagggcctcctgcaccagctggaagtcgcagagcatcgagatgacccagttgtagacggcggcatccggggagcagcccagggcctccatggcgcggaacacgctgtccacgaagtcgagcgcgtcgctcgacgacctgagcagcgcggtgaaggcggaggcggtgggcgggacgccggacttgaggagcgaggcgaaggcggcgcgcgcggcgaggggccgccctgaggcggcgagggaggagatgancgtggtgaaaagcggcgccgtgggggcgaaaggcatggagcggaaaaggcggaggaccctcccgtggccgccggcgcgggagtaagcggacatgaaggcgttgcacgccgccggggtggggggacgcacgccccccactctggcgga

SEQ ID NO: 96421 - DNA, 1230 bp, Oryza sativa
  Clone ID: PAT_MRT4530_94519C.1
atggccgaccacgccgtgcacgtcctctcgccgccgtgcgtctgcgccaccctcgtcggagccgcctccttctcctccctccgtgccgccgccgccgccgccgccgcgagcggcgatggtcatcgtggccgggagcggcagaaggaggaggcggccgcggcggcgtgctcgccgtgggaggacgcggtgatcgcggcggggatgatgggggtgcagctcgccggggcggcgtacatggtggtgctcgcgccggcgatggagcgggggctcgacccgctcttcctcgtcacgttcgggagcctggccaacgcggcgttcacgctcccgttctccgtcgcgctggagcggcgcctcctgtggccgccggcggagcagctgctcaccggccggctcctgctccgcttcgtgctcctcgcgctcggcggcgtcacggggttccaggcgctgatgctgcaggggatgaagcggacgtcccccgccatcgccgccgccatgcccaacctcaccccgggcttcatcttcgtcgtcgccgcgtccctcggcctcgagcgcgtccgcctccgctgctgctacacctgggccaagatcgtcggcaccgcgctctgcctcggcggcgccatcaccatgagcgtcatccagagcgccacggcgccgccgtactcgccgtcgccgtcgtcggggtgggcggcggggtgcttctgcctgctgggcgccgtggtggtggtgtcgtgcaccaccgtgctgcaggcggcgacgatggtggggttcccggcgccgatcacgctgtgcaccgtgacgtcgttcctgggggcggcgctgacggcggcgctgcagctggtggcgcgggggagcctggccggcaccggcgcgggggcgggggtcgtggggctccgcgccgtgctggcgctggtgctcgtcggcggcgtggtgagctcggcgtgcgtggcgttccaggcgtgggcgctgaagaagaagggccccgtggtggtgtccatgttcagccccacgcagaccgtcggctccgccgtcttctcggccatcttcctcggcagagtcgtcaagcctggaagtgtggtagggatgattctcctcttctcggggctgtatgtggtgctatgggcaaagaagaaagagaccaccatcatcaacagcgacgactcatccatggcagtggcgaccaaggatggcgacgacccagaaaagcagccactcttatctcgacgacactaa

SEQ ID NO: 96422 - DNA, 1064 bp, Oryza sativa
  Clone ID: PAT_MRT4530_9451C.1
agtcgtcgtcactatggattttttgacaagggatacttcaactactttggatctgggaagtcaaacccaaccagagtacgtgccccgacaagatcggaaccatcattgtcaacaatttggtctatcgagatcatccaagcctcaagatacgcggcgtactaaaagacgtcagatcgtataatgtacaatgagtacgcagtaaggaacaattgagcactcgagtaggttgtggtcaaacacacacaatatcgagaactttatcgataaatgcggagttgtcgcacccaacctaccaacgaagaccgacgacctatctcatagcaccggccatagctgggctattcgagaaaaggttgttaacggataattcctcgtgaacgttgtcggcttgatcacacgacacgatctatcgtaccttaacatcactcggtcgagagatgaggctactcctggttctcggaccagtaggctgtagctatctctcgcacctccacttcaaatggtcgagttaaggctacacctagttctcgaccagcggtgtagcgattctcccactatttccacttcaactggtcgagttaaggttacacctggttctcgaccagctgctgtaacgattctcccactatttctactttaagtggtcgagttacgactaccacctggttctcgaccagcggtgcagcgattctcctactacatccacttcaagtggtcgagttatgactacccctgatcctcgaccagtggtgtagcgattctcccactacctctactccagcaaagttgatatcaggtacacagtatcgccaagtgttttacccagagatcccttatcacgacaacacctagagttgaaaccaatcctactgtccctttacgccgccctggcaaggcctccgaggaacctaagggaacttcggctggggacgcccagagtggataaggccttgtcaggtaatgcagagacgaacgatcatgtaagatctggtcatgtaagagttctcaccatgcgtattaatcgaaaggggacacgcaacaatagatcaacatacaagccaaca

SEQ ID NO: 96423 - DNA, 1971 bp, Oryza sativa
  Clone ID: PAT_MRT4530_94520C.1
tcattcactttgacgtgttggtgtaggatgaatcagtcgacgagagcgacgtttagcttcttgagagggacgcttcccacctgcttctgcttgcacctttgcttcagcgatgatggtgcgtgctgcatcaagttgtgccccatcggcagccaactcaattaccgtgttaacacctgcagtcccgacatccaaaatcatcgagtcttgtgatgtggttacctctgtcacctcctgattcaccattggagcagcgtccattgtgccagttgacgaggacggcaagacctgagttgcatcgaccgacaaagttggagcatcggcagccaccaagcccaccttgtccgactcgatctcctgggctgcgtcgtccatgacaacaggagcagccaatgacacagttacagccccttctagtgttgatgctcccgtcgaagcctccgagagagatgcacaacctgccggtgccatctctcccgcatccgtcaatgtcgttgtaaattcttcctctgagatggcagccacactatccggtacagccaaagacaaagcagccacctcttcatttgccaaggtcacgttctgtccggtagttgggatctgcattgagctctcttctggagccttgttcatcaccgtttccaagctagaagccacgcaaattgttggcaaaacctcctcagcttgctgctctactgcagaatcatcaacaacagtgagcaaccctgcgatcgctgaaacacaatgtgaattaagctgagagtctgtaactgagcctcctcttaatgacattgaggatgacgcagcttcattttttagtcgctttggattccgatcttccataatgacatcatcatcgttcctcttttgttcactgtcatcacgctgatcatcttcgtctaacttttcctttcctttcgattcctcctcgggcatttctggttcaaagaaaatctcatacccatggttacggaacacaatgtacacactgggcggcaaagttgctaaatcatccaccgcaacctgcattcttacgaccccgtgtttccgaagataaaccatatccaccatcgttgtatttccaatgacagaaccgacagcatgaaggctaagaaagtccctaatttcatatggaacaccatagacacgaaaccatgtcttcttcaggacaaactttgcctcaatctcctgttcccatttgttaaataacaaatcaacaccaaaatcaaagctacggactctgccaaccctatgcaatctatctaattcaattgtagagggaaactgaacaacaaatgtatcctgtgccgtctcctttacttcaaatctgacgggaaccaaccggcgcagctcagtggtgagattatcaattgaaatgtgaccattctctacgcgaactgttgcagtcttactaaactcccttggtcttcctgataccttagctggtgtaggaatcatgaagaagccaccaccctcttcaccggccggcgacgacggcgatggaggggaggtcgcgctggaggtgaggtcgcgtcgcggaaaagtctggatgggggcgggagaggcggctgttgcaaaatggcgtgaggagagaaacactccatttttgcttcttctctctcctaatttggcgcatccgccccttttggagggcctgttagcgtatctgctcgagctgatttttccccttctatacggcaaatgaaggacggatgaccggttagaggaactgctggggatgctcttaggtgccaaatgacctgggtcttcacatatgtcacaaataactgcattacaatcagtaacacggaaaaaaattctctgcggcagtgccgcacgccacaacccgtgcgacaccccgcagaatagcgacgcgtgtttaatctcctgctgcaggccgagccctctttggttggtgtcgagccgagtccatttcttccgctgcttattggagtcaagctgtccagggcacat

SEQ ID NO: 96424 - DNA, 346 bp, Oryza sativa
  Clone ID: PAT_MRT4530_94521C.1
cgtgccacacctgtgaccacccacgttacccacgatgatgccacgagccactgccacaccacaggttatttgtgcctggaatctcgggcacgccacgccacgatgatgatgaaccactgggcgatgccacgatgcccacatacacactgtggccacaccactggccccctgtcaacttccacactctctttcttgtggttgttgttgatccaaccgcttggttaccactgtacttctagtaataaggtgttgccactactatcgtgtgcccaaccacctagaaataagaaccccttgaataaatatccatccatttcagacttcccaaaaaaaaaaaaaaaaaaaa

SEQ ID NO: 96425 - DNA, 287 bp, Oryza sativa
  Clone ID: PAT_MRT4530_94522C.1
attcattctttagtataatctcgggtgattttttttattgggaaaacgccactgttccaccacagttgacttccattgctcacactacaaataaaaatcccttcattccttacacggcgagagccctccctcccaattttttacccacacaaagtgcaaacctgccagaaaaactaaccaaccaagcctaacccacgaccactttcagaccttacacggcttcacctcacccttaaatcgctctacccctctcccatcggacttataataaaccttgccggaagcct

SEQ ID NO: 96426 - DNA, 1119 bp, Oryza sativa
  Clone ID: PAT_MRT4530_94523C.1
ggctgctctctcctcgcgtataagaacaggtgcgctgctgggccgggcgtttgcaattttgcaaagcgagaattccacacaggttacaccagtatatacgcatcttgctaaaccgactactgatcgagatcgctatggcggaggaggcggctagcaaggcagcgccgaccgatgcgctgtcgtccgtggcggcggaggcgccggtgacgagagaacggccggtccgagcggacttggaagtgcagattccgaagccctatttggcccgagctctggttgctccggacgtgtaccatcctgaaggaaccgaggggcgtgaccaccggcagatgagtgtgctgcagcagcatgtggctttcttcgacctggatggcgacggtatcgtttatccatgggaaacttatggaggactacgggaattgggcttcaacgtgattgtttcgttctttttggcgatagccataaacgttggtctaagctacccaactctgccaagctggataccatctctcctgttccctatacacataaaaaacatccacagggctaagcacggcagcgatagctcgacgtacgacaacgagggaaggtttatgccggtcaatttcgagagcatcttcagcaagaacgcccgcacggcgccggacaagctcacgttcggcgatatctggcggatgaccgaaggccaaagggtggcgctcgacttgcttgggaggatcgcgagtaagggggagtggatattgctctacgtgcttgcgaaagatgaggaaggattcctcaggaaggaggctgttcgccgctgcttcgatgggagcctattcgagtcgattgcccagcagagaagggaggcacatgagaagcagaagtagcctcctaatttcatcgtcccgggacctgggatgtgcttgattgcttgtgtgtgttgttgtgtggactatagctatagccacatcatgtttgtccatctgaaaaaacaatggaaataaggtttaccggttggaacatacattatgtactatccatgtgattattgaaatgtgtctgtaacctgaaagtgtgattgacatataaaattctgtgattgaagtaaaggtaagcattactaaaaaaaaaaaaaaa

SEQ ID NO: 96427 - DNA, 192 bp, Oryza sativa
  Clone ID: PAT_MRT4530_94524C.1
atggcggctggtcctgcaccaaatcaggttgccatgcctattccggcagccacaaatccatgcccggtgctagaaatcagcacgcccgctgctcctagccagattgctgcaccaagcctagccattatactcgttccagctgccacaagcgcaaccaggccagctgctgcatcaagccctacaaagcattaa

SEQ ID NO: 96428 - DNA, 591 bp, Oryza sativa
  unsure (1)..(591): unsure at all n locations
  Clone ID: PAT_MRT4530_94525C.1
tttttttttttttttcaagnnctcaaagaatgggcacaagatagctcaggacaatgttttccatctatcagtcatcctttttgtacagtttccaagattacattcacaacagcaaatgccactaaaagactatctcaaaaatggctcacacataaggtgttgaagccatggaacctccaccccctctccctttttctcatcaaaaagaccatcgcccttaaaacaacccatttttttaaaaaagaaaagcgcatgcggacgaacatcacttcatggctggccataaactcattcaaagaaagctttcacttcatttgatagtgaaacgtatgatggactagtttcccacacacatttgccaacctatcatttggctcccaaaattagtgcagttcacaaatttctgtgcagacaggaaacgttagaagcatccgccccagtcatgcttgacctccttatgtatccaaaaatggtctataagatgtcaatctatttagccctcatcaacatcaatcgttggttcatctgcacactcaccttcctcatcctcttcatcatcatttttcacccacgcgtccgcggacgcgtggg

SEQ ID NO: 96429 - DNA, 203 bp, Oryza sativa
  Clone ID: PAT_MRT4530_94526C.1
aagaaagaaattaatatttgtatattcgtataaaaatttgggagggagtactaatttactactgtgctgtttgtacgcaattattagaggtactcacttacatattccatagagtatactatgttatatgattgagcatcacttacatagatgccggattgtgtcacgcgcacttgcctcgaggcatagcgcgctcccggagt

SEQ ID NO: 96430 - DNA, 447 bp, Oryza sativa
  unsure (1)..(447): unsure at all n locations
  Clone ID: PAT_MRT4530_94527C.1
tttttttttttttttcgctgtaactatcgtgtgtttctccagttctgtttcatttccaattttgttttcttttggctgttgtcactgggtgcaagaccgtcaatttgtaaacatttggttcactgatcgcctgaactctttttctcagataatttctgggggcgtgcagcttatcagctttacaatttgcaccgcgctgggccgttggcgccgcatcgaacatgcaatcgcccattttacattcctacctaggttttcgtcagaatgccaaggtcgagcccagaattccttacagggtaatcgtcgatgacaaaatccgccggggataactaacctggaccattttgggctccgcgaaccgccgtgcgcgtgggctgaacagaacgccgccgggccggggggactcgacgtcgcaagtcggtgcaaggagaggaagnatgggagaaa

SEQ ID NO: 96431 - DNA, 292 bp, Oryza sativa
  Clone ID: PAT_MRT4530_94528C.1
aagagggttgttgacgtcatcaaaggggaggggcggcgccggcaagcgggccccaccggtcagcggcacaagggcgtcggtccaccgtggaccgggaccaccgaggcggcccaccgccggtccacgggaaccgacggccggatcggcccaaagccgatcgaacggccacgaggcggcgcggctggggcacggtgtcacaccctaatcttcttttggctttgggccgaaagtcggcccaaaaccgctctctctctcctcggcccaagtcggcccagtccgccgcgcgcgcgcg

SEQ ID NO: 96432 - DNA, 280 bp, Oryza sativa
  Clone ID: PAT_MRT4530_94529C.1
tggatcccgggctgcaggaattcggcacgaggaaaaaatcgacaaaccacgtagtattacgcatgttcgcacactactccgtcggcctctcgaggccagcttagcttttctgctcccagctgacagctacgttgcaagcccagcaccggaaagctacaccgtgcgtttcatataagcagggcccagtcgagcgagctcgaccggcaatagcaatagcgccaagacatacagagaagccacagacgtcggaggcagctagcgcgcgggggaggacaggaca

SEQ ID NO: 96433 - DNA, 773 bp, Oryza sativa
  Clone ID: PAT_MRT4530_9452C.1
ccggccgggctaatccccaaatccagccgccagcccatcggggcgccgctgtactagagccgccgccgccgaccgctgcaccggagccttcccccacaaccccgtcgacgacgaccgctgcaccagtccttcccccactacctcgtcgacgatggccgccgcaacgaaaccttctgctgcaaccccgtcaatgacgaccactgcaccagatccttcccccgcgaccccgtcgacgacggccgccgcaccggagccggtaccccgtcgacgactaccgccgcactgaagcctttccccttacaacattgtcgacgcctcccgccacaccggagccgggtaccccatcgacaaggaccctgcaccgtcgccgtgcctagccgatgggaagacgtcgacgtccagtagcacgaggggttctgggagctagatgatggacatctgcaatgcaatatccctttcagtgctcaattaatggtgcagaagaaaactgtcttggttcttcctgctgttcatgactatgcaacaatctctcatgagatttctgtgtacacaggtaccctcgacaaactagacgaaagacgttgcgacgaagaagaaacctacccccaagatgccatcaagagtaaggatatcaaagagagtgagggcaggtgctccaacccgaatgcctcctggaatctcaacaagcaaatcttgcaaatgaagcactggcaaagactcaaaaggagttagcagagttcaagcagcagcaggaagagaccatttccctttcg

SEQ ID NO: 96434 - DNA, 1418 bp, Oryza sativa
  Clone ID: PAT_MRT4530_94530C.1
atggctctcgtcggctgcagcaacggcgaggcggcggcgccggcggcgacgtggacgccgccgtactgcaccgtcgtggcggccgacatgtccgacttctgctacctctcctgcccgcgctgcgagcgggcgctcccggaccacgccgacgcatgcgccgcctgcaccggccgcggcggcggcggaggcccggtgcccgcgcgcgtctaccgcctgcgcgcctccgtggccacccacgaccgcgtcgtgcccgtcgtgctattcgaccgcgcggcgcgcgtgctggtcggctgccccgccgacgagctcgcgcgcttcttcgcggcgcacgcgggggccgcgcgcgccgcggaggaggccctggagggggaggtgtgccgcgtggcgatgcgcgcgttcgcgaagggagccgccgagcggttccgcgccgtctccgtcgtgcctctccgcgacgggttccgccccctcatcgacaccctgagggagctgtactgcacggctgatcccacaccggcgacgtcgccacctcctcgcttggagaccacagtttgcttctatctatatgtaatggtcaagcgcaagaaagttgttacagacttgagcagacgtaagataagaactgagtcaattgacttagctcagttggtcgaagctacaatggatttttcgaagtggacaattacactggattttgatgtgactgaagagagattgaggaatgaattctcaagcaactctgaagtacctgcaattgcactgattgcagacttcacctgttttcatctccacaagtttaaggcctcaaggataagtgtaggttgcagaatcaatcttccaattctgaacagccaactgaacaccagttgcgtccggggctgtttggagttaagggcagcacaaagatgcaagagacacgaagctgatcagtcacattcagatgctccaaggacgttatgcacagtacaacaccctctgatcaatcgtagtatccagcaccggcgcttatgtggagctctgaatctaatgattgatccacctgtgctgcttgtgactatgaagacgatgtgccaacgagaaactatgcaaaactgcatatccatgcttgatcagttcagttcagcgttcaagaatgtgcatgtcttaaccatttcctgcatgtgtatagtatggtttttactgtactactggcagagatcatatcctgtggaagtttaccatgatactagttcggcaattaactgaagatgtggaccactgtcccctattaaaggaaaagctcatcatttaggcctaatccattggttgggcagctactcaactgttcttcccttcagtttgtcaatgaaacgtgtgtcggtatgtcatatgattgggaagatgaattatatatgtgtgaattaatagaaccccctcaccac

SEQ ID NO: 96435 - DNA, 310 bp, Oryza sativa
  Clone ID: PAT_MRT4530_94531C.1
ggaattcggcacgagaagaaagtgacatcgatgcattccctactgtgtaggtagtattatattcgctcccgagaggaacctctcttaacttatatagtaatttagtcctattcctgaacttattctgcaagtgtagaagtaacatgcacattctttatcttgaaatttctcaaaactttgctgtgcctgattatatacttgtgtgtttagtatgactgctggcattattgactgtgggaccatgctttgggatcgagtgtacatagagatccattagtccatcaattttacatgcatgattattatggca

SEQ ID NO: 96436 - DNA, 3257 bp, Oryza sativa
  Clone ID: PAT_MRT4530_94532C.1
ggctgtgagtgagagcaggagactgggattgggaccctcctgtcttcttctttccccttcctcctgctcttcttcttcttcttcttcttggaatactcctacaattacaaggacttgttccaaggagggagcatatggattgattcaccagcccgcacccgcggctgtgctaatcaatccatcatcaatacagatgccgtctgcttccgccgccgccgccgctcttgtgctcctcttcctcgccttctcgctctccaatgctcagcctggtttcatcagcttggattgtgggggagacgatgattacacggatggcattgggatccagtggacttctgatgccaagtttgtctctgctggccaggaagcgaacctcttgctccaaaatcaacaattgcagcaatataccaccgttcgctcttttccagcagacaacaggaagtattgctacaccatgaatgtcaggaacagaacacgctaccttgttagagccaccttcctctatggcaacttcgacaacagcaatgtctacccaaagtttgatctctcccttggaccgaccccatggaccaccgttgtcattgatgatgccaccaccccagtcgtccaggaggcgattatcctcgctgctgctccaacactcagcgtttgcctctctaatgccagcactggacagccctttatttctactctcgagcttcgccaatttaacggctccctctactacaccactgatgaaaaacagttctttcttagactctctgcgaggatcaattttggtgctgaaagcaatgcatcagtcaggtatcctgatgatccatttgatagaatatgggagtctgatttagtgaggcgagcaaattaccttgtcgatgttgctccggggacggagagaatatcaactacaaaacccatcttcgtcagtaccaacgaagaaccacctcaaagggtcatgcaaactgcagttgttggcaaaaatggatccttgacctaccggattgatttggaagatttcccaggaaatgcatggggagtctcatattttgcagaaattgaagatttggccccaaatcaaactaggaaatttaagttagtcattccaggcaagccaggattcagtaaaccaactgttgatgtggaagagaatgctcagggaaagtatcgtctatatgaaccaggctacacaaatattccacttccatttgttttctcttttggattcaagaagactaatgattcgtcagagggacctatattgaatgccatggagatctacaaatatatagagatttctgtgggatctcaagatgcaaacattatggccagcttggtctcacggtatccagaagcaggttgggcacaagagggtggtgacccttgcttaccagcatcatggtcttgggtgcaatgcagttctgaggcagcacctaggatattttcaatctcattgtcagggaagaacattacagggagtatccctgtggaattaacgaagctatcggggctggtcgaactaaagcttgatggtaactcatttactggtcaaattcctgatttcactggatgccatgatttacaatatattcaccttgaggacaaccaattaaccggtgcattgccaccttccttgggagaactacctaacctgaaagagttgtatattcagaacaataagctgtctggagaggtcccacaagcgcttttcaaaaagagcattattttcaacttctcaggaaacagtgaccttcgcatgggacacagtaacactggccgcactatagtaattattgtatgtgctgtggttggggccattttgattcttgttgctgctattgtttgttacctgttcacatgcaaaaggaagaagaaatcatcggacgaaaccgttgttattgcggcaccagcaaaaaagctaggctcatttttcagtgaagtggccacggaatcggcacacagatttgcattgtctgaaattgaagatgctactgacaaatttgacagaagaattggttcgggagggtttggcatagtatactatggaaagcttacagatgggagagaaatcgcagtcaaacttctcacaaatgactcctatcaaggcatccgagaattcctgaatgaggtaacattgctttcaagaattcatcatagaaacctggtgagcttccttggttacagccagcaagatggtaaaaatatacttgtgtatgaattcatgcataacgggacgttaaaagagcacctccgtggaggccctgatgatgtaaaaataaatagctgggtcaagcgtcttgagatagcagaagatgctgcaaaaggaatagagtatctccacacaggatgctccccaactatcatccacagagacctcaagagcagtaacattctccttgacaagaacatgagagcaaaagttgcagactttggcttgtcaaaacctgttgtcgacgggtctcatgtatcaagtatagttagaggaacagttggatatctggacccagagtactatatctcgcagcagctaacagagaagagtgatatgtacagttttggtgtcattttacttgagctaatctcaggccatgaaccaatctcaaatgacaactttgggctccactgccgtaacattgttgaatgggctagatcgcacatggagagtggggatatccacggcatcattgatcagtcgttagacgcagggtacgacctgcagtcggtgtggaagattgcggaggtggcgacgatgtgcgtgaagcccaagggggtgctgaggccgtccatctcggaggtgctcaaggagattcaggacgccattgccatcgagctgcaacgggagctgccctccagcattcaccacctcatgtccaagacgtctccctccgaagccgtcaacacgacaggcagtctgcaagacctggagcagaatgcgtcgtttgatgagctgctcatgcgcccaggtctcaggtagaggtagcacatacggattacagactcttctaatactatatttctaatattcgttgataggttaagcaagctgtgcatgacttgtttagatttgccaccgagcaacgaattttgggtgaatttgtccttgagcttcttcaggtcgtcgtgcacttttgaaatgatcatgtgcattcattctcgttcattcttacaaaaaaaaaaaaaaaaaaaaaaaaaaaagaattcttgtatcaaaagcggcccctgcagcccggggatccactgggtctagttctctctctctctcc

SEQ ID NO: 96437 - DNA, 389 bp, Oryza sativa
  Clone ID: PAT_MRT4530_94533C.1
tttttgccccctctctgctcctggttagtattacccagtgaaattattagcagggttttaaatcttctgttatagctgctatctttcgctgttgctgtttgagaagtgttttaatttatttattctcatatacaatttagctgctaaaaaaaaaaaaaaaaaaaaaaaaaaaaaaaaaaaaaaaaaaaaaaaaaaaaaaaaaaaaaaaaaaaaaaaaaaaaaaaaaaaaaaaaaaaaaaaaaaaaaaaaaaaaaaaaaaaaagggggggccccttttaggggacccaattttacttccccgggcttgcaacgtaaaattttttttttggggcccccaaatttaaatcccctgcccgcgttttaaaaaccggggcacttggaaaaccctt

SEQ ID NO: 96438 - DNA, 2019 bp, Oryza sativa
  Clone ID: PAT_MRT4530_94534C.1
atggcgattcctggagcatatgctcatgccgtgcaagctttagctactggtatcttatttgtggttgtgagtcttgtactggatcatgttgaaggaaggcatcacaagtgtccttctttctcttgcggccatcttaagggtgtatcggctccattccgtcgggcagctgatccacctgggtgcggcagcaaatcttacgagctggtctgcagtgataccaatgctacaattctcattgacaatgcaacataccatgtgaatgaaatcaactacgactacagacgcttttgggtcgtcgacgccaacatagccggtagcacttgccctcttccgcagtggaatcatcttcttgatcagtacaagcgcaaagtctcaggccacaggattgagatcgagttggctcctggtgcatataatcatgcttactttgttagatgctcacgggaggtgaaggacaatggtatatacaggcctgtcacttgcgcaagctccaactattcttttatctatgtgttattatcaagtgattcagacaaccctggttacatcgaaagcctggagccttcttgtggatacctggccatgactcttctgggtgattggagcacgacagtgcctaggaatgcgagctatgaagatgtcaaaaagttcatgagggaaggattcgccattagatttccgcgcatatatggggccgggagtatcaacgagtgcctaatggattcgataagcgaattgcgcaatggaatagaaccaaggtctagtacaggcactgccatcagtgatcggcttattgtcatctctattattgacctccatttctggttctgcttgattggatatccatcaggcatcctaatagcatttggcatgtggattgtcaagtgcatagctgtgctatgcaggttcgtgttggtgccgctagcgatattgaccttccttgcccacaagtattggaaaacaaggttagcaattgatgcagttgagaagttcctacagatgcagcaggttctgggtccgacgaggtacgcgtacacagatctcactgcagttacaagccatttcagagataagctagggcaaggaggctatggatctgtatataaaggtgtgctactctccggggatgtccatgttgccgtgaagatgttgaatggcgcctccacctacgatggggaagagttcatcagtgaggtatctacaattggtaggatccaccatgttaacgttgtgcgtctagtggggttctgctccgaagaattgagaagggcccttgtttacgaatacatgcctcaaggatctctagataagtacatcttttcatccgagagaagtttctcgtgggacaagcttaatgagattgctataggcattgctagggggatcaactacctgcaccaagggtgtgatatgcagattttgcactttgacattaagccgcacaacatccttcttgatgataactttgttccaaaggtcgcagattttggcctcgctaaattgtacccgaggaacaaaagttttgtatcagacagggcattacgaggaacagtgggttatatagctccagagatggtgtcgcgaagctttggcgtcatatctagcaagtgtgatgtttatagctttggaatgctgctacttgagatggctggaggaagaagaaacgctgatccaaatacaaatccaaatgcaagtcagtcatactacccatcatgggtgtatgggcagctaacaggtgaacaagttggtgagacatcaggtgctgctgacatgcatgagctgcagaagaagctgtgccttgttggattatggtgtattcagatgaaatcacacgatcggccgacaatgagcgagaccatagagatgctcgaaggggatgtcaatgcgctgcaagtgcctcctaggccattcttttgtgatggggattttatgcctaatgtgatggattcataccttcattcctcagagctgactgccatctcggaggacgatggcgcaattgaattcgctagtaactag

SEQ ID NO: 96439 - DNA, 882 bp, Oryza sativa
  Clone ID: PAT_MRT4530_94535C.1
atgtctccgcaccacagcggccgtctcgcgccgccgcgccgcaaccgggagaacccgtccttctccgccgcgctgctcgacgccatctaccactccctcgacgccgatggcagcttgccggcgtcccccgccgacgccgaggggtcaccgccgccgccgccgatgccggagtcaacaggagacgtcgcggagaagaagaggggcagaaggaagaacaagaatggtgccaagtcggcgccattcgcgtgccttctgaatgctctgctttgcaacaggaggtcagccaggtcggccgagccgacgacgccgcgggctctggcggtggcgccggcggcagtggcagtcaccgccgctgagccggcgtccgcgaggtcgatcctgtcgtcgcgcgcttcccggcgacagcccgcggcgacgggtgggatcctgactccggcgaggcgggcagtgcggttctcgccggtggcggtcgtggtggacgacggcgagcacgggtgccgggacgccggggtggcgaggctgcgcggcgcggagagggaggtggccgcggcgcaggagtcggcggcggaggcggagaggagggtggaagagctgctgcgcgcgctcggcgtggcggaggagagcgagagggccaaggagagcagcgagtccagctccgacctgttcgagctcgagagcttgccggcgttcgacgacgccgagctgccgcggccgcgagctgccgccggactcgtgctggcacgtctccgcggccgtctcctcctcaaccccaccatggagcgtcacgaggaggtgggttggagcctggacaccgtacctggctacctgtttgctgctgtaaactgccaacttgttcttgttgatctctgcactaagacctaa

SEQ ID NO: 96440 - DNA, 1029 bp, Oryza sativa
  Clone ID: PAT_MRT4530_94536C.1
ttaggtcttagtgcagagatcaacaagaacaagttggcagtttacagcagcaaacaggtagccaggtacggtgtccaggctccaacccacctcctcgtgacgctccatggtggggttgaggaggagacggccgcggagacgtgccagcacgagtccggcggcagctcgcggccgcggcagctcggcgtcgtcgaacgccggcaagctctcgagctcgaacaggtcggagctggactcgctgctctccttggccctctcgctctcctccgccacgccgagcgcgcgcagcagctcttccaccctcctctccgcctccgccgccgactcctgcgccgcggccacctccctctccgcgccgcgcagcctcgccaccccggcgtcccggcacccgtgctcgccgtcgtccaccacgaccgccaccggcgagaaccgcactgcccgcctcgccggagtcaggatcccacccgtcgccgcgggctgtcgccgggaagcgcgcgacgacaggatcgacctcgcggacgccggctcagcggcggtgactgccactgccgccggcgccaccgccagagcccgcggcgtcgtcggctcggccgacctggctgacctcctgttgcaaagcagagcattcagaaggcacgcgaatggcgccgacttggcaccattcttgttcttccttctgcccctcttcttctccgcgacgtctcctgttgactccggcatcggcggcggcggctgcggcggcggcaagagaagcgaaggctgtgggtcaggccgcacgcgacacggccgcggcgtcttctgcagccgcggcgaccgcacggaagaagcagacggcgacaggttgttgcactgcgaaggacggcggcggcgtccgggcaccggtgacccctcggcgtcggcgggggacgccggcaagctgccatcggcgtcgagggagtggtagatggcgtcgagcagcgcggcggagaaggacgggttctcccggttgcggcgcggcggcgcgagacggccgctgtggtgcggagacat

SEQ ID NO: 96441 - DNA, 346 bp, Oryza sativa
  Clone ID: PAT_MRT4530_94537C.1
tctctccgatggaagaacgatcacagcattgatcgccgaagcgctgacgctccctctgctaccgtccaaaaacgcggggaaccgacccttcgagcatggagccaacttcgcgacggccggcggcacggcgctggaccgcacgtactttggggccaacaacttcacggtgatgccccagttcaacatctagatcgaacaccagataggttggctcgacgggatgaaaccgtgggtctgcggcgtgaagacaggtggccagccaggtagcacttgtggcgagcaccgtgaagctactatgagcagataggatggaacgacttggtccggcgcgctgatccaagggagg

SEQ ID NO: 96442 - DNA, 206 bp, Oryza sativa
  Clone ID: PAT_MRT4530_94538C.1
tgtcacgctgtgggtggactggcactgtgtccactgctgttccactgtgtgttgttgcttggcccacgcactcctgtgtacgccactttgtgctgcgacttgtgtgacctgtgtgttgtgttgtgtgcacttgccttgcctttacggttgccatcctcgataccgactgtgactgtgctcactctacttttgcgacacttcgttgt

SEQ ID NO: 96443 - DNA, 477 bp, Oryza sativa
  Clone ID: PAT_MRT4530_94539C.1
tttttggttactggcaataagccatatatttacaaaaacataagcctacagagagatactactggtcagcaaacgcacgacagctgatcttcattgtgctacacggataagtccagatggtcaacccgccagcctctgatgtagaacgttccaacaatcaacccaaaaccagcaattttgcagacttcaggttctgacttctgaccgcaccatttactaagcgtgatgcacctagccagcaatttggcaatctgatcttcagaaaattatacagctgggtgagattggatccaaattttcgttcgcattgcatcaagccgtcaaccattccagaagtggccaaagacaacacaattacacagctcctcgtaggtcacgctcttcatagttgctgtgccatgagtaacaaaatatcctccttggttcttcagttccagtttatgccacagaagattgatatcaaactatactaatctc

SEQ ID NO: 96444 - DNA, 553 bp, Oryza sativa
  Clone ID: PAT_MRT4530_9453C.1
aatcggcaaattttttaaatcccgttggggcccgggggccaaaaaaacccagggaaattttttttgggggggggggcttccttttccggatccctccttaacccccccttaaaaaaaattaaaattttgttaagaaaaagccccccaacattttttttgggcccaaaaggggttttttccttttttttgaacaaaccgccccaattaccggctctgattaaagcttatcccccccaaaaaaaaaacattagggttttggcccccaagggtctttggaaccttttttcccccttttggcccaaatttgggggggggcagcttcccctttccgggaacctggacccttccgggccttgatgtgggaaaaatgccggcatgccccacgggtaaaaaaaacagtttaaagtcccgggggggggagggggacccttttccctgttttaaacttcccaacggggtaaaaaggttctttccccaatcaaaaaaaatcccaagggccccggttgatttttttttgggaagggggggaaaaatcccgtgggccccacccacc

SEQ ID NO: 96445 - DNA, 499 bp, Oryza sativa
  Clone ID: PAT_MRT4530_94540C.1
tctgcgacgacgaccggtcgcggcggcgatgggctcaggagcgtccggtcgcggcggtgatgggctcaggagcgtccggtcagggagacggcggtgggttcgggagaagtggcagcggcaggcgcggcggcgagcagctcggcgaacggtgacggccttctggcgcgtgtgggctggcatggctgccggtgagtgggctcggacggcgacggggacgagagtgggcggacccgacgacggcgacaacgacgaccacgaggagggcggcggtggcggcttctcgggttagggtttcggattttttggattttatttttttctcagttttttatttttgcgtgcgggcgacataagcactcacacgcgataaatgtatcttcctgtgcaggctagttaagtggcccgcatgggataatagatcttcccatgtgggctagttaagtggcccacatgcgaaatgcaaagacttattttcgcgtgcagttgggtcgcccgcatg

SEQ ID NO: 96446 - DNA, 466 bp, Oryza sativa
  Clone ID: PAT_MRT4530_94541C.1
acttcaaatgtgtatccgtatattcgatatgacaatcaaacctaaaaattttccccaactaaacaagacctttatatatatacatatttttcaaaaagtaagaatttttttttgcatgtttaaaatactcggcgtggcaacgacgccgtccagcttggagtagagcgccgcggccattctcagcgcctccagcttctttgaagggaagccctcgaacctggcaagcaccagcaatggaagccagtcaggccggccggccggcacggcgccgcgcatgcgcggcgccatggcagagcagccgagctcgaggggagtgagctggtttgtagtgcgcgcccggacgaacgcctgcgtctcgtcggtcaggcacgcgagctgcagtggaacctcgccagctcgcccatgtccatggattggaacgcgccgacggcgtctttcagctccaggatcgccgccgggtgggttc

SEQ ID NO: 96447 - DNA, 576 bp, Oryza sativa
  unsure (1)..(576): unsure at all n locations
  Clone ID: PAT_MRT4530_94542C.1
tttttttttttttttaagaaagaataagtatcatgaatatcattatatcagtcagattaattagtattgtcataacagaagctgactcagagcacagagcagcaatgccaattagtaaacacttgtagtttggaatctatggagtgctaaaagaccacgaccacaacaactcaacataatttacagcaggatgacaccaaaaggccaaggcagtgatggcagctacggcactcattctgtaacccccctagcttcaccatggatctccaatctcgttgttattcccgtgttgtttggagctgaagaagaactccgagggctggtagccgtctcattcttcttgtagaactggatggagaacaggctgccatgtgatcggcctgatgatataggtgatccatgaaagataatgcccgccccatactttgagaaaacccgtgaattcctttcatccgcaagccttgccaagtatgacgaggcagaagataatggtatatctactaccagtttgccattgagaactggttgggccctnccaatcctgcncccgggntcntattctaaacggccccccgt

SEQ ID NO: 96448 - DNA, 518 bp, Oryza sativa
  Clone ID: PAT_MRT4530_94543C.1
aacacaacaggggtaccgggttctcatgaaaatcccacccaaaaccagaaaaggaatttaccaaaaaatattgggggcaaaaacaaaagaccccattggcacagggcccgttcgaggggaaagcaaacccccttatagggcgggggggtatatgccccacaatcctagctcaaaaatttaaaaattatttcgttaaaaaaaaatttctcgggaaaaatatgggcatgcatgcaagcttgccgcaacccatatatgggataaaaaaaatataaaaataaaaatataaaaatataaaaaaaggcagcccccccggaacgaacccaccctggttttttccttgctaaaaaagcccacttggccgggacgggggacttgaacaccctggcggccttccagccataagggagggggcccccggggaagatcttccccccaccctcgggggggacccggacggaaaagggccccttgaccggtttgggggggtttatcctccaaatggccccccatgactcctt

SEQ ID NO: 96449 - DNA, 1290 bp, Oryza sativa
  Clone ID: PAT_MRT4530_94544C.1
atgccgacggtgtgggcggcgctcaagaagtcgctcaactgcaaatcgggggattcttgcggcgtgatcgagcgggaggaatctcagggcggcgtcacagccggcaagaagtcgtcgtcgacgtcggcggcggcgctgcgcaggtcggggtgctcgcggtccatcgccaacctgagggacgtgttccacagccagtacggtggcagccggaggcaggaggacgccgtcgccgccgccgccgccggcgaaggcgatgggggatgcggtagcccgaggtcgatagggagcaacgacgtgctgaacccggtgacccacgacgtgctgctcgccgccaggtcggacgcgaagtgcgagctccggatcagcacccccggccgcggcgcgtgggccggcgccggcggcggggtgccgttcccgcacagcccgctcctgctgcggtgcagcaccacccctgtctcgacgaggaagtccccgtccgccatgtcgccgctccgccgcgccgatgacgacgacgacaacgccgaggcgccgtcgcccgctcccgccagggcctcctgcgaggtcggcatccggtgccaccgctgcggcgaccgcttcgccaaccacgacgccctggagtcgcaccaccactccagacacgccgtgaccgagctggtggaaggcgactcgtcgaggaaggtggtggagatcatctgcaaggccgggtgggcgaagacggagaacgcgctgggccgcatcgagcgggtggtgaaggtgcacaacgcggagaggtcggtggcgcggttcgaggagttcagggaggcggtgaaggggaaggcggcgaggctgtccaagaagcacccgcgctgcctcgccgacggcaacgagctcctccggttccacgccacgacgctcgcctgctccctcggcgctggcgactcctccaccctctgcacgtcgggcagctgcagcgtctgccgcatcatccgccacggcttctcggcgaccagagagatcaaggacggcgtcggcgtgttcaccacctccaccagcaagcgcgcgctggaatgcatcgccggagacggagacggcgacgaggcggcgaacgcgggcgtgaggaaggcgctgctggtgtgcagggtggtcgccgggaggatccaccggccgctggagaatctccaggaagtggcggcgcagccggggttcgactccgtcgccggcaaggtgggcgcctacgccagcatcgaggagctctacctgctcaacccgagagctctcctcccttgcttcgtcgtcatctgtaaaccttga

SEQ ID NO: 96450 - DNA, 570 bp, Oryza sativa
  Clone ID: PAT_MRT4530_94545C.1
atggtgactgcaccgacgcaggcagcagctgcaattggaagcgctcgggacgccatgcatgcgtcgatgcgtcaagtagctcaaccggattcgcctcgaggcgacgggaacagcggcgcgaacccacagctgcgcgttgacgacggtgtggccgcgctccagagctaccgtggcgagggtggactacagagtgaggagggatgggtggggaagctagagagcaagggggtgaagaaggagaagctgccacgatgttggaacgtgtcggcttttctcgcggtggtcaagaggcgcgatgcgcgcagccaacgcggccggcccgagccgggacggctcagccatggcggggcagcggcggtggcacatcgccggggttcactgccaacggcgacgacgcacagcggcatcctggcgcacggcgcggcaatgcacggtggcaccgatctcttggggagctcggcggtggcgcaatggcgactgggccggcacggatacagcggcgcgtgcctcaaatcaatggggccaccgacttcttggctgctaggagtccacgaaggcattctgcgcgcc

SEQ ID NO: 96451 - DNA, 867 bp, Oryza sativa
  Clone ID: PAT_MRT4530_94546C.1
atgggtgccccggcccgggcccccccgcagaggggaaacgccaccacagcggcccccaggaggcagcccggcgcggaagcaagggagaaggccagcggctgggcccgcggttcggggagagtcaaggaggctcaagggagggtgggggcccgaggaattgcaagaggggagacgacggcggcgaggaaagagggaaagtggcggcgctcgacgagggctcgattccgggcggcgggagccccaccgggaccgagggaatgcattcccaacctcagatggagcggagggacaccgagagaggtcgacgacgagaggcggcctccaggacagagcaagatggccggcgagcctaggcgagcggcggcggggagagccggcggcggggcgtgtccggctttcgtggaggcggcgctccagggacggcgcggcaccgagagcgtgcggccgggaaagaagagtgagggaggcgcgaggatggggcggcgcggagctcctcgtcgactcctcgtgctcgctagctccccggcacgcacgatggaagaggagggcgaggacgacgacaaacggcgaggcggaaatggaatcgactcgggagaggcggtcaagggggcagctggctgtcaagggcgcggctggcgctcacgggcggcagaggaggtgacggtggcgatggaagggaaaaagcaaaaagggggagggagaaaggagctcggctccttgccgattttgggcgagctgagagagaagggagagcgcgtgagagcgaggctctgccttcgtctcttggacgcacgcgtgcagacggggctgggcggcgcgcggtcacgggcggcgtcagggctgacgcggcggcgaccgagcggctga

SEQ ID NO: 96452 - DNA, 279 bp, Oryza sativa
  Clone ID: PAT_MRT4530_94547C.1
atgggcggcacgggaggcaacgacccggccatcccttcaccctcacctccctactacggctcggcaccggccgagtggcccccagcaaagccgcgcgtggaaggatcatgcggcgtcggtggcctgtccatcgcccgatgctgccgcttgtggcgtctgctggcgatggtgatgcaaggaggacagccggattctgctcctctaggtccagatctggcgcgtcctcagtcggaggtcagggtctccgaggtgaaaaccttgctccgcttctggtgctag

SEQ ID NO: 96453 - DNA, 613 bp, Oryza sativa
  Clone ID: PAT_MRT4530_94548C.1
tcaaggctcctctcgtgtcgtcttccgccatgggcggcacgggaggcaacgacccggccatcccttcaccctcacctccctcctccgcctcgccaccgcccgagtggccaccagcaaagccgcgcggtaacaaggacggcggctacggggcccctctctccttgcgctccggtgaactggggagtcatccagggaggcggcggcgataaccgccagatcctcgccgctccggccggatctggcggggacagggacgacgtcgacggcggtggggatggcgatggcggtggggatggtgatggcggcggggatggcgatggcggtggcggagtttgcggatccggcgacggtgcggcgtccgacagtggaaggatcatgcggcgtcggtggcctgtccatcgcccgatgctgccgcttgtggcgtctgctggcgatggtgatgcaaggaggacagccggattctgctcctctaggtccagatctggcgcgtcctcagtcggaggtcagttggcatttgggagcttccgctatggatgctttggttaacagggtctccgagtttgtcaatgccgggttttcaccggttttcatgaaattaaccgtgttgttgtaa

SEQ ID NO: 96454 - DNA, 462 bp, Oryza sativa
  Clone ID: PAT_MRT4530_94549C.1
atgcccgctgtgctaaccgccgttgccggcatccgccatcctcgtccaccgcggccgtcgccttcatctgcatccgtcgcaccgttgccttcgcgcccacgcccttgctacttcctcctccccaccagcgtcgacgccctcactcctcgccggccgtcaatcgcggcgccgacggcccccacccgagccgtcgtcaggccccacactggtggatttgttttcttctctatggagggtggtggcttcgatttcttctccgaagacccaagtgtctggccgtcgcagccgtcggtgactggcctcggccacgctcctccccacgccggcgtggatgcgttggacctcaattctcaggtgccggccggtgaggatttccctcatctgcacgactacggctcctacctccaaggcgacggcgaggatggagctagacgtggcaggggcaagaatgcattttgttag

SEQ ID NO: 96455 - DNA, 878 bp, Oryza sativa
  Clone ID: PAT_MRT4530_9454C.1
agattttgactatgattgggccgaacagtggtagaacctggtgaaccgggcctactactacatacttgacccactgctgtccccttttactcacaatggaaagaaaagagatgcagaaagaagagtccaaattccgtttaccaaacaagatgtcgagaggcgaactctgtaattcccccccagcaaaagtgatagcggctgtagcatccgtgtggaagagggtaggggcaattctatgtgattcgctacgcttgcttgcgctccacccccatctatcccggcttgcattttggggcgagtactacagttcctccataatcacacagaacgcccagcttcgcagagctgctctctccccagtccacagcaagtggcgctctgctatggcttcagagatttcagctcttgcaaataatggcacttgggtactggtaccacctagtcctaactacaatataattggtaggttgtgggtttacaaaaccaaacgcaagtccgacgcgctaaccatctttaggaaggattattatgatgagatgagtacacctatagcaattcctcataggactgctgatgagtttcttcgtaggggagactatggaggtaacaatccctcgctacctgttgctgtcctttttaaacccgtgggaaacttcatcatcaagccggcgtccaccaccattgacggtcgctatggccacattcggagacttccaaaactgaactggaagatggtacccaaagcttataagctctttgtgagctttggatcaatgaccagattcccgctattataagttcgaagaacttgcagctgatcgattgcaagcttgagtattctatagtgtcacctaaatagcttggcgtaatcatggcca

SEQ ID NO: 96456 - DNA, 265 bp, Oryza sativa
  Clone ID: PAT_MRT4530_94550C.1
gaaactgtcactagacgagcagcttgctcattttgttgaggtgattcaaaagatccatatcaatgtgccattgttggatgccatgcaattgccaacatacgcacattatcttaaggatattctcaacaacaaaaggccgctgccaacaactgagaaattcgaccaagctctctacgaccttggagcaagcgtaagcgtcgtgcccaaagacgtcttcgacaagctcaacttcacgatgttggcaccaacaccaaagcgcctgtag

SEQ ID NO: 96457 - DNA, 1429 bp, Oryza sativa
  Clone ID: PAT_MRT4530_94551C.1
ttatataatcttagacataactagattattatctccagaaatatagcagaactgcagaagcgcgaagagaaaatactcaactcgtttcacagtcgtgttaggagggtttggtcgttgttgctgctttgattccagcttggatgatccttttgctgcattcttggagctcatggattggtttgtcctgccgttggttgcgccttttcctacgcccctactcatcattcgtgcagttaagcgtgatgaatagctacttacatcgtaatgccacttttttttatttttaccgttcttgttgttagagccatccggatgacaggtcgataacgacacttttcctttaggtttgttcggagcctttgcctcactttcttcagcatggtcatcatttccatttggagccctctcattggcattagtatcaagcaacctgttctcccatgggcgtgcagccatccacctctctaaccaattctggctccactgattctcatccacctcaagcccttggagggttgctgctttctgtttcctggaacctgcttgccactggtgtgttaaagcgtatgccattgctctttcccgcttagcagcagcttcctgtctttttaatactttagcttgcatttgttccgctgagccaataccgtcacaccagcgttcctcaatttcccaaacatggtcctcgtgaacattctgttctgaagccttcttttgcgtcacttgactttccaaagaaattcgaactcgtcttgctctgacacgagcttgagctcttaccaatgcttgcatacattgaagtgtttctgctgcttgctttcggacagcatggccacgaacaagagcctggagtctaactaatccttttaatgctcgtaaagccctcctagccatcttcacaggtgataaattatccagaactttgtcacacataatagaagggacagcattcacaacagtctttcctttttttccgggtgaggaggtgatatttgatattgcctgaatgttggtgtcacatgccaatggctcagtttgtacactgagttcttcgactgcagcagcactttcagtatcaatagaatgttttcgcttgtgtagcaactgcgcagtagagctcctcactccactgctttcagaagtttgtgctttttcatgcttttttatcccaacaagtgatttaatccacttggctgaaatgcccatattggcctttcaacccttctcctttaaccagttagcacggtaataccttgccagcggcgaagaggggtcaaaatcgccaccgacttggcgaggcgaccaccccttcctcctcctcctcctctgtctggggatggattcatgagctccaactccaccttttcggacgcgtgggcggacgcggggcggacgcggggtcgaccgggagtacggacaggtactgcag

SEQ ID NO: 96458 - DNA, 1038 bp, Oryza sativa
  unsure (1)..(1038): unsure at all n locations
  Clone ID: PAT_MRT4530_94552C.1
tttcttccttttttttttttttttttagcactaacaataataatcattgatgctgaagaccatgtcatgaaacaatagggcatatggtttattgtactgtgcatattttcacagttttgcacatacagttctctggttatagtagaaggaagataacttacagaaatatagcagaactgcagaagcgcgaagagaaaatactgacaacataaatattgcacaatagaaacatgaagcatggcatcaatgtagatgcaagattctctctctcttttcttggtttatatacacggatgcaacagcacacatgacaacagggctattaccaagcgtctgaatgaaatgggagttgggtggattcctcactttctcaggcctttacctcaactcgtttcacagtcgtgttaggagggtttggtcgttgttgctgctttgattccagcttggatgatccttttgctgcattcttggagctcatggattggtttgtcctgccgctggttgcgccttttcctacgcccccacccattgacagcatgttcacgagtaacagtctgatcttggatgaatcattcacatgctcgtaaagccctcctagccaagaacgctcgaaaggcagattgaataactatgncagcatgattctcccttgtatccaattcaatctgagatacttgaagagttgtaccgggtgaggaggtgatatttgatattgcctgaatgttggtgtcacatgccaatggctcagtttgtacactgagttcttcgactgcagcagcactttcagtatcaatagaatgttttcgcttgtgtagcaactgcgcagtagagatcaacactccactgctttcagaagtttgtgctttttcatgcttttttatcccaacaagtgatttaatccacttggctgaaatgcccatattggcctttcaacccttctcctttaaccagttagcacggtaataccttgccagcggcgaagaggggtcaaaatcgccaccgactggcgaggcgaccaccccttcctcctactcctcc

SEQ ID NO: 96459 - DNA, 423 bp, Oryza sativa
  Clone ID: PAT_MRT4530_94554C.1
gacttctttacgatgcgcgcggcagttatacatttggatgcttaaatcaaattgtgggggtgggatcagagttcaagctctggagttcgccatcgaattgaacatgcccactaacaccctttctacatgtccgggctgcctgtacatccacggcaccggtggtcagtggagatgatccgagcaaagcaaacctgaagcctctgcgctggacatcctctactacctagctctcgcccaagatgccggctgccacgccatccgatcattggctacctaccaggactgaaaccagagttatacttgagaacgacacaaccttatcgaccagctgatcgagcccgtctaagccactggatatgaacttgtcccgcctaaaggtttatcgaccagctcatccatcatgaagaactgcccgaacatcat

SEQ ID NO: 96460 - DNA, 192 bp, Oryza sativa
  Clone ID: PAT_MRT4530_94555C.1
tctttttatgtttttaaattatactacctcaatgctaggaaaatacaacaagaggtgaactcactctttgctcaacttaacccaaattttagtgagagttttatactacctaaatgctctacctttatattgctatggtttatatctgaaggcatcatcactacgccaagaaggataggttaccttgagaac

SEQ ID NO: 96461 - DNA, 161 bp, Oryza sativa
  Clone ID: PAT_MRT4530_94556C.1
ccgctactctccttcccgagaaaaaccctagccgcgcgcgggtgctagcgcatctgcgcgtggcgttccgtctctgtacagtagaggcgccgctgcattgcggtgctgatcggcgtggtactacggcgaggagaatgcacgggaaggagaaggtcgacctg

SEQ ID NO: 96462 - DNA, 1880 bp, Oryza sativa
  Clone ID: PAT_MRT4530_94557C.1
gcacataaaacaaaatatatatagtatgcatacccaccagaggggcaagaaaagggagcaagtaattcgctatgctcagcaatgggaaaagggagaagaaatcaaagaatacatgtatgtaatcaaaatgtgccagtttgcccagaagaatccaagttaatacaacgaaatctcaagcgctgcaggttggcaaattgatctggtcagtgctgtgattttctgaacgaataatggaccatcttggacaacccgcagcgcagagagatcaagaagagattattaatggttgggggctgatataatcctctaacataacctaatgagctattagtgctgtataatctccgtgtgctacggccgtggtctcctgtacggtgattcaactcaagtggtttgtgtaaaaagatcacctatctgaccattccatccatgtggaattgatgctatgtgctgctgcttcttcagctagtagatgactagctaatggcgcaacatcctcgaattttgatagtgtaacctaccccagaatcatattactgcaagtttcacaagcaatgcttgtcatcaaagccttcctgggtgagcaagcctgtgacaagtttctttagcctgtctgcaccaggccctgggcggagatcttgtacacgctcaacagtgaacgatcctttcactgttgtcgtgttcaacagatccatccacccacctgccacgaacccgtcaggttggcggcccaataattcctggtcgatcttgtctagtacaggatcttctcttccaaactttcttgcaaagggagcattgctgttaaccataccgtcaaagtcattgagggtgaggtagtgagggtgttgctttggtgggttgtcccaagaaatgaaatgtagatcatgattcacagtggtgttgcggaactctgggacattgcaaatgactgtgtggaagtaaccctctggtgaagaaagaaaattggcataatacatcaggaccgtcctgggaagattgtcccaaccccatatgcagtattcaataaattgatgagtaagcatcatccacgccgagccagtgaagagcttgaatgcggttggaccacttcttttctctgtaatccagaaaacatcagatttctgcaggctgtatagcccagggtcaattatcaccggctttgccctctgatactccttccatccgatgtcactggtatgctcaataaagttaagttgccttggcaagtcagatagaacatacaacagatcgtcctgcgtgacgagggggtagtcggaggcggagaggttgatgaaccagtcccactcgccgccctcgcggaggaggatggcggcggcgtggagcgtgttggccaccatggtcgggccccggtaggtgacgaggttggcgcgggtgaccaccttgacgttgcggaaccgcgagtagaccgggtcggcgcgcaccgcggcggcgagctcggcgcgctcggtggcgggggcctcgaggtcgaggtggacgacgtacatgttcgacgggtggtagagcgccctgagcgtgcggcgcagcgcggcgccgtcgccggcggagccggacacgaggtaggcgatcctcggcacggcgccgcggccgcgcccgcccgacgccgccgcgccgcgcatctgctgctgctggcgcagcttggcctcgacgaagagcggctcggcggatgccgcggaggggagcggggagaaggagaggaggagcgcccgcgacgaagagaagaagagggacgccgcgatgaggagcgacgagagcagcacggacgccagcagcggcgccgcccacctccgatggtacccaccccctgccacccccgccgcccccgccgtccccggcgacggcggcttcgtctccagcat

SEQ ID NO: 96463 - DNA, 313 bp, Oryza sativa
  unsure (1)..(313): unsure at all n locations
  Clone ID: PAT_MRT4530_94558C.1
tctctttagggtaggaacaccttgctgttgttcgcgttgaaagaaaccgagggcaacgtggtctgctactctatggacgtcttgttccctgcgctggacggcatggtgaagcnggaacgtgtccggctaggggcgcataaccatgcacaggttggatgcgagtcccaactcccgcctgtaggggagcccgtggtacgagcccgaccgcatgctctacactcggaccgctgtacggtgagccggcgagctacctgaccggcgagttccccggngactacgggagggacaccgtggggctctccgccgacccgga

SEQ ID NO: 96464 - DNA, 1619 bp, Oryza sativa
  Clone ID: PAT_MRT4530_94559C.1
cggcacgaggccccccccggtttttttttttttttttgaaggttttggatgaaatgaatgtgcatgacggtatacaattttctgttaaatacaacaatactgaaacaggattacaaagacttcacgggggttcatttggttcacatggacaataaaatccccaaacattagagctctagtttcatggtcccaattacataaagaactaattaaattaattccccacaagaaccaaatgatcgggctggtggcatttggcggaatccattttaatcaaggcttcggaacaaaaataaatagcaaacttaaacagaacggccctggttaaagcgctgaggggaaagcgtttcaacagcaccgtgaagcactgaggaatcgaaacctaacgccggtaaccgccgtaccgcccggtggcggtaaccccaccaacggcggtttgtgaaaccctgggagagtcatgctttccatgtaaagcgggatgaactgatgcctctttctgagttttgcacctgttgcaaaaggctcgagatgcatagttgtgattgttgcagttgctgcacatccagtctccttcgcgccattttgctccttttccaataagaccaggcattgctgagacctgcccagagggtaacgctattgagtttccattgtcaaacttggaataaggtgtctggccattgctgcttccagctccttgctcaataccaccaaataaattatccgtgcctgctgttgaaagtggatagcttgcatttcctggattaagccttttgttatcccattcattggcaagttcctctgacgccaaccgcttagttcctaatgtggaagaagtatctggtactgtggttttcattgttgtggagggaatgcctgatggtacaggagcactacactgtttacactgtgtgcgagatgagtagttatgaaatccacagctacaaagccaatcaccgctacgccagtcttttggagccgctgaaaactgatttgcgttgttgccgccaaatggccagccagcagcttgcatcccatatctaccagccaacgcataaggccagtttgcacttgcaagtagctgctgttgcaaagctgaattgccagccatcccaaagttcatgttcatcttaaagccagcaaggccttgcatcctagcaatataatttgcataagctggcatggccattcctgccattgataatgctggcattgctgcttcctccttcggcaggccacattttttgcagttctttctggatgcataattattgttactgcaaccggtgcagatccagtcgccggcgcgggggagccacttggagtcgggaggggtgttggggtcgaccaggagacggggctgcttgcaccggttgcacagcgaccggaacgcgtagttgcggttgccgcagccgccgcagtcccagtcgccctcccgcccccctccgccgccggagccgcccgtggaggagcccgcgccgccgcctccggccatcgcgcgcagagattccgaggtgggaatgagggatttggtttggtttgggggagggggtttgggaggaagggggaggaggatctacgcgaggtgagaagggtatattcggattgggagaagaatg

SEQ ID NO: 96465 - DNA, 345 bp, Oryza sativa
  Clone ID: PAT_MRT4530_9455C.1
gatcccccgggctgcaggaatcggcacgaggtttttttttttttttttaagcatataaaagagcgagcagcttaccgctttcttgacattctctctggttagttaggttattatgttgcatgatgcagggggtcaccagaagacgatgcccaggttgatcatgtagttacatatatgtaggtatataaggtagaaagtacatgtaaagcagtgccctgctgggcagcttcaaggactcctcatgctcctgtcaaagctcaggagcagaaagagttcttccttcaatgtgtgatgatctcaatttgtatgaacaaaatttcccccttattcagtagcaaggagcct

SEQ ID NO: 96466 - DNA, 381 bp, Oryza sativa
  Clone ID: PAT_MRT4530_94560C.1
cccacgcgtccgaccacgcgtacggcacggtcggcttcttcgcggcggcgctcatggcggccatggtggccatgtccggctcgcagctgagcgagtctgagatgacgttcatggacaggcagtgccagcgggaggtgcacgacagaccgctggacgcgtgccggccggtgctcgaccggcagctcacctgccgggagaggttccagccgatgtttcgtcggccgggcgcgctccgcctgcatatgcagtgctgccagcatctgcatgacgtgagccgccagtgccgctgatccgccattcgccggatggtgaggatgctactaggacagcatgccaatgcccctggagcacggctggtcgtcgtcgtcgtcatgactacta

SEQ ID NO: 96467 - DNA, 590 bp, Oryza sativa
  Clone ID: PAT_MRT4530_94561C.1
ggggtgggggtttttttttttttttttttttttttttttttttttttttttttttttttttttttttttttttttttttttttttttttttttttttggcaacccccatggaacattaagggaggaaaaaaacagttcatggacaacattttgaaagggaaagaagggggcccaaacaaaaaaaaaccccagggggcccaaccccttaccccaaaaagcaaaaacccccccccaaaaaccggggcccaaaaaaaaaaagttaaggcccccaagaaaatggggaaaacaaaaaaaaaaaaaccccttttttttaaacctccccaaaaccaaccccgggggaacaaaccaaaagggaaaccccccctaaaaacgggaaaaccccgggggttcaaaaaaaccccccaccgccattggacccccccctggctttgggcgggggggcaaaaacccaccaaggggggggtttgggaccaaaaaacccccccgggggaaagcccaaaggcatcggaacccttcaaaaccccgaagcgggaaaaaaagggggcaaacaccccccagggaacatggccaaaaaacatccaacccccccc

SEQ ID NO: 96468 - DNA, 543 bp, Oryza sativa
  Clone ID: PAT_MRT4530_94562C.1
atggcgcatgcgcggtgggtggggacgggaccatgtgaggcggcgagcagagggcgcccgacgccggtcgaacagctgctcgacggccacccctatcttggcatccacggcatcgaagaagctggtggggtcagcgagctggccgtgctcggaggggatgatggcgaggcggatgctgtctaccgacagcagcgtggtgggctccggccgggggaggagagccaaagggaggcaagccatcgtccatggcgctccgggacggtggtggcggtggggatgtgggggggggggcgacggacggcggcagtcccacgttggcgctggcgcggggatatcttatgtaaattccttagagatatgtttgggcaaaagcctgccgcaaagacttatggtatcttagagtttgttagagataagtgtcgtatccggcaaggacatattttgtatctcaggatcaaatcaactggcacactcacgaacctaaaaacaagattttggacctgcactgaagttaagcagatcttccaggccagtgcaacataa

SEQ ID NO: 96469 - DNA, 513 bp, Oryza sativa
  Clone ID: PAT_MRT4530_94563C.1
atggagcggggcgggccctgcgacggcctctgtcgcttccggattcacctaggcacgagaggggactgcccgttgcccgctggggacgggggggtccggaagccttcggaagagttcggcgagttctgtcaacaagagtctgaaaacatccatgacacgacagacgaaagctccaacaacactccagcgttgagtcacaagccgcaggatgtcttcgtcatacttcacatggaaactgacgtcgagcgacaagaacgtgaagccgaagagcaccgcatcaggcaacaacaagaggaactcgctaagcgcatggtggatctacatcaacgtggacgaacagcccaggaggccatcctccaagccatgctgggcgaacacgacgtcttcatgacttcccagcataacatcgtcgtggccaagggactactcaacaacatcaagtttcctgaagacccgacgatcaacaacacgatcggacaaatcaagcctatgattgaggccgctgccgtctag

SEQ ID NO: 96470 - DNA, 2422 bp, Oryza sativa
  Clone ID: PAT_MRT4530_94564C.1
atgtcgggatcgtcggcggcgggggaggatatagtgcagcacctctcgtctaattccaacccgtcctcgtccaagctcgccaagctggaggcacggatggctggcaaggccgctccggtgccatcaccgccgccgccgcaccatctggtggttccttctgcccccgccaccacgttcatggaccaggaggagctgcccgagtcctcctcttccgacgatgataatggcgaggagttcttgatacagaagaacatactgaagcgcccgagatcgccagatggtgatcacggcctagctgttggaaattttgagggatcagctaatgaggcggtaaagcattcagaagtcatggacacacggccatccatagacatctcaaacagaaaaaagcaaggccgtggaagggggcgcggtggagcaggccgagggcgtggttcaaaaactgtagatcaaacaagagcaacttcaacttcatctgctgttgtagcaaatggtcgacatgatattttaaccaacatgtaccaattgaatccttatggggacacacttcttctgtttgcaccgtcccgtcttccattatatgcaaaagaaatatcttacgcagatcaggtgtatgatggcaacctactacatgatgatccatcctcatcttctaaattgttagtatctttccatcaggaatcccgatccagtgctgtgcttggcaatgatgataaggctgccttacaggaagagttgtcattgctgcgtggtaaagttgctattttggaagaagagctttctaaatcgcgtcaagagtccacggaataccgtcaacttagtgataggctagcgaaggaattgaaggatctcaaagaacaagatcaacaaaagaaatcaaagcaattgaaggttctatctgatctgctgatagctgtgtcaaaagcagagcggcaagaagcacggattcgaataaagcaggaatctttccgacttggtaacgttggtgttatgagagctggaactgtcatatctgaaacatgggaggatggccaggcaataaaggatcttaattctcaccttaaatctctgctggagactaaagaaactatcgagagacatagaaaatcactaaagaaaagacaatccgataagggtgatggcagtgatgctgaaactagcatgtctgaggaagatgtcctgttgcaggatgagatatgtaaatcacggttaacaagtataaagcgggaggaagaacagtacttgagagaaagagatcggtatgaattggaaaagggtaggcttatacgtgaaatgaagcgtctcagagacgaagatggatcacgctttaataactttcagattcttcacaatcgctacgctctgttaaatcttcttggaaagggagggtttagtgaggtttataaggcatttgatttggtggagtacaagtatgtggcatgtaagcttcatggtttgaatgctcagtggagtgaggagaaaaagcaaagctacatacgccacgccattcgtgaatataacatccataagactttggtgcatccaaacattgtcaggctatgggacatatttgagattgatcacaacacattctgcactgtcctagaatattgcagtggcaaagatcttgatgcagtccttaaagcaacaccgattcttccagaaaaggaagcgagaatcataattgtccaaatatttcaaggcctagtttatcttaacaagagaactcaaaagatcattcactatgatctcaaaccaggcaatgttctcttcgatgaggttggtgttgcaaaagttacagactttggcctcagcaagatagtggaggatgatgttgggtctcagggaatggaactgacttctcagggagctggaacctattggtacctgccaccggaatgctttgatcttagcaaaacgccatttatctcatcgaaggtggatgtttggtcagcgggtgtaatgttttaccaaatgctcttcggaaggcgtccttttggccatgaccagacccaggagagaatacttcgggaagatacaatcatcaacgcacgcagagtggaattcccttcaaagccagctgtatcaaatgaggcaaaggaactgattcgtcgctgcttgacatacaaccaagcagaaagaccagacgttctaaccatcgctcaagaaccttatctgtcttatgcaaagaggtagtcactccgaaagagtgcaggacaagattttggatcggcagccgctcgcgcaagaaccccggaacatatttattttggacggggatgggcaccagcaaatggtaagaatctggcaaagctcaagaatatcccgaagggtgttactgtatatttgtaaatatcacttgtgcccataacagcaatgactagaacggcaagtgaacctcctctttaatctagaggaggta

SEQ ID NO: 96471 - DNA, 419 bp, Oryza sativa
  unsure (1)..(419): unsure at all n locations
  Clone ID: PAT_MRT4530_94565C.1
ctaacacntcacacacacgcgcgcaagctctgatactctatagcgccccctcccctttctttttttttatttccacacaaaacatccatttattatcctcccgcacttatttttaagaggctttcactccacttcttttcttcaaaccccctcacaccatctatttctattctccatatatacttacttcttaaactctccacttttattacatatcacactcatattacatattctataccacctcataattactctttaaccttcatgatgcaatctaccaccatcaaattcttcatatattcattactcctcacaacactttatcatccatctaactagactttcttaacctttaatccaacaaacttcattatattctccgacattcaacaacttcccattttcgaaaaccttac

SEQ ID NO: 96472 - DNA, 592 bp, Oryza sativa
  unsure (1)..(592): unsure at all n locations
  Clone ID: PAT_MRT4530_94566C.1
ccagttagcaactcgcaggcggacggtgcccccacccttcggttaccagaagtccagaccttcagttggngtaaacgcccgcaagaccgtggtcccgttcctgaggccaacccagaggggatattcatacactctctctcgagcattanggtgtcccgcgcttgcgtttcaagagactcggccctgaagtgtacanctactgctcaaaggctttttctatgcagacaaagaccggttttcnagggaaactctgttcccttgaccctgggccgcttccataccttgtacatacacccgacaatcatgtcaaacctgcgagcaagcctatttgctatggtgtggcaatgatgaatgtaangatgatggagtgcctatgacttgaatcgcatgtaatctgctgcttgctaattgattagccgtgcgngagttgcgaggtcccaatgagaacacgggaaaatattggcgtatgtgccctgatcgggttcgatattgtaccctacatttttgctagtatgtaatctttagaacggtatcggttgataaacttngaaatgaacgtaaaccncggtaagaatncaaaaaaaaaaaaaaa

SEQ ID NO: 96473 - DNA, 241 bp, Oryza sativa
  Clone ID: PAT_MRT4530_94567C.1
atggaggttcaggcgtgtcgccggagctgggagggacaagatggcaaggccggcaggtacagccacagccacacccacaggcaggctagccgggatgccggccggcaagatcgatcggctccagctagtttagctcccaggccagtcaaggtttccagagatgataaagcaatcagggatgcatgcacactgatgctgattgtacaaactccaagcaagtcaggcccaggtccaggtccag

SEQ ID NO: 96474 - DNA, 1437 bp, Oryza sativa
  Clone ID: PAT_MRT4530_94568C.1
atgaagcaaaccgtcgtcctgtaccccggcggcggcgtcggccacgtcgtccccatgctggagctcgccaaggtcttcgtcaagcacgggcacgacgtcaccatggtgctgctggagccgcccttcaagtcgtccgactccggcgccctcgccgtcgagcgcctcgtcgcctccaacccttccgtctccttccacgtcctcccgccactccccgcccccgacttcgccagcttcggcaagcacccgttcctcctcgtcatccagctcctgcgccagtacaacgagcggctcgagagcttcctcctctccatccctcgacagcgcctgcactccctcgtcatcgacatgttctgcgtcgacgccatcgacgtgtgcgcaaagctcggcgtgccggtgtacacgttcttcgcctcgggcgtctcggtgctgtccgtcttgacccagctcccaccgtttcttgccggtagggagacgggcctgaaggagcttggcgacacgccgcttgatttcctcggtgtttcgccgatgccggcgtctcatctcgtcaaggaattgctcgagcatccggaggacgagttgtgcaaggccatggtgaaccgctgggagcgcaacacggaaaccatgggcgtcctggtgaactcgttcgaatcgttggagagccgggcggctcaggcgctcagggacgacccgctctgcgtcccaggcaaggtgctgcctccgatctactgcgtcgggcctttggtcggcggcggcgcggaggaggcggccgagaggcacgagtgcctcgtctggctcgacgctcagccggagcacagcgtcgtgttcctctgcttcgggagcaagggcgtgttctccgcggagcagctcaaggagatcgccgtcggcttggagaactccaggcaacggttcatgtgggtcgtgcgcacgccgccgacaaccaccgaaggcttgaagaagtacttcgagcaacgcgcggcgccggacctcgacgcgctcttcccggatgggttcgtggagcgtaccaaggaccgtggcttcatcgtcacgacgtgggcgccgcaggtggacgtgctccgccaccgggcgaccggcgcgttcgtgacgcactgcgggtggaactcggcgctggagggcatcacggcgggggtgccgatgctgtgctggccgcagtacgcggagcagaagatgaacaaggtgttcatgacggcggagatgggcgtcggggtggagctggacgggtacaactcggactttgtcaaagcggaggagttggaggccaaggtgaggctggtgatggagtcggaggaagggaagcagctcagggctcgttcggctgcgcggaagaaggaggcagaggcggcgctggaggaagggggctcgtcgcacgctgcgttcgtccagttcctgtccgatgtggagaatcttgtccagaactaa

SEQ ID NO: 96475 - DNA, 989 bp, Oryza sativa
  Clone ID: PAT_MRT4530_94569C.1
gcgcacgaggctcttcttttgccgtgctcccagattctccggtcgccacgactgcttcgtgaacaatctgcatcgctccgcgattcgtgttggttcttttttttgtttcttggcattcacggcggcggcaatggcgaggagcacgcggtcggcggcgacggagcaagcgtacagccggttcgcgccgacggcggcgtcgtcacgcggccgtggcgtaggtggcggcaacggtttcgacgagttcgacgagtcggacatctggggatcgttcgagccggccgcggaggtagccgagtcaccccgggcggcacgtcatcaggtgccggccgcccggccgccggggcggaagccggcggcggcggcgtcgaagccggcggcgcacgggtcgctgccggtgaacataccggactggtccaagatcctgggcgacgagtacagggggcaccacgccggcgactgggaggcggacgacgtggacgacgacgacatcgacgcggcgtcggccgtggcggtgctgccgccgcacgagctggcgtggcgccgccgcgccgcgtcgctgtcggtgcacgaggacgggatggggatcggccggacgctcaaggtccgcgacgcggtgtggaagaagaccgggttccaggcctgacactttagcttttgcacgtcacctccatccatcgagctgttttgtttgaacgaacagaggatagattaatttaactctctcgagtgctattggtagttggtgttttttttagcagcacttaactgcacaagtgtttcgtgcttttgcccttctctttttttgggcctttttcttttcttttcttaattttctcggcacattcaggagaggatcagaagaggtagtagtcaggtagaggaattagtgctagctgcttgttgttgattcatcgtgacatgtactatttctcgagagaatgaagatgataaacacgacatatttgtttagtattaaaaaaaaaaaaaaa

SEQ ID NO: 96476 - DNA, 504 bp, Oryza sativa
  Clone ID: PAT_MRT4530_9456C.1
tccatgtttctccaaactccaagactccatcgccatcgacggcgtggtgaccatggcgtgctgcgccgccgacgccgtggcaacggaccgcatcgccctcgtcaaggccttcgacgagacacgcaccggcgtccgcggtctcgtcgaatacggcgtctctgccgtcccggacatcttccgccaccccgacccctacgccttcgtccccctcgctccacccggcgtctacatccccgtcgacaacctctacctccccgcgccgctcgccgtcgaggccgtggcgggagccgtgcgcgactgggggttcttctacctcgtcaaccaccacgcccttgtcccctccggcttcaccgtcgggctcctcgtcgccgtccgcgccttcaacgagctccccgtcgtggagcgcgccgagcactacggtcgctccgaggacggcggggtcagctactcctacaacgtcgacctgtaccggtaggacgccgcgagctggcgcgacacgatcca

SEQ ID NO: 96477 - DNA, 1137 bp, Oryza sativa
  Clone ID: PAT_MRT4530_94570C.1
atgtcccttataggggttggtcttgccctctacaggccctcctccacgtccaactcgggaccggccacacaccgccggtctgaccggccctcaaccggcggtctgaccgcccaacacacggcggtcagaccggcctacctcggaggaaaccgtccagaaattcataaacaacatgtccatgccttccattccatccactgctcaccagtcaccaccgacgccagcacaatcgccgccacgcaccgccgtgccactgatgtatccatcgccggcgcgccgccgcgctgtcggccggcgctaggcatggggacgtacggccgtggtggcgcgcttgctaccagcaaagggccattcttcatccttcctcgagctgccttgctggccggcgagcgcgcggagagggagaagggcgccggtagggagaagtgcggagggcgccagccatcgggcggggagggccagttgggatttaccattgcagcagagacatatgacaccaccacaaacctcccaagtcccaacctttcttctgaacaagccttccgcacattcgtcgtgcccgttacagcagcagcaatctacagtttgaaccagtcaatggagaagaaaaggaattattttgctgaaaaaagagatatgtgtgcccctgggtcggccttgaacagccgcagcctctccgcggcgacgtccagagacatcaagtgggcgttcttcgcgtcgccttcgcacaaatcatccgcacaagcacaccaatcaatcaatccaccagaacaagagcagaacgccatgaatatcaaaaactttgacgcatatggaggggattggggaagtgggcagcggcggctgcgactgcgagctcgagtcccgggcctcgtcagcgccacgctgaccgtgtcccgcggctgtgagctcgccgtcgccgtaactcgtgcagatcgatgcggcggcgccggaggagggggggcgaggtcgtgcagctccggccgccgctctctcgcctgccgccgcgcgctcgccggcctacccgttccgctcgttggcctccccgcctactccctctctacgcacgctcgccggcctccccacccgatggctggcgcccttctccctctccgcgcgcgctcgccggccggctag

SEQ ID NO: 96478 - DNA, 412 bp, Oryza sativa
  Clone ID: PAT_MRT4530_94571C.1
cttcttgtgggctcgaagcttgcactcttgtagggggggttttttaaaagcggaggcgcgagaggccacgaagacgaagagcagcactctgttggggatcctagcactccaggcccttccgctatctgcggccggggccaaaggacctgcagggccgacgacgaacaagcagtgctggcgcggcgagcgcaccagctgctccggcgtggggacctgagacgacctcctcaccaagtgcgcggccacctgcaagaactgcgtccccgtgtccacggacaagggcgccaccaagcacaggtgccgtgactttcttcccaaaaactgtggctgcaagatccactacagactcatccaaggccaccatggccgcgcgccacagcggaacagccgatggatccttccatatgcatgc

SEQ ID NO: 96479 - DNA, 1116 bp, Oryza sativa
  Clone ID: PAT_MRT4530_94572C.1
atggccgcctggcttgctgcgctgctatggctagtagctgcaggatgcctaggttcagggcatggcagtacaggatcattagttaagcagcctgacatagggtctcccaaaggcaggacaaggcagccgcccagggtggacgacgacgacgacgacggacggccagatttgttttttatgggatggagggattatcaggcgtgcataaactacgacgacgcgaagaacgcccacctggtgtctctggacgtcgccgcggagaggctgcggctgttcaaggccgacctgctcgactacggtagcgtggcggcggccatcgccggctgcgacgacgtcttccatgtggcctgccccgttcatacacttgctgctgctgtaacgggcacgacgaatgtgcggaaggcttgttcagaagaaaggttgggacttgggaggtttgtggtggtgtcatatgtctctgctgcaatgatcgatgcggcggcgcagcaggagtcttcgtcggcagcggggccgaggtcgtgcagctccggccgccgctccttcctctcccgtcgtgcgcacgccggcctaccctccccgcccgatggctggcgccctccgcacttctccctaccggcgcccttctccctctccgcgcgctcgccggccagcaaggcagctcgaggaaggatgaagaatggctgggagggagaagggaaaggacgacggcacggtggagatagagagcaggcaagcgcgccaccacggccgtacgtccccatgcctagcgccggccgacagcgcggcggcgcgccggcgatggatacatcagtggcacggcggtgcgtggcggcgattgtgctggcgtcggtggccgccagacctggggaaatgatgcccaggagcaggagaaaggaagcctcgaaacaggagctcatcgaagcagcgctcaccggcctcttccatgctagtatcatcttcatctagcccatcatgttggtccttggacactaggccttcgacgagccatcgcctgaccaagcatgtcctgctgacgctttcttcctcttcgaacgtggtcaggtactgcaggcagctcttgtagtgcacggacagcttgctgtagcagaaaagcat

SEQ ID NO: 96480 - DNA, 507 bp, Oryza sativa
  Clone ID: PAT_MRT4530_94573C.1
cgtgagaacaatgcatccaacattcccactctcagattcgatcatttactgttgcttttacaattagaaatggagtgattatctttacaggtcacaaagcagtcaaaatgactccatgtctctctcaaggctctatcaacatccctccccttacatacagtgatacagataaggagttcagaattcagaagaagcccatacatatatgaacaggggtgtactgcaaaagtttgctcgagatcagggccagaatgcaaaccaaaggtcttctgcagcgctgcatgtgccatgtccgtccccaaatcaacaaaagaaagagagaaaagaaagcagcagcagcaaaagataaagaagcctgtgaaaagaagcaaaagagaaaccggagaggaggagcccctttttctttacatctttctcggggaaagggcctctctttgatcagacagaaactacacactgtggtctaaaactaaaaagcatctcaatccctttgaaactactcgtact

SEQ ID NO: 96481 - DNA, 543 bp, Oryza sativa
  Clone ID: PAT_MRT4530_94574C.1
atggcgtgggacgcggtgagcggcggcggcgcacccgtgcggcgaggcgcggccgagacggcaccaaggacggcgcagcggcgcacagccgcgcggcacggcgcggcggcgagaggtggccatgcggcggcggggcgcgcggcggcggtgcttggccttgcggcggaggagcttggccagttggccttgcggtggcgtggctcagccgggcagcggtaccaggcgcaggcgggctacggcgatgccatgcggcggcggcgcgcccgtgcggtggtgaggtgctgccgcgcgaagacgccgatggcggtgcggcgcgacagaccgggcgccgacgtggtcggtggcagcgcgcggctgcacatgctgcggccaggccagcggccgtgcggcggcgtagacactgtctcgtcgcggccgtggcgcgggttgctgcccggtgcacgccggcacggagcgcttccagtgtgcgtcgccggtgtgatcttgcggccgtggtgtcgcgacgctcgggttcgcggccatggcgcgtcgccggcacgctaa

SEQ ID NO: 96482 - DNA, 219 bp, Oryza sativa
  Clone ID: PAT_MRT4530_94575C.1
atgcgggacccagtctacgactgcgtcagggccatctccttcctgcagaaccaggtgtcacagctgcagatgcagctcgccatcggacagggcgagaacctctgcatccagatgcagcaccgtgatggcaacgagaacgagaagaatggtaggtttgcagcccagtacagagtaaacaggcctaatctagccatcagtcaagatccattaggttcctga

SEQ ID NO: 96483 - DNA, 342 bp, Oryza sativa
  unsure (1)..(342): unsure at all n locations
  Clone ID: PAT_MRT4530_94576C.1
gctaagcacacacagcgcgctcacagtgatcggagatcggacgcgtgggcggacgcgtgggcggacgcgtgggcggggagtacatggcgaaggactactccgacccgccgccggcgccgctgatcgacgcggaggagctgaccaagtggtccctgtaccgcgcggtgatcgccgagttcgtggccacgctgctcttcctctacatcacggtggccacggtcatcgggtacaagcaccagtcggacccgggcgcgaacgcntcaacgtcgcgtgcaggttattccncnttcgcnagatacccntngcancattcggcnanatnatctnaacggcttttggtag

SEQ ID NO: 96484 - DNA, 115 bp, Oryza sativa
  Clone ID: PAT_MRT4530_94577C.1
atggccgatgatgcctatctggagacccaagcaattccaaatgtgccaaagggaggtctcttcaaagtggcaaccgcagcaaatttcttgaaccaacaagcaaggaatcagggag

SEQ ID NO: 96485 - DNA, 1158 bp, Oryza sativa
  Clone ID: PAT_MRT4530_94578C.1
atgcctcgccgcaagaagcatccccggtttcgtggcacccttggaacctacaagtttcgacaggctcttcttggcgaccccgcgaggcacaatcggttcagcgtactcgaagcagaagccaccgacgacgattcgtcgacggagccaagctccaggatgcaagacattgaggacagctgcggcaaccgatcaactcaggacaattcacggagagagctggtgacgatcaaccattacaagacaggccaccctgccatcatgccatcagtctttagcattctgtcttttctctgccctaatctagcaaaaagtatattggttgacttagatgttgttttcgtttcggaaattggaactgcagtgatggaggatgtagggaatatgaaccctttgttgaggacattgctcgagatggtcagcgaggaacaaatttctgagattccgcgtcatggcctagaaaaccttcttttggtagctatctataccacagtgaaatttaacatattgatgatgcttatgctttctttattaccacatggtattggtgaaggaatgggtcttcatctcgttgaagagaataactttctctatggagctttcacttttgtcgtgacttgtccatggattaaaaaagatacaaaattgctttcacgtatacttctccgtttgtcagaaatctggagccaacctgaatgggagacaaatctattggatttttttaacaatgctcagttcaggacgtctgtgtacaatgttgttgctttttttgagaatgagctcaccatgtgcacagcagaaaattatgatggaatcaatcatgagagaaaattaaactattcaactttgactactcttattccactgttatttcccctactcttggagcttcttcagtatgtgcattcactctggacggatgaagttgcttctaacatatcagaagaacttgaaggagctaaatgtattatatgttctgagaagctatgtggtattgttgaagaaactactgaaattcaggacatgaatgaggaagagttgctggtagatgagataagggagtggctagaaaaaatccgccaaactgggattcctatcatccgatgcaaacgaccattggagcaggttatgagtcctttagctgcagccatacaccactaa

SEQ ID NO: 96486 - DNA, 537 bp, Oryza sativa
  Clone ID: PAT_MRT4530_94579C.1
cctcaacacagcatacaatagttcactgcaaaccaaaagaagaaatcacaaacaatccggtccaattctcagcaagaaagaagagatcgatccaatggcgggtgcagcgaaggcgtcttggatggtggcgatgagcgtgggcgcagtggaggcgctcaaggaccagggcggactctgccgctggaactacgcgctgcggtccatccacaaggcggccaaggccaacgccgccggcgtctcgcagggcaagaagctgcctgcctccgcggcggcggtagcggagaggaggagagcggagaaggccgaggaggggttgaggacggtcatgtacatcagctgctggagcaccaattagtatagctctgtctactatagctagctaatagtagtaggatagagtcgggtttggaaggggcaagcatggctgagacttgccggttgcttgttgaattcctcctgattgtatataccacgaagatgatgatgatgaaaacttctgttacttgagtaaaaaaaaaaaaaaaaaaaaaaaaaaaa

SEQ ID NO: 96487 - DNA, 248 bp, Oryza sativa
  Clone ID: PAT_MRT4530_9457C.1
ccggccgggagacgacgaattctaccctcaccaccggagtgacaggagaggagctcacggccaccgaaccgccggattgcgtctctcgccgcgtcgatcctcgtgagaatacgacgatcagaaagccacccacctccgtcgggggttccgttcgcggagatcgactgcacgcgtctcatactcttagggttagcattgccacaggcatggccaaagcatcatcctcgatctcatcatcgtgcagggaa

SEQ ID NO: 96488 - DNA, 438 bp, Oryza sativa
  unsure (1)..(438): unsure at all n locations
  Clone ID: PAT_MRT4530_94580C.1
atggcgggtgcagcgaaggcgtcgtggatggtggcgatgagcgtgggcgcggtggaggcgctcaaggaccaggcggggctctgccgctggaactacgcgctgcggtccatccaccgcgccgccaaggccaacgcgcgcgccggcgtctcgcggggcaagaagctgcctgcctccgcggcggcggtggcggagaggaggagagcggagaaggccgaggaagggttgaggacggtcatcgaagcgtcttggatggtggcgatgagcgtgggcgcagtggaggcgctcaaggaccagggcggactctgccgctggaactacgcgctgcggtccntccacaaggcggccaaggccaacgcgccggcgtctcgcagggcaagaagctgcctgctccgcggcggcgtacggagagagagagcggagaaggccgaggagggttga

SEQ ID NO: 96489 - DNA, 479 bp, Oryza sativa
  unsure (1)..(479): unsure at all n locations
  Clone ID: PAT_MRT4530_94581C.1
gcccactccagaaccactactgccagatgtgccacgtagaacaccacatctcaagaggattcctgtgctgctgaaatataggaccaactataatggatatgtntggtatataactttcttttttcttagtcatgattcaacataaaattgacatatacacgagaaagaactagtaagtgtggatgaagctaatcttcttgatgatgatgggaattctgaagatggaaatgcaccacctggatatggatgatcatgctctttttagtggtgatattggacaacccaatgaagcnaacacgatccatgggataataacctagcttgctgattggaatttttctcatgtttaggagtttttgtcatgaatttgttggctgtgtactccccttgtatgggttaagaccatatacttaccctttgaattttcctgatgcataccttataaactttattaagctgttaaaaaaaaaaaaaaaaaa

SEQ ID NO: 96490 - DNA, 305 bp, Oryza sativa
  unsure (1)..(305): unsure at all n locations
  Clone ID: PAT_MRT4530_94582C.1
ggtggcaaccaaagtcattagatcaagggttaatttgatccatgccactataaatttggctattcagaaaaaatatcattacaattcgtgtgtttgtaacagcgacattgtaattttacaaaattataactgtgcctttgccgtcacttttcccatttttcccctgccttttccattttctccttccttctcccgttttcttcccctttctgccttctctcttcgctccttctccacgggccgaacgacccgaggcgcggtgagttgagagtggcancnatagagggagggaaagggggtcgcgg

SEQ ID NO: 96491 - DNA, 550 bp, Oryza sativa
  Clone ID: PAT_MRT4530_94583C.1
caatcaccaatcacctatcagtagtacttcactgctcgctactagtcccctgaattcagcgatcagtataacagcgggaagctcaagaagagatcgtcgatcgatggcgggtgcagcgaaggcgtcgtggatggtggcgatgagcgtgggcgcggtggaggcgctcaaggaccaggcggggctctgccgctggaactacgcgctgcggtccatccaccgcgccgccaaggccaacgcgcgcgccggcgtctcgcggggcaagaagctgcctgcctccgcggcggcggtggcggagaggaggagagcggagaaggccgaggaagggttgaggacggtcatgtacatcagctgctggagtaccaattagtatagctgtgccttctactcttctactactagctttgctataggagtcaggttggaacttggaagtggcaaccatggctgagacttgccggttgcttgttaatttcctccgggttgtatataccacgatgatgatgatgaaaacttctgttacttgagtaaaaaaaaaaaaaaaaaaaaaaaa

SEQ ID NO: 96492 - DNA, 813 bp, Oryza sativa
  Clone ID: PAT_MRT4530_94584C.1
atggcgggtgcagcgaaggcgtcgtggatggtggcgatgagcgtgggcgccgtggaggcgctcaaggaccagggcggactctgccgctggaactacgcgctgcggtccatccacaaagcagccaaggccaacgccgccggcgtctctcagggcaagaagctgcctgcttctgcggcggcggtggcggagaggaggagagcggagaaggccgaggaggggctgaggacggtcatgtacctcagctgctgggcgaaggcgtcgtggatggtggcgatgagcgtgggcgccgtggaggcgctcaaggaccagggcggactctgccgctggaactacgcgctgcggtccatccacaaggcggccaaggccaacgccgccggcgtctcgcagggcaagaagctgccagcttctgcggcggcggtggcggagaggaggagagcggagaaggccgaggaggggttgaggacagtcatgtacctcagctgctggggtcccaattagctaggccattagtgttagctcggatggatctcgatctgctctgctgggtgtccgtttgacggtagcagccatggccggagacgtaattggccggttgctcccagctgatcgtaatatatcacgatgatgatgaaaaattctgctacttgagtacaattgcttcatgggtcattttgcctttgtgattgtgtcgtctagaacaatttatgaactgaccacttttacggtcatgcacgcaaaaatccggccgtgtcatcaatttaagatccaaactttctgggaaaaaaaaaaaaaaaaaaaaaaaaaaaaaaaaaa

SEQ ID NO: 96493 - DNA, 654 bp, Oryza sativa
  Clone ID: PAT_MRT4530_94585C.1
atgagcgagggcgaggaggaggaggggaggcaggtccaggaggtggtggcgcacgtgtacgacgttgcgagcagcgggtcgtcggaggggggcggcggcggcaccgccatcctccacgtcaaccgcttcttcaaggacgccatcggcctcggcggcatcttccacaccgccatccaggtgtatggagatgaagaatggtcctttggttactgtgaaaatggcaccggggtttttagctgccccccgtgcaaaaaccccatgtacacgtacccttgggtcaatcgcttcgcaaatgctggggatgctgctctagaggtagctgaaaatacagcagaaaagctgaagcaagcaaaaaaggacattgcgggtgcatgcaaagcagccaccacatatttgactggtgcatcttcaagttcaccatcaaatgcagatgactcaggcggttcaacaaatagttctctttttgaggggacatggctcagaagtatcatcggcatcagtatgaaaccatcaaggagtctcatgtgttcggatagttcagatagttcagatgatgaaaaatctgaagatgagagggaatcagattgccaacagcctagcggtgatcaaattgaagaaaaaaaggatgctacacaagagcaagcaggaaagtga

SEQ ID NO: 96494 - DNA, 821 bp, Oryza sativa
  Clone ID: PAT_MRT4530_94586C.1
ggcaggcggcccgccaaattgttcgctaataagcatcgatcgaaggcgaggccagccagccagccggggcgccgggggagctggggaagatggtgcaggggacgctcgaggtgctgctcgtcggagccaagggcctcgagaacaccgactacctgtgcaacatggacccgtacgcggttctcaaatgccgctcgcaggagcagaagagcagcgttgcgtcaggtaaaggatctgaccctgaatggaacgaaacctttatgttcagcgtcactcacaacgctacagagctcatcatcaagttgatggacagtgacagtggcacggatgatgattttgttggagaagcaacgatttctttggaagcaatctatacagaaggaagcatacccccaactgtttataatgttgtgaaagaagaagaataccgtggagaaatcaaagtgggcctgacgttcactccagaggatgatcgcgatcggggtttatctgaggaagacattggtggatggaagcagtcatcttgaggaagaagcagatactttgatgtcgcactgcatcgctatggtaagtcgtgtgctggaagcctggaacaaagcctattgaaaagagcagtcttgtagaaatacttctcatgattttctaaaagttgtaataatagtgttcgccaatatgctctatatgtaaggaccttgctttgatgcccactaaactgtaataactatggcaagttatgatgcaacagaagtgctataatcctttaaaaaatcgtaaaaaaaaaaaaaaaaaaaaaaaaaaataaaaaaaaaactcaaaaaaaaaaa

SEQ ID NO: 96495 - DNA, 463 bp, Oryza sativa
  Clone ID: PAT_MRT4530_94587C.1
tcggtcgaagcaatggcgacctcgtcgccacggggggcttgcgctgctcctctgcgtgcgccgccgcctcctccccgctccgccccgcgcgccctcccccgcggcgccacctcgcctgcgcctgcccctccgccgctcgccgccccccgcgcgcgccaagttcggcaagttcgaggcctccgacgccgcccccacggaggcctccgccgaggaggcggaatcagcggcggcagcgggtgatggggcggcggaacagaaagcggaggaggacgacagctgcttgccgtcggacttggagggcgcgatatggcaatcggggaaagcgagcgccgatttcgcaactctggtggcatgcgaaccattgcagagctactgatccctcaggtggaattcctcaacgaggaaagagcacaagctgaggtctgggcactgtcaaggatattcctggacacacttggaaaaa

SEQ ID NO: 96496 - DNA, 1017 bp, Oryza sativa
  Clone ID: PAT_MRT4530_94588C.1
atggcgacctcgtcgccgccgtgcgcttgcgctgctcctctcctccgccgccgcctcctccccgctccgccccgcgcgccctcccccgcggcgccacctcgcctgcgcctgcccctccgccgctcgccgccccccgcgcgcgccaagttcggcaagttcgaggcctccgacgccgcccccacggaggcctccgccgaggaggcggaatcggcggcggcggcgggtgatggggcggcggaacagaaagcggaggaggacgacaggtcagggtcactcccacctcttgccgagctcgtgaacaatcgtcgcatcgtgatgcgtctctgcttgccgtcggacttggagggcgcgatatggcaatcggggaaggcgagcgccgatttcgtcaactctggtggcatgcgagccattgcagagctactgatccctcagttggaattcctcaacgaggaaggagcacaggctgaggtctgggcactgtcaaggatattcctggacacacttgtaaaagagacaggccagaaagttaaggccatttttcctgatgctggagcagcggcccttcttaagtatcagtggacagatgcagagtttaagtgcgccagcttaagtgaccggaaaccagttgacgttgaagatgaagttgttgttatgattatccctgatcatcagatggtggaatctgttgaacggattgcatctcaactctctgatgatcctataagacctcttgtcatgtggaatccacgccttgttagtggagatgttggagttggctttaatgttcgaaatctgcgccggaatttcctaagaaagtggaaagtattctatgatgacccaaagaggcctaaccggtatttgcttgcccgagaacttgtaagccgacctgatgcaacagacattgagataatatttggaggcggcgatgaacaatctgacgaggcaccatcattgatgaacaatgtaatgggcgtatttagttccgtgagccggtttatgagagtaatctccaagtga

SEQ ID NO: 96497 - DNA, 382 bp, Oryza sativa
  Clone ID: PAT_MRT4530_94589C.1
agtgccctcctggtgtttcgagagaccaccccgggttgccgagttccttacgacaatctgtaatggctgtccaaccggggctaaatacggaaaagtaccctccccaggaatttgtcttaggaatatatactatcatggaggaatacctgtactgagctgtcaccattagcgacccacctcgactgacccgtagcatatatgctcagatagggatacttaataatctagataccacgtctacattattaaatactactctatatcccccgagatgacatagagcaaccgagcaatcggacactaaacccacaccattgcacctctctgatagactagctacacaactatattgatacaagtataaaatgaagtcggtactcag

SEQ ID NO: 96498 - DNA, 760 bp, Oryza sativa
  Clone ID: PAT_MRT4530_9458C.1
atggagtaccaggggcagcatggtggccacgccagcagccgcgccgacgagcacggcaaccctgcagtgaccaccggaaacgcacccaccgggatgggcgccggccacatccaggagccggcgagggaggacaagaagaccgacggcgtcctccgccgctccggcagctccagctccagctcatcctctgaggacgatgggatgggaggaaggaggaagaaggggatcaaggagaagatcaaggagaagctccccggcggcaacaagggcaacaaccagcagcagcagcaggagcacaccacaacaacgaccggcggcgcgtacgggccgcagggccacgacaccaagatcgccaccggcgcacacggcggcaccgccgccaccaccgcggacgccggcggcgagaagaagggcatcgtggacaagatcaaggagaagctccccggccagcactgagctgctgcatgccatgtgtgtgatcggtgtttcgatccgacgatcgacttcgatcacaaacaacgaaggatctccctcctgaagaataataatattgtgtgtccttgtatatctgtgtgtaagcttcgggtaaacaataaagtcgtgatgcagccacggcatgtgtgcgtacgtgtacgtagcactgtatgtaagtgcgcgtgtggtatatggcgtgttggttaattttcgtatattatttggctcaaattatatattttaaacatctatgtgaaatctgcttatcgtgaaaaaaaaaaagctt

SEQ ID NO: 96499 - DNA, 339 bp, Oryza sativa
  Clone ID: PAT_MRT4530_94590C.1
gcacgagggggagccgtcgcccatcaggttctcctcgtgggcgtgagctttcattcgcatgtggtgtaccggtgtggtgtagccacagtcggagtgggtgatctccgagatagggtctgtttggttgtctgcggattgagaatgtgcatactgcagctggttgaatccgtcagataccagagcgacatgcgtgtttcagtgtttgtcttgcctttagggtttagcggttgatactgatgaaatgagagtctgatcctagagatagcatggcctgcaggaggtcatttgtagcgggttggacaccacgggcagtggacgagctgttagctttttgcaaac

SEQ ID NO: 96500 - DNA, 1011 bp, Oryza sativa
  Clone ID: PAT_MRT4530_94591C.1
atgactcttgccaacattcctgagataatggaatctcttcccgtagagacgaggttcacagagtttcccttgcgacaatatggtggattttggttattggaggtcatgctcaatggcgttgctgcagctgaaactagctttcaaccgagaccatccgacatcctcctttcaagctttcctaagtgtggtaccacctggctcaaagccctcgcctttgcaaccctgaaccgttcgacttacccaccatcggatgaacatcacccgctcctcgaacacaacccccatgaccttgttgggtttcttgagatttaccccaagctcgagttgtacgagtcactcccatctccacggctgctctcaacccacctgccatattcgatgctgcctcatcgcatcagggaacaagaaacggggtgtcggctagtctacatctaccgggacccaaaggatgccatggtctccatgtggcaccagaacaagaaggagaagaagaataggttgacgttcgaggagatgttcgacatgttctgtgaaggacggtgtgttgtcggcccgcagtggtgccatgccggtgagtactgggatgagagccaggcgagacctgagaaggtgcttttcctcatgtatgaggatcttctgcaagatactgtgggcaacctaaggacgctggcggagttcatgggctgtgggttctctcgccaggaagaagatgacggtatcgtgcaacaaattgtagaactgtgcagcttgaacaacctgaagaacttgaacgtgaacaagagtggaactacccttctagggatctccaaagatggcttcttcaggaagggaggaaccggtgactggagcaatcacatgtcaccagagatggcagcgaggctggacaagatcgttaaggagaggctggagggttctggacatccaattatttccaggatcaatgcgaaagcaacaacttcgatcggttcatccaaccatggtgcttctgaagccaaatacattaaggagtaa

SEQ ID NO: 96501 - DNA, 404 bp, Oryza sativa
  Clone ID: PAT_MRT4530_94592C.1
tttttgttccatatgctggcgaccgtcggcggggggatcgtggtgagccaggggcttttccgttcggtgaagcacggggacagtacgatcgaggcgatcaacctgtacacgggggggacggagaacgttgcgcaccactaatgtaccccatacttcgagatgagccgacacgacgtgatcaagcccatcctgctagaggacgaccagatataccacctggtctgccccgtttaccccgtacactacaagtacaaccctgttcagacactctagaccaatgtggttggtactctcaacatgctcggatttgcctataggatcaatgcccggtccctacttaccaacaccagtcaggtctacagagataccctgcaccatcctgaagtggatacttaccgtggcaa

SEQ ID NO: 96502 - DNA, 228 bp, Oryza sativa
  Clone ID: PAT_MRT4530_94593C.1
atggttcaaccggcagtcagaccggtggtgtgcaggcggtcagaccagcagcaatccagcaatgtaaccgagctcagcgatgccagatctggcatgggggaacacggcaatggcgggtatggcagtggggagctcaacgacgacgaatccaccgtcgctggcctcaggagctgtaaggcctcggcggcgacggacagtagtgatgaggacgatggcagcggcaattga

SEQ ID NO: 96503 - DNA, 2427 bp, Oryza sativa
  Clone ID: PAT_MRT4530_94594C.1
agaagagctatgacgtcgcatgccgcgtacgtaagcttggatcctctagagcggccgcctttttttcggtttgtttacaaacgatatactttcttcaggttatcaagttatctagtgcagaatacatgcaacatcgtccaaaatgcagttcacgcaatgcagcgcaatccagttcatcaaaggcacgtaccacttttgatagcaatatccacctctaatttcagttattgccatttctgcaagcgtagtacaataggaaagcttgctgaagtcatccagatatattggcctggtcgacttcttttccactagaaagtagcagtactctagtgcaaactccacagaacacagggtactactctgatggaacgagtagatattgtatatttcctcgtgtatgttgacagtgagaactgtcttctccaaaataacagcaacaaaaataaccccatgcatcattacaatccacatatcaaagcttgaactttatacaagcacacggtcaccacaagtaactgtattctgccgtattacctcagaaagcagatcaccctaatgcatttcaatctcctgcacaggaatatctgtgtggtcagagcgacgagtatcagatgttccagatgagctcgctatctcagatttgcacaatgggcaaagtgcattaatcttcagccatttatcaacacattccttgtggaaacaatgtgtgcagggaagttcacgaagctcatcattgtgtgcatactttgcaagacagatgcaacaaacagcatcctcagcagatagtgaccgctccttgtcagtccctgcagctactatcccaccatcttggccttcagcttcatttcctgaactatgacggcgtttcttggttttgaatttgtatgttggaagagaattgatggattctgaggtagcccctcttgtattgtttgtatcttctctaaatcccataacagatatgatgcagggcaggcagcagcatatcattgcacagaggatgaaaggcatggcatacccaatacaactaaaggtaaggaacacaatacataacctgtacaagtttggagcatcggcagcagaagaacgcccgccaaatatccacacatttcctacgacaaaccacacagcaaagaaacaatccaaggccatcttgaagtggtcaaaaagagcattaatccttggattagcgagcactgcatttcgtgcagcattccttcgacgctctgatgcactagcagaaggctcagttgaattgttctgagaggagccttgaagtgtatgtgctggctcattttcaccattgacaatattgcggtgtatatagcgccaataaagatggggtagtgtagcaaaacaaccaactgtataacctatgacccactcaaataatggagcttgcggatgttcctttcttgaaagagaaagcacaacaatagcagctacaatttggctcacattgacaagaacttctattgaaatccagagtccagaattcaaagggcttctgtgccggcgaacatagttatcacttcttctagcacctgaagtatgtcctgcactaggtgcaccaactgctgatggtgcctgcaaagcaggtactagcgctctggttgcagatctatcaacaggatttggttctccatggttttctctagcaacactatgggaagtcgaagtagatggaccactgtcccttggaatatcaattatgtgctcatggccactaacacctgtagtttgttccatcctcgaagcatgcatatcggtatgaccgtgaatttcaagtaacgttgaaggctgaggtcatcaattcttagatgcaacaaagaaagaagcaagctgctaaatttctgagacctccagttttctcaaaactgagtgcaggaattatctacgattctacgcttcagcagagacttccagcttcaagtgaacacttagatttatatcacaaagagagctattcacggacttagagcaacaccgtggagggtagatcggtggcccgacagctgagattccccctaggcacgactcccaactccgccggatgggagggtacccgcgcccgtggcagaggacacggcgagcgggaggcagtggcgacgagggagccgcgcgcatgggcggcgcacaaccctaaccttaccgagtcgtcgccagatgcacagagaggagggtagctcgcgctcgcgcgcgcgcgcgaggcgcgacgcgggagcggcgcccgcacggtagacgacggcgcggccgaggcgcgccgagctccgctgcctgcgccgcggcggcgacggcggcggcggcggcgaggtgaggtgggcggagaagcggagaggccgagagggagagagagggttggggggtggggttggttggtgacgaggtgagcaacgaaggggtcttcaccccccacgcgtccacaga

SEQ ID NO: 96504 - DNA, 730 bp, Oryza sativa
  Clone ID: PAT_MRT4530_94595C.1
ctggtgatgatgtttgatcaaccacaacttttcaaaccttttctcagaaagtgtgtaatgcgagaaaacattgatactagaagtgttagggaggtttgtgttcaaagtgggttcctggccacaaggagcattgagaggttacagttcgttgatgataatgaacacatcctccgtgtgaagtttattggtagcgatcatatgctagaggccttcgacatgcatattgttgagtgaatgggagcaaataaggaaatatgcaactttaggggcaaaaataatgattttatcatttttttttcaaaatttgcacatattttcaaagatctttatttgtaatggtattgacggttgatctttttttttgggttattacaccaaaactactcatctaccttgactgtccactttgaggtcaacaacgtctagccaggggactgtccactttgaggtcatcaacatctagccagggacagtagttattgagttatttgtggtggaccattccagaggggaacaccaaagatgacatatgatatttagtcaagaacttgtttaggtgtaacctaaggactctcgttgatgtgtctgaggagagccttgctggttattgacctcacttgccctcttttgctgatggtcagaataatcgagatatggaattgttagaacttgtaaaaactctaagaaacaatggaactcctttatcggcactgattactaaagcttcttg

SEQ ID NO: 96505 - DNA, 1896 bp, Oryza sativa
  Clone ID: PAT_MRT4530_94596C.1
atgcctgcgagccctcgagctcttgccgccactgtcgggctcgagctcgacaaggtagccgtcgggagctcgacggagaagaaggcagccgtagtcacggcctggctcagtctcccttcccgccgccccacgcccttgccggagccattcctccatcgccgccgaagagaggggcaccaccggggagaaccacgcctcactgacggccagatccgccggtctcgcttctcgctggtcgtcggcaccggatccgcgccgcgacgcctcgccaccggagtgatggatgtcgagctccgcctagttgccaacgttggatctggccttctcgccagttgtcggcgccgcatccaaccttactgccggatccgcgacgcgacacctcgctggcggcgtgtgcgcatgccacaggaaggtgaggacattgatgcgatgcccatcgtccgtgccttcgattcgatgagcgtctccgatgacccgaagcacgtcggcgtcgggaagccggatgtggatgtgccgaacgacccaatgtcggacaagggggtgacgatctctggtgtggtgaagcggcggaaggaggacgtggcgcagggcgtgccgacggtggcggcggcgccgggcgacatgatggcgaaggccgagacaagcggggcgacggccggcgagagcggcggcggcagcgggcgagcacggcgcacggcggcggcaggcgaagcaggcatgagcggcgggggggcggcgggggagaacggcggcggccgcgcatgcccactgtggtcctccgtgtccacctcgtcgtcctccgtggtcgcgctactggccgcgtcgttgaggtggctgctcgtcgcggtggtcttgttcacgtggctcccgttgatgtgccctgtccaggactgcagccaaccatcccgctccctcccccacgccgccgcctacgccgctgcggccatggcgctcctcgccgcggcgtactacctcctcccggactaccaggtgctcgcgtccatcgtcgtctggatcgcgtcctccctcctccgccaccagcggcgacatctccgtcggccgcagggatcccctcccggagcaggagcccgtcgaggaacccgtcccggatcccgccccacctcccgccgcggtcgcccgctgcccgccgccgctctcgccggccgtcgctccgcctgtctcgacccgtcgaagaagacaagagaagagaagaaaggggaagaaagaagggatgtggggctcgcatcgttttctctcacttacatagctctcgaggaggaggaggaaggaatcatcaaggcaaccgatcaaatcgtcgatcgattttccatggcgcggcggggcacggaggcgttcccggacctgggggcgcagtgcgacagggaggactgcaaccagctcgacttcctccccttcgactgcgacggctgcggcaagacgttctgcgcggagcaccggacgtaccgggaccacggctgcgcgcgcgccgcggaccagggccgcaccgtcgtcgtctgcgaggcctgcggcgacgccatcgagcggcgggccggggacgggggcggggacgacgccgccgtgctgaaggcgcacgcgcggtcgcggcggtgcgacccggcgaggaagcgcaagccgcggtgccccgtgccgcggtgcaaggagacgctcacgttctccaacacgagcgggtgcaaggggtgcggccagaaggtgtgcctcaagcaccggttccccgccgaccacgcgtgcgccggcgcaggcgccggcgcggcgtcgaaggccgccggcgccgcggccgccgcgaggagcgccgggcagtgcgggcgcgacgcgcagaagaaggagggcggcgggtggaagctgccgcaatcggtgaggaacatgaagattttctga

SEQ ID NO: 96506 - DNA, 952 bp, Oryza sativa
  Clone ID: PAT_MRT4530_94597C.1
cacggccctgcaggtgagccggccggcgagctcgccccggtcgtcgtcaccgaggtggatcatgcctgcgagccctcgagcttttgccgccactgtcgggctcgagctcgacaaggtagccgtcgggggggggggggagaaaaaggcatccgtagtcacggcctggctaagtctcccttcccgccgccccacgcccttgccggagccattcctccatcgccgccgaagagaggggcaccaccggggagaaccacgcctcactgacggccagatccgccggtctcgcttttcgctggtcgtcggcaccggatccgcgccgcgacgcctcgccaccggagtgatggatgtcgagctccgcctagttgccaacgttggatctggccttctcgccagttgtcggcgccgcatccaaccttactgccggatccgcgacgcgacacctcgctggcggcgtggtggcagggagaagggcggcgacagcactggcgggagcagcagcaacagcagcagcgaggaggatgaacgcgatgtggcagcgcataggatgagtgacatgaaccagtgcgcatgccacaggaaggtgaggacattgatgcgatgcccatcgtccgtgccttcgattcgatgagcgtctccgatgacccgaagcacgtcggcgtcgggaagccggatgtggatgtgccgaacgacccaatgtcggtgtcgggaccgtcgtggctggcaaggtgcagctggtgatgcagtccatcggcaccgtgatcccaggcgtcggcggcagcttgcaatcatagggcgccgcgcaggacacggacgcctccaccacccttgccttcggcgagccgacgattgggcagtagcaggacaagggggtgacgatctctggtgtggtgaagcggcggaaggaggacgtggcgcagggcgtgccgacggtggcggcggcgccgggcgacat

SEQ ID NO: 96507 - DNA, 262 bp, Oryza sativa
  unsure (1)..(262): unsure at all n locations
  Clone ID: PAT_MRT4530_94598C.1
ggcgacngtggcggcggaggctggtgagggcgacgacggctgaggcagccgctgcggtggctggcgatggtggcgacggctgaggcagccgtggtggcggcaacggctgaggcagctgcgacacgaggtggcggcggcggttgaggcagccgcagctgtggtggtggctacacgcantccgaccgtggatnanggggaagaggcacggcggcctcggacggctanctgagggcgtggtanacggctgcatctggccggcgca

SEQ ID NO: 96508 - DNA, 124 bp, Oryza sativa
  Clone ID: PAT_MRT4530_94599C.1
ccacagccgttgttgagttgttcgctcgttcgttcgaacgaggtgttccccgtgtttcgttcattcatccgtgtggagtcgtcctttagtttagagccgtcagagctgccggctccgttcgccg

SEQ ID NO: 96509 - DNA, 502 bp, Oryza sativa
  Clone ID: PAT_MRT4530_9459C.1
agcgcttacacaacagattatttggatttctctagcatcttttacgtccagccaggaacctccttgttcaccagcctccatgttcgactctattaatacacttggttgactgaaccacacacccccaccgctggttacagtcacactcacaccagcttgcgccatgacactggaaggaacatacactcacatacaatgtgtgcaggatggagcatactcaatgaactcgtataccgtctcgtccaaagcaggtgctggagtctcaccaacttctaggagtcacagactacaggcatgagcagcgctatgggtaccagttgcacgagaatatcgcctgagagcagggaattcttagcgtgcggtcaaaaagcacaggtgacgcaggcatggtagccgggaatttctagtactgcagggctgatcccaccttctctggtccagagtgggaacatctgagacaccattagccaacttattggacacaacgatacctggtgagaac

SEQ ID NO: 96510 - DNA, 246 bp, Oryza sativa
  Clone ID: PAT_MRT4530_945C.1
atggagtggcgacacggcggcgaggtggcgagcagaggagcggcgcgggcggaggagcggcggcacggcggcggggttgctgacagtcgccgggcggaggagcggcggcgcgggttgcgggaggcggcggccaaagcagtggcggcgacgtcatggaggatgaacagcagtgattcgacgtatagagatagagagatgaaggcccaaagcagttacggcagcgttatagaggatgagcagcagtaa

SEQ ID NO: 96511 - DNA, 384 bp, Oryza sativa
  Clone ID: PAT_MRT4530_94600C.1
atggtgtcaggagtagcaagagaaacgacgatggttggtctgcaccagacgacacaggaagaacggagtccacaacagcagcggggtggaagcgacgccagagtcttcgaggtggatgcgacgacgggatgcgccggccttgatgcgacggcggccacagcgggctcgatgcgatggcagcggctgtggtgggctcgatgcgacggctgccgctgtgacctcgatgcgacgggatgccccggcctcgatgcgacgcgcggccgcggcggcctcgatgcgacgtcggctgcggcggcctcgatgagacatcggccgtggcggactagctgcgatgcgacggcggccgcggcgaattcgatgtggcacggaggtgctattggctga

SEQ ID NO: 96512 - DNA, 276 bp, Oryza sativa
  Clone ID: PAT_MRT4530_94601C.1
atgccatacctcggccaaccgggcactccgcggatccgaaatcctcacgtttctccgatgggtgtaaatgatcacggtaggtctagtaatcaaacaagccggtcccatgatacggcatgtgtccttaacgacccagacggagctactgcatcaggggaaacatacctcccatcatcgccctaccacccgttcaagtcaatcatatttcatcaaccattatttaatatcatcagactcaatctcaggttcttgctccacgtactccgaaacatctga

SEQ ID NO: 96513 - DNA, 241 bp, Oryza sativa
  Clone ID: PAT_MRT4530_94602C.1
cttatataggggttggtcttgccttatacaggccctcctccacatccaactcggggtagaatccaaaggaaacccgaaacatgcattcccgagcaaggaaacttcgagacccgacgaaacagggttggactcggacccgccggtcagaccggccacacaccaccggtctgaccggcctacaaccggcggtctgacctcccaacacatggcggtcagaccggcgatgtgtgagtggttcata

SEQ ID NO: 96514 - DNA, 121 bp, Oryza sativa
  Clone ID: PAT_MRT4530_94603C.1
attgccatgtctgaagacaaaaggattcggaatctagcacaatgttatatcgacctttgggtagcggggcatttaaacaccagatgtatattaccttctcgtgaaaaatttcattgtcgat

SEQ ID NO: 96515 - DNA, 299 bp, Oryza sativa
  Clone ID: PAT_MRT4530_94604C.1
atggccggcggcgcgagcctcctgcacgcggtggcggcgctgatgagcacgtgcacgcgccggctgcagcgcgcggcgaggcgggtgtcgtccgccgccgcgggggcggggaagcagggggcgtcgtcccgcgccgtggtgccgtggaggaaggcgctgtcgctgcccgccgcggcgacggcgaaggtgaaggcggcccccgctgctgccaggcgggaggagggggactccgatgggctgtggcggatggaggccctaggggtgggcggtgccttcgcttgggcgggggcaatgggtgg

SEQ ID NO: 96516 - DNA, 688 bp, Oryza sativa
  Clone ID: PAT_MRT4530_94605C.1
ggcattttggcgaagacacctggttgaggatgatatgcaattttctcacttttacggggtgggtgggctaaaaagtggagccacgctgacacgcacgcgccgttcgccgccggcatcttcccggcgatctgctccggctccggtgggcacctcctcgacggaggctagcggagtagtggaggagggcgtggtgagggtcgggaggcagggatggagttggacggggagacgaggtgtagcaccggcgctgaggtttgatgtgtctctggcgatttgctgtttttcgtgttcttatcagaatacatgagcttatctctgaagagattgcaaagggcaatattaagtccgaaatccaaattaaagaaccacgagtgcacagaagattgaatcccatgattgattatctcattatcaactgtcgtcttctggtggagcctatgatgattaaccatctggaattaatgcataccacataccagtctttcaatggtgaaattgagcaagggatctgctgcaaactttcctgatttagtggggttttacctgaaaagacatgatcagcctaccattgctttcatctactccaatgcattgttcttgcaaagggaatatagccttttttagctcacgaacatgtgagcacacagccacacaacacggaggatgcagatgtttagggaggagaaaa

SEQ ID NO: 96517 - DNA, 219 bp, Oryza sativa
  Clone ID: PAT_MRT4530_94606C.1
aaaaaaaaaaaaaaaaaaaaaaaaaaaaaaaaaaaaaaaaaaaaaaaaaaaaaaaaaaaaaaaaaaaaaaaaaaaaaaaaaaaaaaaggggggggccgttttaagaggaatccaagctttacttaacgcgtgctatgcaacgtaataagcttttggtttggttgtcacctcaaattcaattcacttggccgtcggttttgcggacggtcttaactggtt

SEQ ID NO: 96518 - DNA, 700 bp, Oryza sativa
  Clone ID: PAT_MRT4530_94607C.1
agtaaattaatatcattacgatttttgccataaataaattattttttcaaaatatttgcaaaattgttatattctagtatcatagtagtactatgtaaaacgtcatgttcacgattccacaaaatttactccctccatcatgaaatacatgacgtcgttgacttttcgcataacgtttgaccatccatcttattatataaatattgtttattttgttgtgacttgttttatcgtcaaatgaactataatatttacttatatttatactaaatttttaaataaaatgaatgatcaaacgttatgcaaaaagataacggcgtcatacattttgggatgtaaggagtgtatgttttaccccacacaccgcaatgcaagctccttatttatatacaaactatgttttctacaatagtcaagatttagagccagaccattgtttcattaaaaaaagttagagccatgccatttagtagggaaaatggttttatctctcgaggggatatctccgcctttttcatgccattcaaatagcccactaaaaaggtgaaaaatataataagatagatgaatagaaatatgtcactttataaacatacaagtctatatatcctagtaagcaaatttttacatttcagtgaacaagttgtttgtaagcatcatcaaacaaagttgccctcctcgagaaaaaaaaaaaaaaaaa

SEQ ID NO: 96519 - DNA, 388 bp, Oryza sativa
  Clone ID: PAT_MRT4530_94608C.1
ctctgatgtagtaactctaatacttaagttatcaacctcaagtagtttaatagcaaatcaccttttgcaattatatggatcaaaaatggatgaaaacttccctatgttgtggaaagcacaggcagagccgaaggatcgtttcttcggtgtgcttgtactacatcaaagagaatttaccgcggagaacttgcacataaggcattggtcgtgtaactggatatgctccctatgttcatagccttttgaaaatacctaccaccttttcaggaactgtgatttcacaaagaaggtttggtatctggtttacgattgtaaattttttaaccaagctgggacataagccttgattcaaccatgtctcctttggttatcaatcgtgtgctatcca

SEQ ID NO: 96520 - DNA, 295 bp, Oryza sativa
  Clone ID: PAT_MRT4530_94609C.1
gcacgaaatgtccgggtatgcccacaatggaggaaataggccatgggaaaaggaacaccgaaggtccttcaactgggcattgagtgacaaaatcgcccaccaaccgcaaaacctggtatacatggtccattaactaacaaaaaccagtcacagtgggtccgttgggggttttgaccccggttttatcctacgtggcagctgaatcagtgcgggagccacgggggacctacatgtcaggctgacacatcagccaaggctgtctctatctatcctgtgccctattttctgccttact

SEQ ID NO: 96521 - DNA, 279 bp, Oryza sativa
  Clone ID: PAT_MRT4530_9460C.1
aatgagttaacacagagctttccatacgggtggtcagagccaaatgcagctgtcctcagtctgtccttaaaatagctgaccttacgagtccccagcctacaccatttaggctaaattccttaaggagttaatgggctcatatgcacagacccgatctaattgaactgttgtaaaaagtgccaccacacctgtcttaaacctctttgaggccacctgggcacaaccagaggcaacgggttaaattaacccatgccgaaattaattaaacatggatcaagg

SEQ ID NO: 96522 - DNA, 582 bp, Oryza sativa
  unsure (1)..(582): unsure at all n locations
  Clone ID: PAT_MRT4530_94610C.1
atggagaacgtcctcctcatcggccaagtcaccggcggcggcttcgacgactacttcggccggcggctcgccgtggcgccgccgccaccgcctcgtagaagcatccagggcagcttcacttttgctgctccatctcctcctccgtttcagtacacgacttacgaggcggcgtcgctgtactcctcgctctctctcccactacacctgccttacacctactacgcggcggcggnggnggngccnggtncggcgacggcgacgcgtctnctgcctcgcatgctgccgcctctgccgccgtcagccacggttgtgaggaggaggattaagaagccgaggacgccgaggtcgggggaggggcaggcaagggcgccgcagcggaggagcccgctggagaggccggcgccgctcccgccgccggcggcggtggcggaggcgctcgacgacctggagcgggaggtgacgcgggggttcgtggaggacctcctgcacgcgctggcgccgccgcccagcagcctgccgctgcccaccttctccctcgtcagggccgccgccgcaaaggccgccgcctcctgcgccgtgtag

SEQ ID NO: 96523 - DNA, 778 bp, Oryza sativa
  Clone ID: PAT_MRT4530_94611C.1
gcacgagcggggtagctaagttagcagtagtagtagtaacttgtatggcaatgcctatgtgcggcggcggcggcggcacgggcttacggcgttgccactcctcccggcggctacgtctcgtttgcgtgtgctgccatggcgacgacgcgcaccggcgcgaggagagcggccgccgccgtcgtcgtcctcagccacgcgtcggggggtggtggtggccgtggcccgcggggcggcggcgagcgggaggaggagcccaccgacgcgtcgtcgtcgtggttggttgacgaggacatggccacgctgcggcggcgcatccgcgaggcgagggaggcggaggaggaggagggctatggcggcggtggcggcggtgggctcccggcggagtggacggagctggagcggcggcaccacgggagctacgtcgccggcgtccgcggcgcggtcggcctcctccaggcgctcctggtgagcgcgcggccgggcctcggcgccggcctcctcgcgctgctgctgctcggcgtcccggcctccgtgctcctcgtgtccgcgcagctgctcgccgtcgcctccgcggtgctctccggtacatgatcgcgtcgcgtgtgcgctttgcgcttgcttgctttggaaaatagtacagtatagggtctaattcgtgaaatttacctgtcacagtccaatcagaaactgcatatgccacctgaagctagcgtagcttgttagattcactgtggtggaatcccgggttcacattatagatttgtcacggacgctcgca

SEQ ID NO: 96524 - DNA, 621 bp, Oryza sativa
  Clone ID: PAT_MRT4530_94612C.1
atgcttaagatgaaagtccgcccctgccgcgccgctcaggtgtgggccggccgcgccgtctcctccctcggcgtcgccgcgtcgacctccaccccggcctgccctctgattcgtccggagaccgcgtcgtcaagcattgcgccggcctctccatcctcgtcgtcgccggcgtcccttcggccgccccttcctcctccccggctcgtcggctcgctgcgccaccaccacctccggcatcatagcggcaaggtcgccctcggcctcgcctcccctccacccgaacaccgccggtgttcgtcgtcgtcgtcatcattcgtcctcgccggctcgtcgtctcgcggcgccgcctccgtcgtcggattcgcagcggcgcgttccccgtcgtccccgtctccatgcagctgccgccggctgccctcgtcgtctcctcgccggccccgcagccccatcgtcgtcttcgtcctcggctccgcgtcgtcaagcctcgtgccggccgcgtctcgcctttgtccaaggatcgccaccgaagtcgtcccctcgccgttcgtctccgtcgttcccggccgcctccgccgcgcccgttcgtcgttgtcgttccctcgcctcgtcgtgtggtggtaa

SEQ ID NO: 96525 - DNA, 942 bp, Oryza sativa
  Clone ID: PAT_MRT4530_94613C.1
atggccgccttccatggccgccgggcgccttttccgccgccgttccccgctcctcccgtggccggctccctccccacgcctataaaatggaatccccatccttcgttctatcgttttagccccttcccgagcctccccgtggtcgtatcacctctccccgccttctccttctctctctccgacgccggccggcctccagccgcctctccctcctcgcccgagcgccgtccggtcgcgccatcgccgccctcggcctcgcagccgcctcctctcccccgccgcccctgccgcgccgctcaggtgcgggccggctgcgccgtctcctccctcggcgtcgccgcgtcgacctccaccccggcctgccctcggtttcaccggaacgccgtcgtccgcgtcggtctcgccctccgcctcgccggagttcctccggcagccccgtccgccgtgcctgtgcgccggccgacgtcgccatctccacccccggcattgcagcagcaaggtcgccctcgccctcgccctcgccctcgcctcccctccacccgaacgccgccggtgtccgtcgtcgtcttcaccgttcatcctcgccggctcgtcgtctcgcggcgccgcctccgtcgtcggcatcgcagcggcatgttcctcgccatcctcgcctccgtgcagccgctgccggctgccctcgtcgtctcctcgccggccccggtcgtcgtcgtcgtcgtcctcccgtcgttcccggtcgtcgtggcccccgtcatcgtcttcgtcctcggctccgcgtcgtcaagcctcgtgccggccgcgtctcgcctttgtccaaggatcgccgccgaagtcatcccctcgccgttcgtccccgcgggcccgcccgccaccctcgctgacgggtgggacccacctgtcatcgcctacctcccgccgcgccgccgccagcccgtgccctag

SEQ ID NO: 96526 - DNA, 327 bp, Oryza sativa
  Clone ID: PAT_MRT4530_94614C.1
atgggagtcagcttcgacgaggatttggccgccgccgccgccaccaagattggcgcctccgtcgtgccatccccgttcgccgccgctagctgctttgccgaggcgtgcggcggtgccgacgacgggcgccgggctgagaagggtgtggagccgaggaatccgggcggctgcgacccgcagcgccggtgggttggcgagacgacgctggtgacgaggagagcacgagtcagggacgcggaccggtggttcgacgcctcctccgagttcgacgccgccgtgccgcacagcatcgatgctgcgccgggaggacagcagcggtggcgctag

SEQ ID NO: 96527 - DNA, 347 bp, Oryza sativa
  Clone ID: PAT_MRT4530_94615C.1
caatgatgaggatgacgacgagggcagcgaagaggatgaagacgatgacgagtgagccttccagtggacaagatgggagcagcaagacgctaagggcggcgggcgtcctaaggagcctatccatcatcatcatcgtctactagaattattcagtttcacttcacatcgtgatgttactttttctctcgtctaacgataggctcttgtgcgcactgtggtttggggagcaagttgtcacgagacgtgctatatttatgatgtctggtattagtgggtataaaaaaaaggcttagtcagtacccgtcagtattttggactatatatgcctacacgacgaactgtcatat

SEQ ID NO: 96528 - DNA, 317 bp, Oryza sativa
  Clone ID: PAT_MRT4530_94616C.1
gggttagcggagcacattttcatcttttcatctgatattccgtcaactgggtatgctaacttcatatactcccaaatacagcccaacaacaacttcctgatatctggtgaaatacgaatgccccttgagtagtggtattcgtattccatccactcttcctccgatgcaagctttttcactagcgagctgatcaacatccagctgctcctgtcacgagggcactcctgaaacaagttgtactgccctatggggacctgaccacatcctatagctgcaggttggcccctttccaaaaagctggcatggatccagagaaa

SEQ ID NO: 96529 - DNA, 588 bp, Oryza sativa
  Clone ID: PAT_MRT4530_94617C.1
atggcgccagcgccggcgacgttgcccaacgcggcggcgaggcggcctcacgcgctgctcgtcccgttcccgtcctccggcttcataaaccccatgttccacttcgcgcggctgctgcgctcggccggcttcgtggtcaccttcgtgaacaccgagcgcaaccacgcgctcatgctgtcgcgggggcgcaagcgcgacggcgacggcatccggtacgaggcgatcccggacggcctctcgccgccggagcgcggcgcgcaggacgactacggcttcggcctcctgcacgccgtgcgcgccaacggcccggggcacctcagggagctcatcgcgcgcctcaacaccggccgcggtggcggcgccggtgactcgccgccgccgcccgtcacgtgcgtggtggcgtccgagctgatgagcttcgcgctcgacgtggccgccgagctgggcgtcgccgcctacatgctgtggggcaccagcgcgtgcggcctcgccgtgcgcgagctcaggcgcagaggctacgtaccactcaaagaaacacaagtaaacgcaggtgctcacaacccactcgcaccttatgaacacctctga

SEQ ID NO: 96530 - DNA, 1497 bp, Oryza sativa
  Clone ID: PAT_MRT4530_94618C.1
atgggggagtattgcagcaacgccccatgcaagtggttgccagatttgggcaagggtggtgctcatggcaccaatgcccacaacatgttcgatggaatgcctagccaacctgagatgtccaaggaagatcagaggatatctgaccctattcccattaattccaccatgaacaaagaggaaaaatggctagacgatgctctagattggatattggagaattgggtggcaacgaattcaagtctcattggtgaggtgctttatctgacagctacctgggagctaggagacagaaaggacatggaccaagctccctacattgtcaccaaggacctccccaaggtcacgcccaccaagtgttcaacgctatgttctagctccgacatcaagcctgatcttatcgtggatgtgcaccccagttgttccaaagagatgcacaccaagtgttcgacgttgggccttgacatcaagggagactctaaccaagttgtgctcgcgttccagaccatgatgggtatatctaaggttgttccatcatctgttcagccagtggagaatttctcatcaagaacagtcaccgacataaagctggatacaccaatgctcaacacgtgttcgttgaaatgccccagtagtgataagaggccgctgatagagcatactgagagaaatccatggccacctccttggtcagctggagtgactagaaggtggagattaatggaagaagcttggaaagaattatacccagggtgcaaggaggctaccaaggtatctttcattgtcaggctatttcagattaagtgcatgtatagtatcagcaacaatgccatggagcaaatacttcacttattctgtcttttgctccctgagggacattgtgtcccaaatactttggataaagttcgtaaggtactccaagatcttaggttggactaccaaaagattcatgcttgtgtcaatgattgtgtgttacttcgtggagagtatgataagatgaacacatgtcccacatgtggggagagtaggtggaaaaatatagattcaggagaactcggggaagggagtggcattggaggagcaaagaaaaaggccttcgtcctcgaagaattggttgatgatgggaaagtgcggcacccagcaaactcattggcatggaagcacgtagatgaaaagttcagggatcggtttgcatctgatccatgcaatgttaggcttggacttgcatcagacggcttcaatccatttgggatgttgaatgtgacttacactacatggtcggtgatcctaattccttataatctgcctccttggttgtgcttgaaacaatcttattggatgatgtcgatgctggtacctgggcctagatctccagggatgaacattgacgtatatttgcagccgctgatcgatgagcttaaacagttgtggactgaaggagttgaaacatgggatgccaaggtgaaaaagaattttacgctacgtgcaaatctgctctag

SEQ ID NO: 96531 - DNA, 242 bp, Oryza sativa
  Clone ID: PAT_MRT4530_94619C.1
gagaccgccccgttctttgtcttcctcggcgctaactccgaccttgtcatatcatgcatggaggcggcgtacgggcacggctaacagcgcaatggggaaggaaccgatgggcgtgatgcgcaccgagctcgtgatgaaaatcatatatcctgtggtcatgattagtgcgctgggtatgtacgggctcactatccaagctgttatcataaccatgatcaacattaaagccaatacctactacc

SEQ ID NO: 96532 - DNA, 417 bp, Oryza sativa
  unsure (1)..(417): unsure at all n locations
  Clone ID: PAT_MRT4530_9461C.1
aaaaattgctgtcagcagattttttcaaaggggtcccctcatacattttcttcaaaaaagaacaaatgcccaaaaacccaaacattaaattttcaaacaacttttttcccaacaatcaaatccttagatcacaatttaaactgaccgccatgttctaacaggaggttttggggggacttagccattcccagattttttactcaaaatcacttttttcaccatcattatggattggcccttcattttcactggcattttggctcacagtttcgtcagcatcattttaaaagccatttttttaaacttccaattccctttccctttggatctgatcaactagggaagcctgtccccaaatcccatnttaataattgctaggctgctcgttgattgaagctttttcaagatctggaacct

SEQ ID NO: 96533 - DNA, 946 bp, Oryza sativa
  Clone ID: PAT_MRT4530_94620C.1
ccccctcggggagacagagggaggttagaaggaaagagcaagccagcttcttgacaaagctccttgtgctaacaagaagatccttcctaaatatgcacagggacataggctactactggatgcgtttgggcatttatttgggcattggcatttgcctcggcaccatcttctaccaagttggttacagctacagttctatccagagtagatgtgaagtaataatgtatacaaccgcgcttgtaactttcatggcaattggaggattcccttctttcgtagaggacataaagttattcagaagggagagattgagcggccattacggagtcatggaatttgtaatctcaaacaccctctcagccaccccttaccttgccgtcatcgctgtgatccccggagcaatgatgtattacctcacagggctgacccgaggtgcggaacacttcgcatacttcgtcgccacactctgcatgtgcacgctgctggtagagagcatgatgatgatcatcgcagtcatcgtcccagacttcctcatgggaatcatcatcggtgccgggatacagggcatgatgatgctcaatggtggcttcttccgcctcccgaacgagctcccgaagccggtgtggaagtacccttgctactacatctccttccacaagtatgcggtgcaggggttttacaagaatgagttcatagggctgtcttttccaagtgatcagctcatcgaggccaatgccactatcagtggtcttcaggttctcaaggaaaggctgcaagtggagatgggctattcaaagtgggtaaaccttgctatcctgtttgggatgatggtgacatacaggatgatattcttcgttattgtcaagattgcagaggagctcaggctaaaactgagagggattagatttagacggcttaaataatctggacagggatgaaggcacga

SEQ ID NO: 96534 - DNA, 1397 bp, Oryza sativa
  Clone ID: PAT_MRT4530_94621C.1
gcatgtgatgatgatcatagttggatgctattgtctcagtcagatgatgcgtggcaagttggattcgagaaattcattgaacatacatttgaaggtacctatccaggagagactgcggcctgtccatgtactaggtgttgttgcatggcgtacggaacgaaaattgaggttcaacaacacttgcttggtagagggtttgataaggatttcataaaacagaaacgttctgttagtaaacctatggttgtggatgatcgggagattagtgaagccgaagttgatgatgtcggctctgtcgataatttgctttcttcgctaattagtggtgctatacacggggatatcagagataataatattaaggtgccaaatgagtcagcaattttttcagtttatggaagaagctcggaaagaattatacccagggtgcaaggaggctacaaaggtatctttcattgttaggctatttcagattaagtgcatgtacggtatcagcaacaatgccatggagcaaatacttcacttattctgtcttttgctccatgagggatattgtgtcccaaatactttggataaagttcgtaaggtagtccgagatcttgggttggactaccaaaagattcatgcttgtgtcaatgattgtgtgttatttcgtggagagtatgataagatgaacacatgtccaacatgtggggagagtaggtggaaaaatatagattctggaaaactcggggaaggaagtggtattggaggaccaaagaaaaaggtccttcgtcctcgtaaaatacttcggtattttccacttattcctcgacttcagagattatatatgaatgagaccacatcgacatatatgcgttggcacaaggaagaattggttgatgatgggaaagtgcggcacccagcaaactcattagcatggaagcacgtaaatgaaaagttcagggatcggtttgcatctgatccacgcaatgttaggcttggacttgcatcagacggattcaatccatttgggatgttgaatgtgacttacactacatggccggtgatcctaattccttataatctgcctccttggttgtgcttgaaacaatcttattggatgatatcgattctgatacctgggcctagatctccagggatgaacattgacgtatatttgcagccgctgatcgatgagcttaaacagctatgcactgaaggagttgaaacatgggatgccaaggtgaaaaagaattttacgctacgtgcaattctgctctggacaataaataattttcctgcgtatgccatgttatcaggttggagcacaaaaggcaagtttgtgtgtccttattgtcacaaggatactgaatacttgtggttaaaatacggcaagaagcactgctatatgggcc

SEQ ID NO: 96535 - DNA, 252 bp, Oryza sativa
  Clone ID: PAT_MRT4530_94622C.1
atggtggagaggttgggcttggtgccgctggttccaacaagcggcacaagggccaggaaggggcacaggcggggcgtaggcatgctgtgtgaccgcactgtgaattacgccgagcagcacaagccaattgagcttgctgaacgtgagcgctggaagaagaccaaaagaaggaagaagcaaataaggccggaagaggcggcggatcgtgctaaccgcggcaagcgggtgcatcgtgtgcgcaacacagagtga

SEQ ID NO: 96536 - DNA, 259 bp, Oryza sativa
  unsure (1)..(259): unsure at all n locations
  Clone ID: PAT_MRT4530_94623C.1
aaggttttgagcatgagccggttaggtggcgccgcagccgtcgcgccgctcgtggccgacatgtcctcggaggtaaccctcgtcctccgctagctcgctctctcggtctctccaacatggcagcagcagcagcagcagatggtggctttctctcctcctcctcctcctcgtcgtcctccgtcctcctctcgctttctctctctttctagcttcttccggcgcttcggacgaatcaccaggnctgtgcaacgaacttttt

SEQ ID NO: 96537 - DNA, 657 bp, Oryza sativa
  Clone ID: PAT_MRT4530_94624C.1
atggggccgtcgctgacgtcatcaaagaggccggcgccgacaggcgggccccatgagtcagcggcacaagaggagcggcccacggtggactcggtccaccgcggcacaggcgcgagcgcaccacgtggacggccacgtggcggacaggcggcagaggtggcgccgacgtggcgccacgagggcaccgacgcggggcggcgccgaacggccacgtggacggtccagattcacccgagggggaatcaagcgaccacaggcgggcgggagccggctcgccgaccggccggccagggaacggcggcgcgcatgggcatcggtggcgcacgcgataaggtggcgacgcggcgcgacaaggggagcggcgtctccaaacgccgtgcgccaccaaaccctgctgccgggcgccgtttgccgccgggaccccgctgccgggggccgccaaccaagggccgtcgggtgccgccaagcgccgccgggcccgtcgccaaccctgccgcggggctccaggtcatgcgccgagcgccgagcgccacgagcgacggccggccttgtgcgccaccagcgacgaccgccgtgcgccgccaccaagcgccgcgccatgaccccaacgccaagcgccaccactccgccgccgcccgtgcaagatggaggcaatga

SEQ ID NO: 96538 - DNA, 351 bp, Oryza sativa
  Clone ID: PAT_MRT4530_94625C.1
atggaggaatgggtgccggcgatgtgggcgaggtggagctcgaatcggagcgaaaatttggggaaaaatgggggagagggtggaggagtgggcggcgaccacgtccgcacggtcggatgtgcgcgcgggaggcaggaggcggcagttttagcggcgacgtggggcgacccgggttgccatggcggttgccggcggagtggctggaggaagggggaggagctgacaggtggggcctcgggtccacctgtcggtgagggaaggagagaggaggccgggaaggggcccagaagaatggctttgtattctgccgcgttgttggttatgtcgaactgcagccttgcggcatattga

SEQ ID NO: 96539 - DNA, 859 bp, Oryza sativa
  Clone ID: PAT_MRT4530_94626C.1
cgggctgcagggcgactgcgaggcgaactcgtcaccacacactcctcctccctcatcgccgccgtcctcacctcaccgccggccaagccagccgcggcggcgcaagatgaaccaccacctctcgctcctccacctacctcgcctctcccccgtactccaccaccacccccgccacctccgcctccatggccgcaccaccgtcttccaagctcgcctcccttcccctcagcgaacgaaccagcaccgcctcctcgccgtgacgaccgcaccaccggagcccgagaagacggaggagcagcagctcctccaccccctccaagaaccagcggagggagaagtcagcggcggtggcggggcagacaggacgtgcgggctcccgacgtgggcgctgatcggggccatcgcggcggcggtggcgctgtcgtcggcggcggcggccgggccggcggcggcgctggggccggagggcccgctggtggaggagttctgggacaacatgcggcggtacgcgctgtacgtggtgacggtgagcaccgggttcgcgtacacgctggcgcagcccatcgtggagctgctcaagaaccccgtcacggcgctgctcatcgtcgccgtcctcgccggcggcgggttcctcgtctcccaggtgctcaacgccatggtcgggaactccgacttcatctacacctacgaccagtagtagaacaacagcaacatcccaatcctttttcacgtgtaatatgcttttcagtttcagctagaacaggtgatgatgatgtgatcaagtttttgcttggcaaatgtagccgtgtttggtgtaaatttcgaacgaaattggaggatttaatccgagtttttgacc

SEQ ID NO: 96540 - DNA, 245 bp, Oryza sativa
  unsure (1)..(245): unsure at all n locations
  Clone ID: PAT_MRT4530_94627C.1
cggctgctgtcttgtctgacccccatctccttgtctattcganctatgggttatgaatataccgatggacgaggtaatttgcatgatctntctcttgcgaatgtaatggtatggtgtgaatataggactggatttaccaacccttttgttattaggggtactttggtacaatntaatttgtatgtctaatcaaagcaatgtgataatcgatgttagagtgagggcaaaaaaaaaaaaaaaaaaaa

SEQ ID NO: 96541 - DNA, 1076 bp, Oryza sativa
  unsure (1)..(1076): unsure at all n locations
  Clone ID: PAT_MRT4530_94628C.1
atggggcttaataaggtgcaacagattagggaggcaaaaataaagttattcctatttgagggagttagggtagacttttgccatgtcaaaatgtcaatgaagcacatcaacacgatcaggtcacacaagcctgaatcgtcgtcgggactaatggagaatatggagaatgaatttcgtagggtcttcaaacatgtctctccaatcagcatccctcattttaaaacaagatgtacaagaaagtgcaagcggacaatgtgaattatgcatcttgatgactgattatcattccaattccaagacggtggagttctttgaaggtgatgttgatcattcatatgcggttgctatcgcccctgagtcaaaatattccgtacacaacatgcccggttttattatacataggtcacttgaagcagcaagcgatagctctgaaagtgtgtacaaaggttctgaggattatttcactttcgcatgccgatatggagacacaagtccgaaccttgtgagcagattaatcacaggtccagtttttaatctgaatgggcaagttttagggatcgttgttgatgatattgagtataaattctggcccaagaagcccaggaaggaagatggtagtcaagagattattcatgaagatcttttctatcgcgctggatatttcttaaaggttgctatgcgtgttaacaaccttcagcaagacttgaggtcgatggtaaaagacaatgactggcagaatggtctgaagaaaatagctactgaaagaagagtgtaacagcaaaaaggngcatgattcctgagatgaacagtaatagtttttggtcgcgatccctaaactgtttctgctgtagtttagttntctgctaagtactttggcttgaatcagtcatatttaatcgtactgtaagactttatttgtcgcaaagtgttggctctgcagactttatatgttttcattcgtaccgatcggttgtaattaatttatcagacttgaggtcttttgtttggaaaaagttcatttttgtcttaattatcaccaaattcaaataaaaaaaaaaaaaaaaaaaaaaaaaaaa

SEQ ID NO: 96542 - DNA, 548 bp, Oryza sativa
  Clone ID: PAT_MRT4530_94629C.1
ggtgtttctagcagcaaatttattaccatcagtagctagctactgacaagacaattacacaagaacagttaatccctaggatcacatgctaacagaaagcaacagagagctagaagaaaaggggagagagaacaaaagaagaagattatgaagctcacatgtagagattattacagatagcaagcactgtcaatatcgttgatgacaatttgtacaggttcacatgcccatgtaactatgtacacactactgaacacgttgatgcccaaccaaatgaattgaaggccaaaccaaaaaaaagaagaaggaaacacagccatgcatgcatgcatgtagtaccaattcattcagagaattgaaatgatgttcaacacagccacatggaaactactaatcaatatgcaaatcaaatcaagagcactaccccatgcctgcatgttgttaatcattcatcagttgcatgcatgcatggattcatgatgcagcagtaataatgcttttcttttgctagctaatactgcagcaagccagcaaggagaggagactga

SEQ ID NO: 96543 - DNA, 599 bp, Oryza sativa
  unsure (1)..(599): unsure at all n locations
  Clone ID: PAT_MRT4530_9462C.1
gcacgaggctggcatctgatgaaggaatctcccggcaaatccgcggtctctgcagcttcccgggtgagtccgtgtacgcccaactccgccttctctagcattatcacctactcccctttttttgcttgctagctagagttcaggctcgcagtcgtcgtgctagtggcctcgccgctcgccggccgatcatacgcacggccgtcggtcggttagttcgctcgccgctctcgatcgggctcttcagggttccaaaatgcagccataaactctcggttatcacaggtttcgattatttggcatcctgttccattgttattggctcatatggctccacatatcgtcgagtgccaatacaatgaaaatggtaacaaatagattgtcaaatcatcaaattttacatagacgcttagaaggaaagagaagccccctccgtacaaaactcgggaggtggctccacagggtctctcggaggactgacagggaggagcgcggnccctttgagggggctccgaagatgtctgaagcgtggactaactggaccttcggaggccggacaagatcgtggccaacggattctagtgggcaggcgaagagttgag

SEQ ID NO: 96544 - DNA, 398 bp, Oryza sativa
  Clone ID: PAT_MRT4530_94630C.1
ccgccaccttcgaagccgccgcgccgtcgccccggagccgccgcgccgtgcgtcgccgccttgcgccgccatcgagcccgagaaagttgcggatccaagcgaaggccaagacccgcaagactctgagcaaggcaagtcatcactattccttgaacatgttgatcccaattgcgagggagatgaagacgatggcgctcagtaggtcttagtacggtcgttgcctgtggcaatggcttgccgctgcctgaattccgctgccttatctatttctgcttttggatgtattccggaccgctcggtccgatgatttaagactacgcctgcggggttatgatgtaataattcgtattagacactcgtgtatgtgcacttggtatttcagctataaattcgtgtgt

SEQ ID NO: 96545 - DNA, 213 bp, Oryza sativa
  Clone ID: PAT_MRT4530_94631C.1
atgaccagtattgtctggcacccgtcgttcgcgatcgttgtgatcgtggtggttgtcgtggtcccggacaccaagaccttgtggcttcgtaagtcatctttgtcggctcgtggttcatgtcggaaggacaagaaccttgagtaccaaggacccctacctggcgctccactgtcgacgggtgatacccgtagaccggatataaagggtattggg

SEQ ID NO: 96546 - DNA, 330 bp, Oryza sativa
  Clone ID: PAT_MRT4530_94632C.1
aaccacagttaatatctatttcgcagtcaatcgcaacaacaaatcaaaagaaatcataatatctaatattttgcaatcactttgagtgccatggcacgtgtaccaatccagcaatcattaacgaatggctggatctgtgctgttgagggatcaaaaccgttaccgccagcagccaattccatggtaattgagatgggaatgtttgccttggccaatgcccaatcatcgctaccaccagcagcagcataaagcacgtttgtggagctgccaacggtgtatttggggcccgttgcggcacggatagcgcttgcgccagcctgggcaaccttt

SEQ ID NO: 96547 - DNA, 700 bp, Oryza sativa
  Clone ID: PAT_MRT4530_94633C.1
ttttttttttttttttacaaagtcaacaaagcgcatctttacttttactgttccattgaatttacaagaagcgtcaacagattgtttacttcgatagttccatcgaaacaagaaacatcatcaacagatccaagtcaacagagcgcgtgtttacttttactgttccattgaatttacaagaagcgtcaacagattgtttacttcgacagttccatcgaaacaagaaacatcatcaacagacaacagatcaacgttaactttgactgttcgatcgaagtttcaacacatattcaaggtaacttggagaatagacgataaggacagcgattgaatgctgcaggtgttggtctattttcagcttttggtttgtcaaaccaaaacaatggagaatgccaggtactacggcatgtactcagttaatttggactgagctgcaaccataaaataattatatcttcacatgggctataataatcagatcagaatatcatattgctccaatgctcctcacgcatgttccttgactgcaatgttttattcacattcctcctgttgttgagaaatcaaacccaaagtttataccctccatgtcatgtatgatcttaattaatctgtttcagccaggagatttgtcagtcaccgaagaagatcacctgagccaacactattagaccattggcttgttttcatttcttagtac

SEQ ID NO: 96548 - DNA, 437 bp, Oryza sativa
  Clone ID: PAT_MRT4530_94634C.1
ttgggcttcctgagcgattgcaattatcacttgtgagaacactaccgggactggagaattgtgtgatgctaaggccggcttatgctgttgaatatgattacttgccagcttaccagtgctcaagatcacttatgaccaagaagtttgagggcttattcttctctggccagattaacggaacaacaggatatgaagaagctgcagctcagggtataatttccggaataaacgcagctaggcattctgatggaaaaccacttatcattcttgagagagaaagcagttatatagggactctgattgatgatcttgtgacaaaagatcttagggaaccttatcgcatgttaacaagccgttcagaacaccgtctattgcttcgagctgataatgctgatagtcggttgactccttttggacgagatattggtttgatagat

SEQ ID NO: 96549 - DNA, 2121 bp, Oryza sativa
  Clone ID: PAT_MRT4530_94635C.1
atggaccgggaccacgcgggtggtccaccgccggtccacgggaccgactgtccagatcggccgggaggccgatcggacggcgcgggcggtggcttggcatggctctgctcggcacaaaaccgaccggccggccttggggagcggcggcggcgagcggccgccggcgacggcaagcggcgccgcgggaggcggcggcaaccggcgcgaaagcggcggcgcacggccgaagacgacgacgcacgcgcggatcgcagcggtgctcatgggagagaaagaggaaaggaaggaggagagcgggattcctcactggcgagaacggcggccggcgcgaaggaagaaggcggcggcgacaaccggcgatgcggaggcgcggacgggcggcggtggcaccctaggagggagcagagatgggttaggggtgggttatggatttctcaaggttttatcaaccctgaagaagacagtcaaccagaagacactggtctgcagtattttaatgagttgttctgcagatcattttttcaaaacggtccctctcgcgatgatgatcataaggataagtttgttatgcatgagttatttcatgatttggcgtgctccgtctcaaaggatgaatgcttcagttcaggggaagcattttgcagccttccagaaaatatttgccacctttcagttgttcttccagattccaagtcagttgtgctgactaaagtacaaagacatctgcagtccctgatggttgtcaagagatctgcatcagagtacccaggttcatttgtgccacttttgaaaatactgggtctgaatgatcttctcatgaaatgtagatttttaagagcgttgaatttgagctgtacaacaatacgagagctccccagttctattatgaagatgaaacacttgcaattcttggctctgaacaatacaaagatccaaagtctcccagctgaaataggtcagttacaaacccttcagacattagaactcaagtattgttgctgtctcattgagttaccggaaagcacaatgaatttgacaaagctgcggcaccttgatgtccaaaaggaaccaggaaatgttcatgttagcatgcctcatgggatcgggcaactaactgatctgcaaacattaacagtatttaatacgggggatgatttatcacattgttcaattggggacctgaagaatctcagtggactaaggggacatgttcatataacaggtcttcagaatattactgcaagtgatgatgccaaagaagcaaatctagtaggtaagcaattcctaggagctttgacactggaatggtgttggagcagtcaggacatggaagatgacagtgacaaagaaattgctaatcaggtccttcataatcttcagccaaacactaacctgcaggagctctccattcgaaattattctgggaatttattccccaactggattcaggattcttcactttccatgcttgtctcgattactatcgatgactgccaagactgtaatgagatcccacatcttggtgacctgccttttcttaaatatctcctcatacataaaatggacaaatacacagtaaaatatctccttaagaagactacgacagatgatggctggaattggagaaagtatagtgaaaaggatttacttggctccaagtacaaaagatcatggtacagatgcaaccagaagcagtccacggggtgcgtggcaaggaagattgttgagcctaacaacgatgatcccaacacatggttggtaacatacttatacgagcacaaccataaacaagaagctaggccctgcgacaagccatcaccttctgatttgcacgttcagctggcaagtggcaacacccagtggtgtgtgcttagaggcttctacggtggagtgaggcagatgacggtggggagcaacacacagctgcatgagcgtgactacaccggcaacgcaaatcacagtggcatcatcgcaagacagacatggatcgagatgctccggcgcggctgcacggccggccattctcaacgtagagctgtcacctattggatatactgtgacgatagctctagtatcaaggacaagttggagattgtagatgtcgatgttttatatcagcaa

SEQ ID NO: 96550 - DNA, 558 bp, Oryza sativa
  Clone ID: PAT_MRT4530_94636C.1
catccaccttttattaaaaaaagagctttgacatgggggacccacgtatgaaaaagaccaattggccccaaaagcattttgatttaaaatactcctttcccgggcaatccccagggccctaacctaaccgccgccgcccccacctcgcctggccggcaccccaccgcgggggggccccgtggccgggacgccgacgccgccgtggaccccgccgaggggttttaaaagggcccatccaaagggggggaaatagagcgggggcaaaaaaaaactcaggaagttcaagccccaaaaaaagcaggcgaaactcgcatcactcaaagccaaagtcaaaacccttgcaacggaaaaatgggagaaccaaattcacttcttcaccggtaaaacaatcatgggccgtccaaaaaaactgggggggggccaaatagggaggaccccccagaggtttttgccccccccaagtggcggaccgaggggggacgggctaatcgggcccaagaacgggggggggggaatcgccaatggcgacggccaccgggggggaaaaaaacggggggg

SEQ ID NO: 96551 - DNA, 968 bp, Oryza sativa
  Clone ID: PAT_MRT4530_94637C.1
tggccgtcgcgccaacatcttcccctcgaggtcctctccaaatgccctcaagaatccccaagatctgagcactgaggagagagatcgagctattcttctccaactccggccgccgagctccatctttgattcttctttctccgtgagtcaagccaacgccgttcaccgagaaggagcgccgtcgccgagccgttccgaacgccgtcgtcgacgaccaagcttcgccaacctcgtccaatactactataattgcgtaaatggtgaagaagtgaattaggtgctaacatttcccaggaacaaggttagacttagtcttcttgagtggtgcgggtttcgattgctttttctaggacttgaacttaatggggtaaacccttaattggtgtgcttgtggttgggtagtcaagcttccgctgttctctgttatctatctatatttggttggtcggcctatgtaactataaagtagttgtaaatttgaatcgctttcatcttatttgtatttgctatgcataaccatgcttaagaagaaagtgtgaatctagtacatattctaggaactagattcacatgagtatgagttaaggatatttgagatatcggaaaaaaaaaaaaaaaaaactcgagggggggcccgggcccaatgcccctatagtgaggcgattaccccccccactggccgtcgttacaacgtgggactgggaaaccctgacgtaccaactgatgggcttgcaggactgcgctttttcctttgcggcatactagaagcccacccttgccctttcgaattggcgcagcctatgggaatgggcccccctttgagacataagccgggagtgtgtgatcagccaggcaccacatcttcacgagcattctctcgtttattatcctacctttggttcgattgccctgagctctcagtggcctctactcgttactgtttttccatcctctcacctgttgtgttc

SEQ ID NO: 96552 - DNA, 1230 bp, Oryza sativa
  Clone ID: PAT_MRT4530_94638C.1
tagtatataatccctatcccttatcctctcctccacaatccctatcccttatcctctcctccacagttacaacttaacagatcgaaactcaccccctctcctcagatctatcctttctaactctcttctctaactcctccccttcctcctctcctcccccttctctctccttcccggccggcctccccttcccatccagcgggccggccacctccccccccccccccttcggacagaagatgacctcccgacggcgctgtccctcctcctcctccctctcccgtaccgccactccccctcctcctcctataccggtagcgccgcccctcctcctcctccttcctctcccctggctgtcactcctctcctcctcctctccccagcggcggcactgcccctttttctgatgccgtcttttcctccacctccccttttcctgtcctcgacgacaatggatgagagcagccatcgtggccgcagaagcggcaaggaggtgcccccggtgggagggcttccttgcccgtcgcggcggacgccccctccatcgcctcgacgagctgcgcggcggtggctgcgggcgcttcctccatagcccgagctccgcccgccgccatcctcagctcgctctaccgcccctccacctccccgagcatcgctagctgcgggcgtcccgtccgctgcctcgacgagccgcgcgccgacggctatgggcacctctccgccgccctgagctccgccctccgccgtcccctcctcccacagccccgagctccgacaccccctcctcgtgccgccccccggccccaagctccgctcgccttcatccagaacaccggtggctgcgaacgccccctccgccgcctcgagttccgtcctccgccgccccgagctccgtagtcccctcagccccaagttccccgagctctgccctccgccgtcccagcctcccgccgccccgagctccggcgccccctcctcgtgccaccccctcggccccaagctccgcccgccgtcgtcccgagtgtcagcgactgcgggcgccccctccacctcctcgagctccgtcctccgctgccccgagctctgcagccccctcggccccaagctccccgagctccaccctccacggccccctcctatcgccgccccgagctccgcccacattaagtgctatgggtataataccaccttgtcaatctaagtcaagaggtctcaaattaaatcaggagg

SEQ ID NO: 96553 - DNA, 188 bp, Oryza sativa
  Clone ID: PAT_MRT4530_94639C.1
gtggctgcgacggttgtgcgggcggtgcagctgaggtcgcgggcgacgcggtcgggcgcgtgtgagcatcaccagcggcggttgaggctgtttgcccggaggccggcgaggatggcgacgcggggcaagctcacggctgtggcggagcatactcgcggtggtggtggttctgttgagcgggggggggc

SEQ ID NO: 96554 - DNA, 438 bp, Oryza sativa
  Clone ID: PAT_MRT4530_9463C.1
atggagctctatgcggttgtgatgacgacaacaacagagccttcatgcatcttcctcggtggccctcgttctccaagaagggccgacggtgacacagtcatgcttaaaaaggatggcaacaagcggatgggaacaaacagatccaacgcttcctcaactggatctggcgtcctcctagctagatatgacgcccttcaatcggatatgtgcatggtgaccagagatgcccgcaaggcgcggagaggaagtgggagggagagacggccactgcggagtggttcgctcgatggagggacgctgatatggcggaggcacggggcagtgctcatggaggcagaggcttatttcttcggttgtacggagcgccatcagggaggaggcattggctttcatggcagagagatgctcggcataggggtgatggactattgtgtctag

SEQ ID NO: 96555 - DNA, 915 bp, Oryza sativa
  Clone ID: PAT_MRT4530_94640C.1
atgtgggcggagctcggggcggcgataggagggggccgtggagggtggagctcggggagcttggggccgagggggctgcagagctcggggcagcggaggacggagctcgaggaggtggagggggcgcccgcagtcgctgacactcgggacgacggcgggcggagcttggggccgagggggtggcacgaggagggggcgccggagctcggggcggcgggaggctgggacggcggagggcagagctcggggaacttggggctgaggggactacggagctcggggcggcggaggacggaactcgaggcggcggagggggcgttcgcagccaccggtgttctggatgaaggcgagcggagcttggggccggggggcggcacgaggagggggtgtcggagctcggggctgtgggaggaggggacggcggagggcggagctcagggcggcggagaggtgcccatagccgtcggcgcgcggctcgtcgaggcagcggacgggacgcccgcagctagcgatgctcggggaggtggaggggcggtagagcgagctgaggatggcggcgggcggagctcgggctatggaggaagcgcccgcagccaccgccgcgcagctcgtcgaggcgatggagggggcgtccgccgcgacgctgccgtgcctcagcgccctagcccgtccccctctcctctgcgctccggagccgacgggcaaggaagccctcccaccgggggcacctccttgccgcttctgcggccacgatggctgctctcatccattgtcgtcgaggacaggaaaaggggaggtggaggaaaagacggcatcagaaaaaggggcagtgccgccgctggggagaggaggaggagaggagtgacagccaggggagaggaaggaggaggaggaggggcggcgctaccggtatag

SEQ ID NO: 96556 - DNA, 267 bp, Oryza sativa
  Clone ID: PAT_MRT4530_94641C.1
gcacgcgtttttaagcttgtattctctaccatttgccgcccttttttttgttttttttgattttttgagggtgttatccgcacacaaaccaagggtttttacaagaaaatattattcttgtaaaattacatatcttccaatcaaaggctaccactcctttttatacatatccactttcttggcaaattatttaccaccttctattaatttatcttatttttataatctcctctatatttcattccttattacaaattcttttcttat

SEQ ID NO: 96557 - DNA, 311 bp, Oryza sativa
  Clone ID: PAT_MRT4530_94642C.1
ccgggctgcaggaatcggcagagggttcaggaagacagaggcaaacgcatgtgaagggagcagtgaaattacaaaacaagacgaatttggctcatcctctctagaaaccgatggcgcccacagaggcatggtgcatttaacaccagctaggcaacatcatgctgtcttgtttcatggccttttctccagaattttcagacctgacagattgaatgtgctatgcagccatatggcaagtgttcatctccaactgtagaggataagattatttgaccgattgaggactgactctggcatcttcaacatgctta

SEQ ID NO: 96558 - DNA, 234 bp, Oryza sativa
  Clone ID: PAT_MRT4530_94643C.1
atgatgtgcactagggttcccaatcttccgaaagattctgataaacaatgatttgggcggagtcgcgacacaaatcgatccggcttcttgaacgcgcacgctcttgagccccacaatcgcatcaccacgtctcctcgagttatcacccatgtcgaaatgcagatgaggcccaaatacggtgacacagtaccgggacagattctagacgtctctctctgctccttccctcctctc

SEQ ID NO: 96559 - DNA, 873 bp, Oryza sativa
  Clone ID: PAT_MRT4530_94644C.1
atggaccacttcacgaatcctcttcggcggcggcggcggcggtcgccggagaagaggcgtggcgagagaggcgtggccggtgaggaaggggaagctggagaaggggctaaggttgttgtctccgggtggctgacagcggttttggagggtggttttgctcacgtggcgctgacgtggacgctccgcaaccacgtcgaccggagcttcctcgttggcctcgtggcgctcttcgcctccgaggatccgcgcgagcgcgaccgcctcaagaccgtctaccaccagctctactccaagctcaccgtcgagcgcgcgtttatgcaacgcaccatggccgtcgcgctgctccggttcgtctacggcacgtccccggcggagcccgagcgccattgcggcgtcggcgagctgctcgagatctgcggcagcatcatcaatggcttcgtcgtgccgctcaaggaggagcaccgggcgttcatggcgcgcatgctgctgccgctgcaccggacgcggtggaaggaggtgctgctcatcgacgagctcgaggagatcgtcgagatcctcgaccagcaccacttcgacaagctcgtcgtccctgtctgctcccggattgcccgctgcgtcagcagctgcagctcacaggctgcggcagccagcgccgcttcccatctcactccccgaccgcatcccgccgtcgccgtaggaggaagcggaagcggtgccggcccaaggaggagcggcagctgcgccgttagcgtcggggcgcagaagctaaggctgtggcggccagttccgtcctacaccgacatcgcgctgctcccccctctcccgaccacattccgccgtcgctgtgggaggaagcggatggaagtggcatga

SEQ ID NO: 96560 - DNA, 323 bp, Oryza sativa
  Clone ID: PAT_MRT4530_94645C.1
cgcatttggacgagtcactgaaggacacgtcagcaccaagatagcactatgaagaccgagctgcatatcatccggcacatatgacgtggcactgtacaattgtccgcagtgccgacgtggcagtacacctgtccattatagaatccatggaaccgattaacctgacgtaatactccctggacgataatctgcaatgctgcatactttcgtcggttcctcccgtggttatatgcttggcagtatctgcagttcttcatctgataaagaagaagagaaaactgatccatgaggtgtggacaggtttgaaaaacacaaaagaatgg

SEQ ID NO: 96561 - DNA, 2523 bp, Oryza sativa
  unsure (1)..(2523): unsure at all n locations
  Clone ID: PAT_MRT4530_94646C.1
tttttcctcaaatcagaatcttatatacttttgtggaaaaaactgtcctttacaactgataatgcaagcatgaattagttaacctgccatgcttcacaatttgatgcatgcatgcctgcaatgtttatcatcaagaccctagcatctgaaatgtcagttgaacaacctggagataatgtcatctgctagctcaatctgcagcattgcagtgtcctcacaaagagatcctaggtttcaacctaattcgagtctctgtcatctgtttgcgtggtagtaagcatttagcctccaaggaagatccagaccaagaaattcatgtttcagagcattaatccttactccctagtaatccatctgtgccctcggatttcatacccacctaatccttgatcgctgctctctcctccacatttttttcctcctatcgattttgcaatttagcccctagggaggcagggaatccggctccggtccctgtgccgctccccccggctctccttgcctcccttgctcctccgatcgaggctgaagcggcttcaggatatacatttttgtgggaatggggaattcttgccaaaatggaacctatgggaacaattaccagaacagcaaccggtttcagaatgaccgttttgcttctcggtacgttgatgggaatgatactgaggattgctactcgggctcgtcaagggccagcttagcgggtgctctgcggcaagggctgaacctaaagtcccctgtccttggatacaagactccaaatgtaagggagctctatactcttggccgggagcttggacagggacagttcgggaaaacatacctctgcactgagattagcacagggtgtcaatatgcatgcaagactatcttaaagagtaatctccgatgtgtgtcagatatcgaggacgtgcgccgtgaaatccagataatgcaccatctttcgggccagaagaatatagtgacaatcaaggacacatatgaggatgagcaggccgtgcacatcgtcatggagctctgtgcaggtggtgagctcttcagcaagattcagaagcgaggtcattacagtgaacggaaggctgcagagcttataaaaattatagttggcatcatagaaacatgccattcacatggagtgatgcaccgggatctcaagccagaaaatttcctcttactggacgcagacgatgaattctcggttaaagcaattgactttggtctatctgtgttcttcagaccaggtcaggttttcagagaggtagtgggaagtccatattatattgctccagaggtattggagaagcgttatggaccagaggctgatatatggactgctggagtgattctctatgtattgctgactggtgttcctccattttgggcagatacacaaagcgggatatatgaaaaagtactggatggacgtattgattttaaatcaaaccggtggcccaggatatctgacagtgcaaaggatcttataaaaaagatgctctgcccttatccatcagagcgtttgaaagcccatgaagtgctaaagcatccatggatatgtgataatggagtggctactaatcgagctctggatccaagtgtacttcctcgtctcaagcaattttctgcaatgaataggttaaagaaattgtctctccagattattgctgagcgtctttcagaagaggagattgttgggttaagagaaatgttcaaggctatggacaccaaaaacagaagtgtggttacatttggtgagcttaagggactgaaaagatacagctcagtgttcaaggatactgaaattaacgacttaatggaagcagctgatgacaccacctccaccatcaactgggaagagtttattgctgcagcagtgtctcttaataaaatagaacgtgagaaacacttgatggcagcctttacatactttgacaaagatggaagtggttttatcacagttgacaagcttcaaaaggcttgcatggaacgtaacatggaagatactttccttgaagagatgattctggaggttgatcaaaacaatgatggtcaaatcgattatgctgaatttgtcacaatgatgcaaagcaacaactttggacttgggtggcaaacggtggaaagcagcctgaatgtagccctgagggaggcaccccaagtatactgaactcctgtcgcctggcacccccaagaattcagtttgttctcctgagcctttcatctgtttatcacaacacatagttgtggatttgagagaagagagccaagactagatggtttatcagtaatcaccctatagcagtggtggaagaagactctcttagtacctaatagcatataaatgtgtggtctaaagacatcgtatatgtatgaacctcataagttcgttcgttcgttcgtttggttggttggtttgctaccctgctatctaataataatatcaataatacccgaagaacccctcttggttctgcataaaaaaaaaaaaaaaaaaaaaagccctatagtgagtcgtattacaattnc

SEQ ID NO: 96562 - DNA, 373 bp, Oryza sativa
  Clone ID: PAT_MRT4530_94647C.1
cattttgtggcgcatgcagaaattgccctaggcgagggatttagcacaattgtggtggtaggctatcagcgaatcaggggacacataggctgggtactgcgaaacaccattccacatggcataataaaacattgcaaatttaacagaaaagcagcgaggatgtgaataggctggatctgaacaccgattagatagacatgtacagtgttgagcggacgggacctcaaagaccacttcaaaatagactggctcgtttgaactgctggagtgtaaacgacacacaacggacacagtaaggacatgctaaaaagctactggaacaggataagaaaccaattatattgaatacttgatattgtagcgaatatactac

SEQ ID NO: 96563 - DNA, 2946 bp, Oryza sativa
  Clone ID: PAT_MRT4530_94648C.1
atgacgtggcttgtgacgacggggaggagggacgcgatccgtgggagggttgtgctccaccgttggatgagaatggacggggctggaccaccgggtgatggtggcgctggtcaagatggtcgccgccaacttgttcctgcctccgggcagtgccgccgtccgcctacccgtcgtcgccctcgccgccgtccgacgtgctcgacgacgaggacgctccgcaaccacgtcgatcggagcttcctcgccggcctcgtggcgctcttcgccttcgaggactcgcgcgagcgcgaccgcctcaagtacgtctaccaccagctctactccaagctcaccgtcgagcgcgcgtttatgcagcgcatcatggccgccgcgctactccggttcgtctacgacacgtccccggaggaggccgagcgccactgcggcgtcggcgagctgctcgagatctgcggcagcatcatcaacggcttcgccgtgccactcaaggaggagcaccgggcgttcatggcgccatccgtcgctcgagacatcttcctccgccactggccggcgaccaaatgccagaaggaggtgctgctcatcgacgagctcgaggagatcgtcgagatccactgtctgctcccggattgcccgctgcgtcagcagctgcagctcacagcctggacctcccacctgtcgcgtaacccacccattgcgcactccgactcctcctccgcctacccatccccgtcggtgactcctccacccgcttgcctccttcgctccagattcctgccagcgacactgtcgacgtccacctgtgaccgccgccaacacccccactgcctcctactccgctgcagatcctcactgccgggcctactccttctcctccccgccgtcgacgcctactcctccgcccacccgccacacgccctgaccacctgcctccttcacccacctaccaccgccgccgccgacacgagtgatgggaatccggctccggtccctgtgccgctccccccggctctccttgcctcccttgctcctccgatcgaggctgaagcggcttcagtgaagtggttcttccaggaggagatttttggtggagattttggtgctgggagcctttgggttggggattgtgagctgatatacatttttgtgggaatggggaattcttgccaaaatggaacctatgggaacaattaccagaacagcaaccggtttcagaatgaccgttttgcttctcggtacgttgatgggaatgatactgaggattgctactcgggctcgtcaagggccagcttagcgggtgctctgcggcaagggctgaacctaaagtcccctgtccttggatacaagactccaaatgtaagggagctctatactcttggccgggagcttggacagggacagttcgggaaaacatacctctgcactgagattagcacagggtgtcaatatgcatgcaagactatcttaaagagtaatctccgatgtgtgtcagatatcgaggacgtgcgccgtgaaatccagataatgcaccatctttcgggccagaagaatatagtgacaatcaaggacacatatgaggatgagcaggccgtgcacatcgtcatggagctctgtgcaggtggtgagctcttcagcaagattcagaagcgaggtcattacagtgaacggaaggctgcagagcttataaaaattatagttggcatcatagaaacatgccattcacatggagtgatgcaccgggatctcaagccagaaaatttcctcttactggacgcagacgatgaattctcggttaaagcaattgactttggtctatctgtgttcttcagaccagaggtattggagaagcgttatggaccagaggctgatatatggactgctggagtgattctctatgtattgctgactggtgttcctccattttgggcagagcatccatggatatgtgataatggagtggctactaatcgagctctggatccaagtgtacttcctcgtctcaagcaattttctgcaatgaataggttaaagaaattgtctctccagattattgctgagcgtctttcagaagaggagattgttgggttaagagaaatgttcaaggctatggacaccaaaaacagaagtgtggttacatttggtgagcttaagggactgaaaagatacagctcagtgttcaaggatactgaaattaacgacttaatggaagcagctgatgacaccacctccaccatcaactgggaagagtttattgctgcagcagtgtctcttaataaaatagaacgtgagaaacacttgatggcagcctttacatactttgacaaagatggaagtggttttatcacagttgacaagcttcaaaaggcttgcatggaacgtaacatggaagatactttccttgaagagatgattctggaggttgatcaaaacaatgatggtcaaatcgattatgctgaatttgtcacaatgatgcaaagcaacaactttggacttgggtggcaaacggtggaaagcagcctgaatgtagccctgagggaggcaccccaagtatactgaacgccccgcgtccgggccccccaagaattcagtttgttctcctgagcctttcatctgtttatcacaacacatagttgtggattttagagaaaaaagccaagactagatggtttatcagtaatcaccctatagcagtggtggaagaagactctcttagtacctaatagcatataaatgtgggggctaaagacatcgtatatgtatgaacctcataagttcgttcgttcgttcgtttggttggttggtttgctaccctgctatctaataataatatcaataatacccgaaaaaaaaaaaaaaaaaaaaaaaaaaaaaaaaaaaaaaaaaaaaaaaaaaaaaaaaaaaaaaaaataaaaaaaaaaaaaaagttaaaaacgagtgaatgaacaaaaa

SEQ ID NO: 96564 - DNA, 1104 bp, Oryza sativa
  Clone ID: PAT_MRT4530_94649C.1
ttaactgtaaaaccggataggacgactccctaaattattgaaaccagtgtaatttgactcttccagcggttttggagggtggttttgctcacgtggcgctgacgtggtgagcgggaagaagcagccgccgcaggggctagaccaccgggtgatggtggcgctggtcaagatggtcgccgccaacttgttcctgcctccgggcaatgccgccgtccgcctacccgtcgtcgctcccgccgccgtccgacgtgctcgacgacgaggtccccgtgatggtgctgctcccgtcgatcgtggccgcacctccacctcgtctacgacgtgctcaccgccgcggtcgccgccgcggacaccaggacgctccgcaaccacgtcgaccggagcttcctcgttggcctcgtggcgctcttcgcctccgaggatccgcgcgagcgcgaccgcctcaagaccgtctaccaccagctctactccaagctcaccgtcgagcgcgcgtttatgcaacgcaccatggccgtcgcgctgctccggttcgtctacggcacgtccccggcggagcccgagcgccattgcggcgtcggcgagctgctcgagatctgcggcagcatcatcaatggcttcgtcgtgccgctcaaggaggagcaccgggcgttcatggcgcgcatgctgctgccgctgcaccggacgcggtgggtgcacacatgccaccgccagctctcctactgcggcagcatccgtcgtccgggacatcttcctccgccactggtcggcgaccaactgccagaaggaggtgctgctcatcgacgagctcgaggagatcgtcgagatcctcgaccagcaccacttcgacaagctcgtcgtccctgtctgctcccggattgcccgctgcgtcagcagctgcagctcacaggtttgtgtgcttcttcctccgtccctcgcgccactccccagttcgctccccgaccgtatcccgccgctgctgtgggaggaggcgaatggaagcggcaccggcccaaggaggagcggcggcttggccgtccgcgtcgaggcgccgaagttaaggctgcggcagccagcgccgcttcccatctcactccccgaccgcat

SEQ ID NO: 96565 - DNA, 102 bp, Oryza sativa
  Clone ID: PAT_MRT4530_9464C.1
acgcgttccgcccacgccgtcgcacctctactaccatggagctcgcctagacgcgtgctctgcttcttcttgaagaagccttcagatcgcgaggttcctagc

SEQ ID NO: 96566 - DNA, 1098 bp, Oryza sativa
  Clone ID: PAT_MRT4530_94650C.1
atgggagccagcggctccaagctcgagaaggccctcggcgaccagttcccggaaggcgagcgctacttcggcctcgagaacttcggcaacacctgctactgcaacagtgtcctccaggcactatatttctgcatcccgttcagggagaaattgctggaatattatgcaaataacaaaactcctggagatgcggaggagaaccttttgacttgtttggcggatcttttcatgcaggtaagccagtcaaagaaaaagactggcgttattgctccaaaacgctttgtccaaagagtaaagaaacagaatgaactatttcgcagctacatgcaccaggatgcacatgagttcttaaattttctgttgaatgagcttgttgatattctggaaaaggagtctaatgctgcgaaggactcccctcaatcatcatctcctgaaaaggttccaaacgggccagttcaacctttagccaatggtgttagaaaagaaccaccggttaccttggtgcataagaattttcagggcatactgaccaatgagaccagatgcttaagatgcgagacagtaacagcaagggatgaaacattttttgatctgagtgttgatattgagcagaatagttctatcacaagctgcttgaaaaacttctgctccacggagactttaaatgctgaggacaaattcttctgtgacaaatgctgcagcttgcaagaagcacagaagagaatgaagatcaagaaggctccacacatattagttatccacctaaagcgcttcaagtacatagagcagcttggtcggtataagaagctttcataccgggttgtattcccaatggagctgaagctcagtacatctgatgatgtagataccgagtactccctctttgctgtcgttgtccatgttggaagtggccccaaccatggacattatgtaagccttgtcaaaagccacaaccactggttgttcttcgatgatgaaaatgtcgagatggttgaggagtcgaccctgcaaacattcttcggttcttcacatgaatactcaggcaacacggaccatggatacatcttgttttatgagggtcttggtgggaagagttag

SEQ ID NO: 96567 - DNA, 720 bp, Oryza sativa
  Clone ID: PAT_MRT4530_94651C.1
atgccggagcacgggcgcacgtacaaggacgccaccgagaaggctcgccgcttccgcgtgttgaaggcgccattttcctttcctattgatcacactcgctccgccaccatccagccaagcgcgctcgtccaccatctgcggagggccggagctcatcaaggagggccgcctctcctcgcccggccgctgcgcgccgcggaggagggctccctgacaacaactgcgcgggactcctcctcactgcccccctcctcctcctcctcctcctccacctcccgctgtgacacggccgacgggtcaggctcccggcggaaggggtcgggcacctcgagggagaatgcgaggcgttcggcacggatgggtggctccggctacgtcggcgggagaagcgacaacgtcggcagcagcagcgaggcatcgggcatcgggcgctcggaagccatgggggatgggagcgagcagggctacggccaagagggctcggtggtgaggaacggtgacggtgggctcctcggggtgtggacaacggcggcagctccacggcatctcgcgggtgcgaagcggcggacggccaccggatggaccttgacaggaagaagagggctccggctgtggatggtgaaggcgaagaggcggccgaggcgcggcacggcatggcaaagccgttggtgctggcagcacggccgggcgaggcttctctcgccagtggggaacggctag

SEQ ID NO: 96568 - DNA, 333 bp, Oryza sativa
  Clone ID: PAT_MRT4530_94652C.1
atggcccttgctttgctttgttgtctgccaagccggctcctcgagccgatacggcatcggctcgagatcggctcagtttattatagtaaagctgatggagtgatttttattattgccatccaaattaacgcgacatccatggattggaaggttttgctccttggaatctgcgtcactgctcgatcgtcagaggagagagatgcagctgatgagctactacaatcgatgaactggtcagcagtaagatccaatattcttgtagacgataccaatgcaaaacatagcctgcctcctcaaacagttcctggccagcagcgccgatcggcggtctga

SEQ ID NO: 96569 - DNA, 1122 bp, Oryza sativa
  Clone ID: PAT_MRT4530_94653C.1
atggagggtcgtcctgggaggcgcaggcgcaggagggtcaaggccccgacgcgcgctgccggcatggactggatcagcggcctccccgacgaaatcctccaccacatcatgtccttcctgaacgcgcgccaggccgtgcagacgtgcgtgctgtcccggcggtggagcgatctctggcgcaccgtgccctgcatcaacgccgacttcaatgagtttgatttcattgattaccaaggggacgatgaggactacaacgacgaggtggcgttcaagaggttcgttaaccggatgttggagctccgcgatcctgccaccatgatggacaaattctggctcaagtacaaaatatcagacgggtacaatgaatacaaggattccaatgtagatgccaacaggtggattagccatgctttgcaaaagcaggccagggttatggaggttgtcgtgttctcctttccattggagctcgatcactcggtgttcacttcatgctacctgagaaaaattgggttctcctgtgtttctttacaccaaggtttcttcaagcaacttgacgccggctgtccagaattggaagaactcttcttacatgattgcactattgcggatgaggagatcttctcccagtcactgaaggttttgacaatcgacgacactgaattctccaaggcgaacaaggcatatatttctattccaagtgttacttctctcaccttgtctagtcctgagaattccacacctatgctaaaggacatggcattactaacgaccacatcagtatcagttaaattttatacattcagttatggttttgatgctaatgatctccgccagtgtctctggagcctttctggtgttacaaacttggagttgaattatgagggtacagagctgacgttcgaaaacaatttgcaatggtgcccagaattcatcaatgttgtcaacctgactcttggtcagtggtgcctggatgcaaacttctatgcactaattgtcttccttcagaactcagcgagactagagaagttaactctgaatcttgcgaagtttcatatcaaacactggggccaatacgaggaagaggatgagttacctgcatttgttcggtatgaggagagatga

SEQ ID NO: 96570 - DNA, 318 bp, Oryza sativa
  Clone ID: PAT_MRT4530_94654C.1
atggcgaggcaactggacaaagaggagtcagtatcagaatttctcgtccctcaactaggaagtgagttcctcgcctacaaagaagccatcggtcaaagcagctcgccccgcgcccccatcatgcctggtccctcaccggcggcggccgagaagctcccctggcggacgagcgtcgagtggagcagcggctgggccatctcgacacgtaatggcaatggtgtcctcgggctcatctccggcgcgtcagtccggaaagctcttgttccgagcggctgcgttggcggctggcctcttccccacgtcagccaccgccgctag

SEQ ID NO: 96571 - DNA, 3413 bp, Oryza sativa
  Clone ID: PAT_MRT4530_94655C.1
atttataggtgctgctccacgcgaccacgccgccggtgtcggccacgccggcgccgggccgaccccgccgtcgtcctgcgccgtccccaccgtccaagccgccaagccgggggccgagacgctgcgacagctattcctccagtcctcctcgccgcctcgccggttgcgggttgccggcttggtggcttggcgcgggttgcccgcccgccttctccagttctcttgcttggctgctccacgtctccactgatccggcgctccaccattcagcccaggattggtaaaacatgaagaggagcggagatattgcgtcattatttgggaaccatgaagcaaaaacaatggagattccagaatcttctagttcttcgaatgtattcattggtgatgaagctcctgtacctgaagaagaaccacgacaagttcctacagatgcttttccacgtgcacctcctgttcgacgaaacgcctcttcggtatcggccaccatggataggcgtcctgggaggcacaagctcaggcgggtcaaggcccatgtgcgcgctgcccgaatggaccggatcagtggcctccccgacaaaatcctccaccacatcatgtccttcctgaacacgcgccaggctgtgcagacgtgcgtgctgtcccggcggtggcgcaatctctggcgcaccatgccctgcatcaatgccgacttcgatgagtttgatttcattgcttaccaaggggacgatgaggactacaatgacgaggtggcattcaagaggttcgttaaccaaatgttggagctccgcgatcccaccgctatgatagacacattctggctcagctacataatatgggacgggtacaatgaatacaaggattccaatgtagatgccaacaggtggattagccatgctttgcagaagcaggccagggttatcgaggttgtcgtgttcgcctttccattggagctcgatcactcagtgttcacttcatgctacctgagaaaaattgggttctcctgtgtttctttacaccaaggtttcttcaagcaacttgacaccggctgtccagcattggaagaactcttcttacatgattgcatcattgcggatgaggagatcttgtcccagtcactgaaggttttgaccatcgacggcactgaattctccatggctaacaaggcatctatttctattccaagtgttacttctctgaccttgtctattgaggattccacacctatgctaaaggacatggaattactaacgaccgcatcagtatcagttaaatttaatacattcatattcagttatggttttgatgctaatgatctccgccagtgtctctggagcctttctggtgttacaaacttggagttcaattatgagggtacagagctgacattcgaaaacaatttgcaatggtgcccagaattcatcgatgttgtcaacctgactcttggtcagtggtgcctggatgcaaacttctatgcactaattgtcttccttcagaactcaccgagactagagaagttaactctgaatcttgcgaagtgcattgcagataaatctccaagaattgttggcgagcttatggaaagatcatttacgtgtgagcaccttaagattgttgaagtcaaatgcttggaggatgatccccaggtcatcagtgtggaagatttctttgctagtaatggcatggcctctgttcagtttgatatcaaacactggggccaatacaaggacgagttacctgcatttattcggcatcataaatcttacattcctgaaatcaagagacaccctgtaatatttcatatggccatcaaagttccccacgcgcaccacctgttcgacgaaacgcctctgcgtgcttggccgccatggaggggcgttcttgcagttgcacgcaggaaggtcaagaccccggcgcacgctgccgggatggactggatcagcgacctccccgacgaaatcctccaccgcatcatgtccttcctgaacgcgcgccaggccgtgcagacgtgcgtgctgtcgcggcgctggcgcaacctctggcgcaccgttccttgcatcaacgccgattgcaaagagttcgacttcttcgggttccgaaggagcgaggtggagttcaagaggtttgtcaaccgactgctggagctccgcgaccccatcgccatgatggacgcgttctggttcaggtaccacaaattggataccgacactacttcctctgcagacaccaacaggtggattagccatgctttgcaaaagcaagcccgggttctagaggctgtcatgtacccctgccacctattggatctcgatcattcaagttttacttcacgctacctgagaagaattgggttctccggtgttcgtttagaccaaggtttcttcaagcagcttgaagctggctgtccagcattggaagatctcttcttacatcactgtaccattgaggatgacaaaatatcatcccagacactgaaggtgttgaccatcgatagaacttatttcttaattgcgatcaatgccactgatgttcagaagaaatctatttctgctccaagtgttacttctctgaccatgtatagtcctgagggttcgttacatatactaaaggacatgacatcgctagtgactgcatcagtttcatttagtgaattcagagttcattttgatgctaatgatttctaccagtatctatggagcctttctggtgttacaaatttggagttcaattatcagggtccaaagctgaaaatcgaaaacaatttgcaatggtgtcctgaattcgtcaatgttgtcaacctgactctcggcaaatggtgcctcgatgcaaacttctatgcactaactgtcttccttcagaactcaccaaaactacagaagctaactctgaaactcgcaaagtgtacttcggaaatacaccaaagaatcattggtgagcttacagaaagatcatttacatgtgagcaccttaagattatcgaagtgatatgcttggaaaatgatccccaggtcatccgtgtgaaagatttctttgctagtagtggcataacctctgttcagtttcatatcaaacactggagccaatacgaggaagaggatgagttacctgcatttgttcggtatgaggagagatgaaatgccaaaggatcatgcatttgtttgtcatcccattgaagaatcaactcgctttctgctacattcactggctacagtagagttttaaggtcttattttgcatttttgctggtctctaggaatggcatccaataacttgctagttttcaactgaacaaatcgagtaatgtgtcattctactcctaatctctggttacattagcagttgttcaaccaagaacctatttatcccttgtacaacagaatttctttccattcatcaactatttttgtcgagtc

SEQ ID NO: 96572 - DNA, 225 bp, Oryza sativa
  unsure (1)..(225): unsure at all n locations
  Clone ID: PAT_MRT4530_94656C.1
gtacaccttgacccatgacagggcagacgtggttgcaagacactccattcaaagtacccaattcgtcnccatagaagatcacttccgaggatgaaatgctagcaaaccaatttatggaaggcggccggtccgctcagcggacgtcgntgggtcgagccgggaacttccggacncggctacctgcaggcgtagccagactttcccgtataggctcgagtcgtatta

SEQ ID NO: 96573 - DNA, 241 bp, Oryza sativa
  Clone ID: PAT_MRT4530_94657C.1
cacaaagaaaacggcaaagttcatttcatgagttaaatggaagcccctcacatctccagagacctaaccattttttatactacaccatcaaggggtacaaaggctgcctcggctatgtctccctatttagatagttctcttgagtaggcgaagttctatgtatcccttgatggtgtagtataagaaatgggtaggcctttttggcctcacatctccagagacctaaccacccacccctccg

SEQ ID NO: 96574 - DNA, 725 bp, Oryza sativa
  Clone ID: PAT_MRT4530_94658C.1
ccggccgggaaactcctccccttgaggcacctcctctgcatccgtcctccatggtggaggcgtggccaagcttgcgcgaccatcaagctagctgaacacctctgcctacctctcactgtaacctgccgccaccattcctgcttcatcccaactcaactcccccctttttgctcctgggccagatgtggccgacgcggacgaccttaatgcgatgacgaagaggcggccacggcaactagctcagcgcggcggtgacttcggcgggccatgggctgatgtgtggatgtcgctcgactaacccccagatcctccctcctccttggtactagtacagtggaggcagagattgggcatctcttatttagagaaggtcaatgatctttctgcaaagtttgaatcttctggtgcgagattatttgatgttgcaatgtacataggatgccttccaactctccatgaagcaaagaacataagctcaacgacaaaccgccggcatcgaaatcaagaatttggtggcaggcagtggtcgaatcgtgaaaagggaaggcatgctaggaatcgagtgtggtgcaactgagcctagaggatcaaaatcaaaggatgtttgcatgctgagagtactgccacttttggctgttcatctcaggcctaggccctgtcagtatgtaacatcatgtaatttgatactatgtaagctatgaattgaatgagaatctcttatcccc

SEQ ID NO: 96575 - DNA, 2565 bp, Oryza sativa
  Clone ID: PAT_MRT4530_94659C.1
ggtttgggttttttttttttttttttttttttttttttttttttttttttttttggttcataattaattaattaattaatccctattacactggcttatccgtgttatttatggaagggccaaaaatgtgtaatcaccagaaaatgaaaagaaaggtgacatcccaacgactgacgccacagcaaatgggaaaagaattggagaaatacatcaaactactttgcaaaaataggatgaagtacatgttttttttacattattggttcccacctgggagtaaggtcagcttcaaccgacacggtcgaatattttgagtaaacagttccattttatggaagcgaatttttttttttttttcaaaagaaaaggagtaatccctattcatcctcgcaaattttatcgaggatatataaataaagacaacaacaaaaacccaaggtgcagtccatccaccaatcatcacataccgaatgatcaaaattaattggcaaaaataggcatcgcgctttttctttacattcttccctaaaaagaaaacaacaatggcttgaagaacaggtggatcaggctcagttggagagtcagcttggacaatgcggttggatggacggagttgaagggaatcgggtgaaggtacataatcttcaaggagcatataagcacatgcgaatgaatgttgaagaaagccagatgcttttattccccttgcaaacagtagagctggcggatatttcctgaagcgtatagccagtccttgaattgggcatgaagggcagatgccaattcttttttccgagtatcatcaagctccaattctcggatattcttttgaatatcttccagagaaacatgctttttcctttgggatgcccaataaacttcaggcaatgtaaatggattatattttgtaggtccttgtgcctcaaaccaactgggaatcaaaaagttggtgaatagatcaggatctagacaagtagcagattcagcttggacatcagaaacccctgcaggatgagataatgaatcatgtggatcaacaactcccagcacaaaaggttggtcccacttgttgatgttagaatccacaccaacttgcaccaaatgttctcccaattgtggataataagtattgaatggagcaacttgtaatttatggttgtcacccacaataagcggttggtgatttactcccaagtagaagatacattcacgacaattggcgatacaaattcgctttgaagctgcaatgatttgcactcgttcacaatgctccacttttaccaccttaccaacagcaccaagaacgatagtagtgtcagaacacccatagacagtggcatatttaacaggagctaatatgtagataacagagtcatggcagttcaaaacctttattgaatgccctttgatatctgatgcttgtttcactacagaagttttggagaaaccctccaggaaagttgtatttcggtagtgtccttgattgtttggaacagcagttccagttggtgaactgctatgaattcttgaatttgtgacagcctcagccattgtcacatcaggatcagatgcactctgttggctgttttcctttgctgtcaatttttctgctgtattttctaatgaagcagctatattctgcagaatccaatcatgaacctgagcagcgggaacaggtgcagcaggcatgtctggatcagaatttgcaaaaaatgtagccacttggcttaaaggagtcccttcagaaaactgaaataaaaatccgagatgctcaaatgtctctgctgtcaataccatagactcatcgccctctccatcaacagaatctgccaaaagactcagaatgttgaccatatgcttttgcagataagataattgatgagcttcttcatctgcttgtgaaggcataaaccggcgactgttactgcgtacaagagagtcatgaaagagcgtggagagaagggccctgcagcctaggcggggggtctctaggcctaccacagcggtccattccacaacatcaaatagtccgaggggtatggagaactagaagtaacggaggatgaggaagagggggaagtcgtagccatcggcgtcctccgccgcgggccacacggcggtgaccgcggcgagctccttgtgcgccagcgccaccaggcgctgctgggactgcatgtagagcaagaggagcacgtcgcggaggtcggcgtcctccgcgtcctcctccgcggggagcaccgcggcgagcgtcccgagcaccagcgccgccagctcccgcgggatctgcagcgcctccgcgagcgccgcggcgcccacccgcggggccgcggaggcgtctccgtctcccccagccgcggcgatgaggcgctccttcgtctgggccagggtctgcgtcagcgtgccctccgggaacaccagcttggggatcgggaggagcccgtgctcgaacgccacccgccgcggccggaggaggagcgccggggaggcggcagcggcagcggcggcggtggcgggggtctccgcctccgccgccgccgccgcggcgtcgaggggctcgtcggccat

SEQ ID NO: 96576 - DNA, 308 bp, Oryza sativa
  Clone ID: PAT_MRT4530_9465C.1
aaacccctgcccgtaccgggcccgaattccgagggctcctgctccatcacacattcttgtttgggcatcccgcctccgcatcacccgccgccgccgccgcctgctgctcgaggtcgcggctgcgtagccggtgctgcaggaggtgcttcggaggggagatctcggtggggactgctgcttgctgcttgaggtggcggcagctgaggaggaggaggaggtcgctgtggatggcgaggtgggatggggcttggagtaagcagcgggagaggggaggccgcgtactgaacacgccacggctaggggcacca

SEQ ID NO: 96577 - DNA, 1026 bp, Oryza sativa
  Clone ID: PAT_MRT4530_94660C.1
atggagcagcatcagggccaggcaggcatggacttgccccctggcttccgcttccacccgaccgacgaggagctgatcacgcactacctcgccaagaaggtcgccgacgcccgcttcgccgccctcgccgtcgccgaggccgacctcaacaagtgcgagccctgggacctgccatctctggcgaagatgggggagaaggagtggtacttcttctgcctcaaggacaggaagtacccgacggggctgaggacgaacagggcgacggagtccgggtactggaaggccacggggaaggacaaggacatcttcagacggaaggccctcgtcggcatgaagaagacgctcgttttctacacggggcgcgctcccaagggggagaagtctggctgggtcatgcacgagtaccgcctccacggcaagctccacgccgccgccctcggcttcctccacggcaagcccgcgtcgtccaaggtacacgaacgcacggtgttcaagaagagcctcgtggaggtgggcgcggcgggagggaagaaggcggccgtggtgacgatggagatggcgaggggagggtcgacgtcgtcgtccgtggcggacgagatcgccatgtcgtccgtcgtcctccctccgctgatggacatgtccggagccggcgccggcgccgtcgacccggcgacgacggcgcacgtgacctgcttctccaacgcgctggagggccagttctttaacccgacggcagtacacgggcacggcggcggcgactcctcgccgttcatggcgagcttcacgcagtacgggcagctgcaccacggcgtgagcctggtgcaactcctggagagctgcaacggctacggcggcctcgtcgacatggcagcgtccggcagccagctgcagccggcggcgtgcggcggcgagcgggagaggcttagcgcgtcgcaggacaccggcctcacctccgacgtgaacccggagatctcgtcatcctccggccaaaaattcgaccacgaggccgcgctatggggctactaa

SEQ ID NO: 96578 - DNA, 501 bp, Oryza sativa
  Clone ID: PAT_MRT4530_94661C.1
cccgggccgcgggcccccccccttgttgttttgtcgtttctttttcctctcttttttcttctgtctggcaaccaccaacgtccgtcctgcatgtctatcgttcgttccgcctgccatgcgcggccggccggccaccttcctgccagcctttctttttttgttcgcccgccgtactgccagcctggctggcttgcaacccccccctgcgtatgggccggccgtaggctggcttggttgactgcgctgcccgctcccctccccacccagctcaccacacctcacctcccatcctgagaacctttgtagggattcggggttggaggctcggtcgctgccgccttgggcggcttggatgttctcccctctttcctgatacgtacaagatttttagggattaggagaagtaggcttggacgcaggagccatggggggcttggaagtacaaccatctttaatttgcaacaagttctgaaacatcatccaaacaaaagcatgtaatct

SEQ ID NO: 96579 - DNA, 357 bp, Oryza sativa
  Clone ID: PAT_MRT4530_94662C.1
atggctggaggagggcaagactgcggctgcggcgacggcgacggcgacgacgtgcgtgagtggaggactgtgaggcggcgcaggataagaggagggcaagagcaaggcgacgtagcccaggggagcgatgcggctagggttcagtccaggctagggaaatctgcaccgtggggcccacctgtcggccccttcttcctcctccagccgatggcaccgccgccgccgaaaccgccaccgatgccgccggtttccccgtttcccgcgcccactccgcccgtgccgcacgcccacgtcgccgcccacgtcccgccgtttcccgccctcgcgcgcgcccgagaatggtcggattcattttga

SEQ ID NO: 96580 - DNA, 1110 bp, Oryza sativa
  Clone ID: PAT_MRT4530_94663C.1
acccacgcgtccgcgctgaacagcacagcgcagcccgcagcggaagacggaacccgctcttccccacccaacccaaccagaacctgctccgcggagcactcgaagcgcccgtcgcgtgtctggagccaagccgacgagctcgtcatcctccgcggcctcatcacgtaccgcaccaagcgtggggtgctccctggctcaacgcaagacattggaaagctccacagctacatccgtggccagctcagtgctaaggtatcaactacacagctcagtgacaaggtccggcgcctcaagcagaagtatcagatgctcgcaacacgcgccaagactgggaaggaagtattccccactccgcatgaccacaatatctaccagcttgccaagaaggtctgggggacaatgagtactgctggtgagggaggaggaagtgggtatgataatgctgatgctggtgagagcgaagaggagcaagaatcagagatcagtgccagtcactatggcaaatggcaatgggactgggatcggtgctgtgaatgccattgtgagagggaggagtgagtttgagaaagggaaggatgtatatccttacctgtgggaaacagttgaggagctgtccagccaacatccaactggagcagtgttcaagaaggcgtttgagttgcttgaaggatcgaaagcacaggtgatggaggaaaagctgcggaagttcaggctgactgagatgagacagcagttgcgtcggatggacctgatgaaggacacactgagtatggtgcttgatgccctggagatggctgactgagtccatgggtgatatctggtgagtagtgcattgttaaaagggggaaattagtgtctttttcttttctagatagaatctctgtggttaattacttacctttatggacaaggttgcacattcctcagtcaaaagttagggatagaacaagttatggtgttctccttgttattctgaacaatgtattttatgatgcttaggtgctaactttgtgctatatactataacatttctgttgtttgtttaaaaaaaaaaaaaaaaatgtgcgccaatgcatctttgtccgcgtgccgtttcctgcagcccgggga

SEQ ID NO: 96581 - DNA, 448 bp, Oryza sativa
  unsure (1)..(448): unsure at all n locations
  Clone ID: PAT_MRT4530_94664C.1
attatgatgtatggggcagcccatgttncggctctgtcctccatccttctctgccacagtctagtcatgcatcatgcgaacatccagccacatggcaatgggaggaagagtgcggcattcggtcatcatcgccgtggcgtgcgtcggcgtcgggtcgtngtcagtctcggggcacggtcggcanaaacaggggcgcttgacatcgctccgagacgagtagcatgcaccatggtacatatatacagtaatcagcagctgntcatttttctatgagttactagttgacttaagcttgcaaatttgctaatctgagctcctgagtttttttttttggtcagcaatttcaagatggtcagaagctaaatttgtctatttgttactgataaattatttgttctctccgtttaatcgtcatgaaatgttttgggaaaaaaaaaaaaaaaaaaaa

SEQ ID NO: 96582 - DNA, 329 bp, Oryza sativa
  Clone ID: PAT_MRT4530_94665C.1
acgacggctcggtttatatagagataggtcgcttgatcagagcgcccgcacgatctccactccgcgtaactgaaccggataagtcgcgcataacttatccggactccatgccgttttcatgcaccggatttttcggaatgtttccaaaacaaaaaaaatctaaatttcccgcagtaaaacaaaacaacaaaaggaggctgcatctgcgcaagggtgaagagccaattttgcggaccattcgacgcgtacgtcgtgcgcgcgcgccgcctgccctgccaggcaaggcgaggcgagtgagcgagcgagcgcgtgttccccctcttctctcc

SEQ ID NO: 96583 - DNA, 1029 bp, Oryza sativa
  Clone ID: PAT_MRT4530_94666C.1
gtcaactccgactccgaggactccgcgctgcccctggcgtccgacgcctacgccgaccaggccgccgccgctggcgccggcgccggcgccgactccgacgacggcaacacctcgccgctcccgcccccgcgcccctcccgcgccgaggccgccgccatcaagcccatcagctcccgccccatggacccgccgccccgccgctccgcgggcggctccgagccgcgcgccaagcgcccccgcagcgccgccgtggcctcctccgcggagcactcgaagcgcccgtcgcgtgtctggagccaagccgacgagctcgtcatcctccgcggcctcatcacgtaccgcaccaagcgtggggtgctccctggctcaacgcaagacattggaaagctccacagctacatccgtggccagctcagtgctaaggtatcaactacacagctcagtgacaaggtccggcgcctcaagcagaagtatcagatgctcgcaacacgcgccaagactgggaaggaagtattccccactccgcatgaccacaatatctaccagcttgccaagaaggtctgggggacaatgagtactgctggtgagggaggaggaagtgggtatgataatgctgatgctggtgagagcgaagaggagcaatatggcagagagagcgatgatgatatggagagtgggcgggataaccgtcaccgcaagaatcagagatcagtgccagtcactatggcaaatggcaatgggactgggatcggtgctgtgaatgccattgtgagagggaggagtgagtttgagaaagggaaggatgtatatccttacctgtgggaaacagttgaggagctgtccagccaacatccaactggagcagtgttcaagaaggcgtttgagttgcttgaaggatcgaaagcacaggtgatggaggaaaagctgcggaagttcaggctgactgagatgagacagcagttgcgtcggatggacctgatgaaggacacactgagtatggtgcttgatgccctggagatggctgactga

SEQ ID NO: 96584 - DNA, 808 bp, Oryza sativa
  Clone ID: PAT_MRT4530_94667C.1
atggtggcgaggctggcgtgggggtcgctctgggcggtgtacgtctgcgttgttctgtgctcgattctggttatggcgttcctcggaggagggctcttggtggggaaagttgtggaggagcccattcaggttactgagaccctgaattttgattacaccaaaccgagccccgtggcatttgttcctgtacagcggttggtgccgccgaatcagcggatgcagctcgaggtgttcctgacgctgcctgaatcggattacaaccggaggcttggagttttccaggtaagagcagaatttctatcagcagacggcaaagtgatctctacctcaagtcaaccatgcatgctaaagtttaagagtgcccatatgcacttcatagaaacttttctgcgaagcgtgtctcttttgtctggctattcctcagaatctcaggtcataagactaaaaatgaggggcattacagaggcttcagaaccagtaatgggaataaggataattcttgaacaacgagctgaatttagtcctggtgcaggcatcccagagatctatgccgcatcactaaagcttgaggcagaactacctctgctcaagagaatactctggaactggagatggaccctttttgtctggagtagcatggggttctttgtttttgaattattgctggcccttatttgctgtagaccctgtatatttcccaggagtggacataacgctgcaactccttaggctagctcatgtaatgtacacttcaaaataaatgcaaaagggatgttaatgttgcacggtataaaaaaaaaaaaaaaaa

SEQ ID NO: 96585 - DNA, 2995 bp, Oryza sativa
  Clone ID: PAT_MRT4530_94668C.1
gcacgaggcccaaagcatggcgctgtccgcgtcggcggcggcgtcggccgggcggggggcgcgggcggagaaggtggggaggatcttcgagcggttcgatgccaacggggacggggggctggaccgcgacgagatggcggcgctcgtcgtcgccgtcaacccgcgggtgaagttcagcgaggaccagatctccgccatcctcgacgaggtgttccgcacctacgccgagttcatactccccggggggcggggcctctccctgccggggctgctacgcacctacgacgacggcgccggggacgtcgaccgcgacttcctcgcgctgtcccttcccccgctcgagtccggggagtcctccccggagatcgccgcgggggacccggccgccgcctcgtccccgccctccggcgccgccgccgccgcgtcgctcctggacgaccacatcaagccgcttggagcagccggtggggcgccctcgtccagctcacgcgccgcggcggccgcgccggcgtgggcgacgtcgcccagccacgggattgcgttcgactcctcctgggcgctcctcgacgacctggagatactagtgaagcgcctccgctccaagcagctgcggagaacatcctccatcgacacgatcaacggcagcggcggcgcggggaacaacaatttcgactccttctccgaggccgggtggtcaagggagatctccggccaagcggattcggcttcgaccgccgcgccatgggacgagacgagccgcgactacctcaccttcgtcaaggagctcgccgtgctccgcacgcgcgcggacgcctcccgctcacgggaggaggccttcgacaatcacatggtcatcggcagggcgctctccgagcaccgcctcttccgggacgcgcttagcagcttccgccgcgcctgcgagctgcagcccactgacgtgcgcccccacttccgcgcggggaactgcctctacgcccttggccgccactcggaggccaaggaagagtatctcctggcgcttgaggcagcggaggcaggtggctcccagtctgcggacatcctcccacagatccatgtcaaccttggcattgccatggaggctgaggggatggtgctcggtgcctgtgagcactaccgagaggctgccatactgtgtccttctcatgcccgggcgctgaagctcctcggtagcgcgctctttggtgttggtgagtaccgtgcagccgagaaggcactagaggaggccatcttcttgaagccagactatgctgatgcacactgtgatcttgggtcagccctgcatgcgatcggggatgatgaccgtgcggttcaggagtttcagaaggcaattgatctcaaacctgggcatgttgatgccttgtacaatcttggtggattgaatatggatgcagggcgctttgtgcgggctgcggagatgtatactcgtgtgttgagcatccgaccgaaccattggcgtgctcagctaaacaaggctgttgctttgcttggccagggggagtctgaggaggccaagaaggcactcaaggaggcatttaagatgacacaaagggtagaggtgtatgatgccatatctcatctgaagacactgcagaagaagaaaccaaagcctcccaaaggaaaagatgatagtcaaggagaggaggccttcgttgtagtggagccatccaagttcaagagggttggaagaaagactaccttgcggcaggaccttgctaatgcccttgatataagagcctttgagaaaacgacaaagcttggccgctgtgacgcggagcttctgaggaaagagatgaacgagactgatgtccccatatcctactcaggcgctggcaacccagagaagtcaatacggaaagcagctctcgaggttattctccacaggctcctatctttcctcaagccagatacctttcagggttctgtgaaggcgattaacgaaagaatcctctccgtccttgatgcctctggttctggccgtgttgaccttgggatgttctttgctattatcgccccaatttgttctggtcctgtggataagcgcaagcgggttgtctttgatgcacttctttggcgtccggcaagtgaaggaagcaggggtcagattaggaggagcgatgcactgtcctacatcaaacttcttcgtgctgtttatatacccacccatggggctagcgacatgcttgaaatgcatggggagtctgaccccactatggtatcatacacggagttcctcgaaatgttcaatgatcccgattggggatttggaatcctaagcacattggtgaagcttgaggacagcgatcacattcgtcacggccgccacacctgctcaatttgccgatatcctatcattggttcccgattcaaggagacaaagcactcctttagcttgtgcaatcgatgctacagtgaagggaaggttccatcagcattcaagttggatgagtacaggttcaaagaatatggtaacgagtctgaggctcttatcgataagtgcatgtgctttaatttacattctaagaagctcgaagctgatacttgatcattcgatctttggtgtcgattgctcgagcatgaatctgtgtatcccctttctaggtgcaaagatctctagatagtctcctgccctcttgtaaactaaggtgctgttctgttcggagttttctgaatgtgttccaactacttgaaaatcctaatcaattagctattgttcgtccaagtgtatgggagtgagaacatgtgaattccaaacacactgttgttacaatccccaatgctcttgtttaatagagatccttgctgatatccatgaggttttatttgaaccaaacaattttgggctatttttttctttaatcacacttgtatgatttatagcttgggttgcaggaatagatggtaaaatcactatgtacattcagttttaaacttctttgtaagttggtctaacaaagattattttctaaggcagtcc

SEQ ID NO: 96586 - DNA, 228 bp, Oryza sativa
  Clone ID: PAT_MRT4530_94669C.1
acaaactacagcttggtggcggcagtggggcgtcgagtgccggcggcgcccagcggcgcccagcggcggggttggcggcgcccggcggcggagtggtggcggcgcacggcggcgggggtggtggcggcgaacggcggcgaggtggtggcgctcacggccgtgccgagcgacgcctggagactggagggatcaatcgatcgagagaagaggaaacatcttcctttgatc

SEQ ID NO: 96587 - DNA, 806 bp, Oryza sativa
  Clone ID: PAT_MRT4530_9466C.1
tcgagatcccccctacaaagtagctagcagctggtctctctcttgatttgtgtttccggagaaagagagagatcggggtcgagatcgagggagagatgtcagggaaagatcaaaagaaagcagcagctttagaagagaagctcgagctctacgttctgttacaaagtcaagtgcgttatgaatcgatagtaatagaattttctgcagcagcaaacgagacatcaatcctcgtagatgcgtccaagtacatcaaagagctcaaggacaaggtatctcaggagcctgaacagctgggcagcactagcagttccatgccaatgccaagagtcagtgtttcatcggtagagctagagaagaagataggttttcgaatcaatgtgtcaatggagaagagtcagcctgagttgctgacgtcggtgttagaagcattcgaggagcttggcctcgacgtccttgatgctacgtgtcgtgcgcagacgacaccgcttttcgtcttgaagcgcttggatccagccaaagtgaagctgcagagagaagcgtggatgagcaaatggttcggcatgcagtgctgcaagccatcaagaaatgcatggacggatcatcaatttgatccagaatgaattttatgtttcgacttaaattctcatctgccgtagcgcaaacttattgtgatgatactaaatatatctatattttcagttaattttgttgtaaaaattagctatcttttggtgctgaatgaacaagggcggcgtttaatttgtcgtttaaatattcgtgcaaagaaactaaaaaaaaaaaaaaaa

SEQ ID NO: 96588 - DNA, 6981 bp, Oryza sativa
  Clone ID: PAT_MRT4530_94670C.1
cagatctcaggcgaaggtgtggttccgccaaatcttcaatgcatgcaccacagctgccaattctaggtcatgcgttgggtagttattctcatgaggacgtaattgcctagatgcataggcaaccacctttccttcttgcatcaacacacaacccaaaccgagtcgggatgcatcacaatacacttggaaacctttcctcgaatcaggcaaaattaatacaggcgcagtcactagccttttcttcaattcttggaaactttgttcacaatcctctgtccacttgtacttcacttccttctgaagcagacgagtcattggtctggcgatctttgaaaagttctcaataaacctgcggtaataccctgcaagtccaaggaaactacgaatttcggaaaccgtcttgggttgcttccaacttaacactgactccacattgcttggatctactgccactccaccagacgagatgacatgaccaagaaacttcacttcggacaaccaaaattcacatttactgaacttggcataaagctgatgctcacgtagtttctctaaagctagacgaagatgctcttcatgttcttcctttgtcttggagtaaataagaatgtcatcaataaacaccacgacaaacttatccagatattccataaacaccttgttcatcagattcatgaaaaaggctggggcattagtgagtccaaatgacataacggtacattcgaacaaaccataccgagttgtgaaggcggtctttggtatatcttcctcacggattcgaagttaataatatccagaacggagatctatcttggagaaaactgtagcaccttccagttgatcaaacaggtcatcaattctgggtagaggatacttattcttgatagtaacctcattcaacgctcgataatccacgcacattctctaagtatgatctttcttctccacaaagatgactggtgctccccatggcgaagtactgggtctgatgtatcctttctgaagcaaatcatccacctgtctcttcacctcagctaactcattagctgccattctgtacggtctcttatggatagggttggttccaggtaccaagtctatccgaaactctatgtctctcttaggtggcatacctggcaaatcctcgggaaacacgtctgggtagtcttgtactatggggatctcttgtagagcaacttggtttaagatcacaccatgagatttaggagaggacacaaagaaagaaactgtttccccattgctattggttaaagtcaccttacggttggcacaatctataactcctctgtgacgagataaccagtccatccctaagataacatctagatctttggattctagcaagataagcgaggatgggaaaggaacttcttctatttctatagtagcggaaggacaatactgtgtcgaaaatacttgattgcctggggtattaactagtaaaggtctcccaagactaataacttccatcccatgattgctcgcaaaacttttagacaaaaaagaatgcgtagcaccggaatcaaaaagcacagatgcgggtatagagttaacaggaaacgtacccaaaaccacatctggtgcattctgagcttctgctgctgcaacatgattaacacgtgcctttggtgctggagcattggagttattcggggctggagcgttcttcacgcgccgaggcttaggacacttatcagcataatgtcctggatcaccacaattgaagcacacccctggcttgcttccctgttccttcctgacgggctggttctgagctggagttgctgcaggacgagcaaccatgttgcggttgtcattaccacgattaccagtattgttgttgtagaactggcgttgggggcggacaactgatgaagatcctccttgagggtacgatggagcttgaggtcccgtaacgagacgcggcctctggttactgccctgttgtgccttgaattgggcagccctgcgcttcttctgctccatccggttatacttgtcttcctgacgaatcgccttgtccaccaactgctggaaatcccggaaatccgtagacatcaaggcataagacaactcatcattcagtccctccaagaacttctcctgacgctcttcatcggtgcgaacatcttccggagcataacgagctaaacggttgaaatcatggaggtactcggtgaccgaacgagatccttggttgagtgctctaaattctctcttctttagagctacaacacccgttggtatatgtgtctttttgaaagcggccgtgaattcctgccacgtaataggctctccttcagccctgccttggcgaaaatgatcccaccattcagcagcaggtccatgcagttgatgcgaagcaaaagaaactttctcctgctcagtacactggatcaagtccaacttcttctccaccgcatgcagccaatctcctgcttctactggattggtagtgcgccttgcgtcggaacgaagcgatggatcttcttcctctggagtagctggctctctttcttcagggtcttcctcctcttcctcatcacttatgatgtcgatgacaggttcagcacgatcgggcacagcttcacccatcacgcgaatcttcgaagctaactggagacgaggtggcggacaggttctctttcttgcagtgaggcgaagcttgggtgttggcggcggcgtttctcctttaagttcagctaattccttctgtagacggtacaccttgctctccaacttgcaaatcttgcctcgattccagttttccctgtcatgagctgctttggctcgctccacacttactgcatccatagcactaagcatatgcaccgcatgcatcagagtggcactctcttcaccatcaggacaggtataggttccatagtcttgaccatgaggcttgtgaggatgatactggaaagctgatgaatccaactcttcttatttatttcttctgattattattatcatcacattcacggagaaagcagcatccaaacatgatagatgctactagcaaatatcgataattaattatccagtaacccggataactaattaaataattaattaagcaaaggcctaattaattaattactaaggaagttaatccatgccacccccaaacatggggcagccaaagaaaccagtgtgctgcaggttgcaccggccgtagtccgccatcgtgctcgccgtcctcaccgtcgcggcagcggcggcgggctacggcggctacggcgacgtcggcgagtactgccgcgtggggaaggcggtgtcccggaacccggtcccatcgtgccggaactacatcgcgcggtggtgcgccgtcgccgggggccgcctggactccggcaagcagccgccgcggcagctcctggagccgtgctgccgggagctcgccgcagtgccgatgcagtgccggtgcgacgcgttgagcgtgctggtgcgtggcgtggtcacggaggagggcgaccgcgtcgccgggatgatctcgcagcacgcggcgcccgggtgcgacgccgcgacgatcgccgggatggcgagcgcgctgacggactacggccggtgcaacctgcagcacactggtttctttggctgccccatgtttgggggtggcatggattaacttccttagtaattaattaattaggcctttgcttaattaattatttaattagttatccgggttactggataattaattatcgatatttgctagtagcatctatcatgtttggatgctgctttctccgtgaatgtgatgataataataatcagaagaaataaataagaagagttggattcatcagctttccagtatcatcctcacaagcctcgtggtcaagactatggaacctatacctgtcctgatggtgaagagagtgccactctgatgcatgcggtgcatatgcttagtgctatggatgcagtaagtgtggagcgagacaaagcagctcatgacagggaaaattggaatcgaggcaagatttgcaagttggagagcaaggtgtaccatctacagaaggaattagctgaacttaaaggagaaacgccgctgccaacacccaagcttctcctcaccgcaagaaagagaacctgtccgccacctcgtctccagttagcttcaaagattcgcgtgatgggtgaagttgtgcccgatcgtgctgaacttgtcatcgacatcatggtgaacacgcgaactggaagtggaagtggaagtggaagtggagctgctaacaatggaggagatcccacgctagctcagattctggcccaacaaacacaactgatcaatctgttagtgcagcaggcacagaatcagcaggcaaacaatcagaaccagaatccacccccacctccccaaaacaagctggcagatttcttacgtcagttggtggacaaggcgattcgtcaggaagacaagtataaccggatggagcagaagaagcgcagggctgcccaattcaaggcacaacagggcagtaaccagaggccgcgtctcgttacggaacctcaagctccatcgtaccctcaaggaggatcttcatcagttgtccgcccccaacgccagttctacaacaacaatactggtaatcgtggcaatgacaaccgcaacatggttgctcgtcctgcagcaactccagctcagaaccagcccgtcaggaaggaacagggaagcaagccaggggtgtgcttcaattgtggtgatccaggacattatgctgataagtgtcctaagcctcggcgcgtgaagaacgctccagccccgaacaactccaatgctccagcaccgaaggcacgtgttaatcatgttgcagcagcagaagctcagaatgcaccagatgtggttttgggtacgtttcctgttaactctatacccgcatctgtgctttttgattccggtgctacacattcctttttgtctaaaagttttgcgagcaatcatgagatggaagttattagtcttgggagacctttactagttaataccccaggcaatcaagtatcttcgacacagtattgtccttccgctactatagaaatagaagaagttcctttcccatcctcacttatcttgctagaatccaaagatctagatgttatcttagggatggattggttatctcgtcacagaggagttatagattgtgccaaccgaaaggtgaccttaacctgtagcgatggggaaaccgtttctttctttgtgtcctctcctaaatctcatggtgtgaccttaaaccaagtcgctctacaagaaatcccagtagtacaagactactcagatgtgtttcccgaggatttgccaggtatgccacctaagagagacatagagttccggatagacttggtccctggaaccaaccctatccataagagaccttacagaatggcagctaatgagttagctgagataaagaggcaggtggatgatttgcttcagaaaggatatatcaggcccagtacttcgccgtggggagcaccagtcatctttgtggagaagaaagatcatactcagagagtgtttatggaatatctggataagtttgtcgtggtgtttattgatgacattcttatttactccaagacaaaagaagaacatgaagagcatcttcgtctagctttagagaaactacgtgagcatcagctctatgccaagttcagtaaatgtgaattttggttgtctgaagtgaagtttcttggtcatgtcatctcatccggaggagtggcagtagatccaagcaatgtggagtcagtgttaaattggaagcaacccaagacggtttcagaaattcgtagtttccttggacttgcggggtactaccgcaggtttattgagaacttctcaaagatcgccagaccaatgactcgtctgcttcagaaggatgtgaagtataagtggacagaagattgcgagcaaagtttccaagaactgaagaaaaggctagtgactgcgcctgtgttaattctgcctgattcaaggaaaggttttcatgtgtattgtgatgcatcccgactcggtttgggttgtgttttgatgcaagaaggaatggtggttgcctatgcatctaagcaattacgtcctcatgagaataactacccgacgcatgacctagagttggcagctgtagtgcatgcattgaagatttggcgtcattatcttttcggtaaccgtacagagatgtatacggatcataaaagtttgaaatggttagagttgattaaagattatgatatggaaatccattatcacccgggtaaagcaaatgttgtagccgatgccctcagcaggaaaagctattgtaatatgtcagaaggtcgacatctaccttgggagttatgccaagaatttgaaaagctgaatttggggatagtcagcaaaggttttgtggctgctttagaagctcaacctaccttgtttgatcaagttagagaagctcaagggaatgatcctgacatccaagaaatcaaaaagaacatgagaagaggaaaagccatcggttatgtagaagatgagcaaggaactgtgtggttaggagaaagaatttgcgtacctgataacaaggagttgaaggataccatcgtgaaagaagctcatgaaactttgtattccattcaccctagaagcactaagatgtaccaagacctaaagcaacaattctggtgggctagtatgcgacgtgagatagcagaatatgtggctctatgtgatgtatgtcagcgagtcaaggctgaacatcagaagccagccggtctgttgcaaccattgaagattccagagtggaagtgggaagaaataggtatggattttataaccggtctacccagaacgtcggcaggacatgattctatttgggtagtggttgacagattgactaaagtcgctcatttcatacctgtcaaactgtcaaaacaacctacacggggaataaacttgcagagctatacatggccagagtg

SEQ ID NO: 96589 - DNA, 405 bp, Oryza sativa
  Clone ID: PAT_MRT4530_94671C.1
atggagcttttgctctcagcccattgcaacccaaaagtccaacaaatatgttctagagaagactccatttgtacctatttgctgattatagtggaagtttggagtggaccgttagtcccatggttttttactcctcacatcaatgaggttttccatgtaaatcatcgtgtcccgttggccgcatcctcgccggagctctgccagaagtctgccggagatccgtcggactctcacttggagccgccaccggagcaggcatcggcccctcatcaagtaatcaaggatttccgaggtggagagcaggacgaggcagctcagatggtcttctatatcttcacaattgttgtgcccttgtctcttctcaatccacatcagccgacagcgtggctggtgtcagcagtataa

SEQ ID NO: 96590 - DNA, 5972 bp, Oryza sativa
  Clone ID: PAT_MRT4530_94672C.1
gtgacaagttggtatcagagccaccttgaccttaggataagccaaatgatgccgccccattcaccgagaaatttgatcaaggtgttaggattcgtcagggagctgaggttgatggcttttgaggtaggctatgaagttgctcctgagtatcgccggatttcccatgaccccaacgaggagaagtgtcgtgttcgtgtgacgttggctagtgatcgtgaagaccttccttccattaagttcgaagctggaggaagatcgtacagccatgcttgtcaagaagcagctttggtggccattggagagttgcgtcaacgctttgaagaagagttggattcatcagctttccagtatcatcctcacaagcctcatggtcaagactatggaacctatacctgtcctgatggtgaagagagtgccactctgatgcatgcggtgcatatgcttagtgctatggatgcagtaagtgtggagcgagacaaagcagctcatgacagggaaaactggaatcgaggcaagatttgcaagttggagagcaaggtgtaccgtctccagaaggaattagttgaacttaaaggagaaacgccgccgccaacacccaagcttcgcctcatcgcaagaaagagaacctgtccgccacctcgtctccagttagctttgaagattcgcgtgatgggtgaagctgtgcccgatcgtgctgaacctgtcatcgacatcataagtgatgaggaagaagaggaagaccctgaagaaagagagccagctactccagaggaagaagatccatcgcttcgttccgacgcaaggcgcaccaccaatccagtagaagcaggagattggctgcatgcggtagagaagaagttggatttgatccagtgtactgagcaggagaaagtttattttgcttcgcatcaattgcatggtcctgctgctgaatggtgggatcattttcgccaaggcagggctgaaggagagcctattacgtggcaggaattcatggccgctttcaagaagacacacataccaacgggtgttgtagctctaaagaagagagaatttagagcactcaaccagggatctcgttcggtcaccgagtacctccatgatttcaaccgtttagctcgttatgctccggaagatgttcgcaccgatgaagagcgtcaggagaagttcttggagggactgaatgatgagttgtcttatgccttgatgtctacggatttccgggatttccagcagttggtggacaaggcgattcgtcaggaagacaagtataaccggatggagcagaagaagcgcagggctgcccaattcaaggcacaacagggcagtaaccagaggccgcgtctcgttacgggacctcaagctccatcgtaccctcaaggaggatcttcatcagttatccgcccccaacgccagttttacaacaacaatattggtaatcgtggcaatgacaaccgcaacatggttgctcgtcctacagcaactctagctcagaaccagcccgtcaggaaggaacagggaagcaagccaggggtgtgcttcaattgtggtgatccaggacattatgctgataagtgtcctaagcctcggcgtgtgaagaacgctccagcctcgaacaactccagtgttccagcaccgaaggcacgtgttaatcatgttgcagcagcagaagctcagaatgcaccagatgtggttttgggtacgtttcctgttaactctatacccgcatctatgctttttgattccggtgctacacattcctttttgtctaaaagttttgcgagcaatcatgggatggaagttattagtcttgggagacctttactagttaatcccccaggcaatcaagtatcttcgacacagtattgtccttccgctactatagaaatagaaaaagttcctttcccatcctcgcttatcttgctagaatccaaagatctagatattatcttagggatggactggttatctcgtcacagaggagttatagattgtgccaaccgtaaggtgactttaaccagtagcaatggggaaaccgtttctttctttgtgtcctctcctaaatatcatggtgtgatcttaaaccaagttgctctacaagagatccccatagtacaagactacccagacgtgtttcccgaggatttgccaggtatgccacctaagagagacatagagtttcggatagacttggtacctggaaccaaccctatccataagagaccatacagaatggcagctaatgaattagctgaggtgaagagacaggtggatgatttgcttcagaaaggatacatcagacccagtacttcgccatggggagcaccagtcatctttgtggagaagaaagatcatactcagagaatgtgcgtggattatcgagcgttgaacgaggttactatcaagaataagtatcctctacccagaattgatgacctgtttgatcaactggaaggtgctacagttttctccaagatagatctccgttctggatatcatcaacttcgaatccgtgaggaagatataccaaagaccgccttcacaactcggtatggtttgttcgaatgtactgttatgtcatttggactcactaatgctccagcctttttcatgaatctgatgaacaaggtgtttatggaatatctggataagtttgtcgtggtgtttattgatgacattcttatttactccaagacgaaagaagaacatgaagagcatcttcgtctagctttagagaaactacgtgagcatcagctttatgccaagttcagtaaatgtgaattttggttgtccgaagtgaagtttcttggtcatgtcatctcatctggaggagtggcagtagatccaagcaatgtggagtcagtgttaagttggaagcaacccaagacggtttcagaaattcgtagtttccttggacttgcggggtattaccgcaggtttattgagaacttttcaaagatcgccagaccaatgactcgtctgcttcagaaggaagtgaagtacaagtggacagaggattgtgaacaaagtttccaagaactgaagaaaaggctagcgactgcgccggtgttaattttgcctgattcgaggaaaggtttccaagtgtattgtgatgaatcccgactcggtttgggttgtgtgttgatgcaagaaggaaaggtggttgcctatgcatctaggcaattacgtcctcatgagaataactacccaacgcatgacctagagttggcagctgtggtgcatgcattgaagatttggcgtcattatcttttcggtaaccgtacagagatgtatacggatcataaaagtttgaagtacattttcacccaacctgatttgaacatgcgtcagcgaagatggttagagttgattaaagattatgatatggaaatccactatcacccggggaaagcaaatgttgtagccgatgctcttagcaggaaaagctactgtaatatgtcagaaggtcgacatttaccttgggagttatgccaagaatttgaaaagttaaacttggatatagtcagcaaaggttttgtggctactttagaagctcaacctactctgtttgatcaagttagagaagctcaagtgaatgatcctgatatccaagaaataaaaaagaacatgagaagaggaaaagccatcggttatgtagaagatgagcaaggaactgtgtggttaggagaaagaatttgcgtgcctgataataaggagttgaaggatactatcatgaaagaagctcatgaaactttgtattccattcaccctggaagcattaagatgtaccaagacctaaagcaacaattctggtgggccagtatgcgacgtgagatagaagaatatgtggctctatgtgatgtatgtcagcgggtcaaggcagaacatcagaagccagccggtctgttacaaccgttgaagattccagagtggaagtgggaagaaataggaatggattttataaccggtctacccagaacgtcggcaggacatgattctatttgggtagtggttgataggttgacaaaactcgctcacttcataccggtcaaaacaacttacacggggaataagcttgcagagttatacatggccagagtggtatgcttgcatggtgttcctaagaagatagtgtcagatagaggtagccagtttacttcaaagttttggcagaaattacaagtagagatgggtacccgtttgaatttcagtaccgcttatcaccctcaaacagatggtcagacggaaagagtaaaccaaattttagaagatatgttgagagcctgtgttctagattttggtggaagttgggataagaatcttcgaagtaagcgagaggaataccaggaatcgcgttatacggttctgcaagttgctatttactttgctccttgccctcctaagtgcttatctgactcttcctccgccctcttctgggagtttagatggctagccgcccccgccgtgcagctcgtgcaccagcccactttggttttgaagatggtagagtcgagccagaagaaaatcatgagtcagccaatgagcagtctcaacacagcaaccgttcgcaccgtactgcttcccgcaacgcagaagttgagcaaccccgccgtagcgaccgctcgcatcgcacagcttcccgtgatgcagagatggaacagtctcaccgctctcaccgctctgccagtcacaattctggagaagaacgcctcccttccccacctcatgtggaaaacaacatgaagcacttaatggcagttcagacacaaatctggcaaggattagtcgacacagacaagaagaagatcaggaaattcttgaaagggatcgcagttggaatgagactccagttgcttgctcatgatttccccacttttcaacatatgatcaacaatatccgaaaagatttcgagatcttctgtgatgcatcaagacaaggcttaggatgtgtcctaatgcaagaacgaaaggttgtggcctatgcatcccggcagctcaggcctcatgaagtcaattatcctacccatgatctcgagttggcagccgtggttcatgctcttaagatctggaggcactatttaatcgggaatagatgtgaagtatacaccgatcacaaaagtcttaagtatatcttcactcagaccgagttaaatatgaggcagagaagatggctggaactaatcaaggattacgatcttggaatccattaccaccccggtaaagctaacgtggtcgctgatgcgctaagtcgcaaggcctattgcaatgtagctcaaatacggcctgaccaagatcgcctgtgcagataaatggagaagttaaggctgaccgtggtacagtcaggtgtccctgctagcttgacagtacagcctaccctagaatcgcaaattcgggaggctcagaaagatgacgaagggataaaagagttaataaaaagaatacaggagaagaaagacaccaatttctccatagacgatcaaggcacagtttggtgcggtccacgcatctgtgtaccggccaagaaggagttaagagatctcatcctaaaggaagctcatgagtccgcctactccattcatccaggaagtacgaagatgtaccaagatatcaaggcatacttctggtgggctggaatgaagcgagatgtcacagaatacgtagccttgtgtgacatttgccaaagagtcaaggcagaacatcagaggccagctggtctgctgcaacccctaccgattcccgagaggaaatgggaagagatcggaatggatttcatcaccggtttgccaagaacccctagcgggtacgactccatctgggtaatcgtggaccgactcacgaaatcagctcatttcatgccagtgaaaaccacctttgatggaaaggaactagcagagaagaccatcaagttctacaaagtccaatggagcaaccattctgaagatgaggcaacctgggagcgagaagatcttctc

SEQ ID NO: 96591 - DNA, 2040 bp, Oryza sativa
  Clone ID: PAT_MRT4530_94673C.1
atgggggtcgctggggagtccattgcctctggttttgagggggagattatgatccaggaacggtgcactgtgatgccgccccattcaccgagaaatttgatcaaggtgttaggattcgtcagggagctgaggttgatggcttttgagtatcatcctcacaagcctcatggtcaagattatggaacttacacctatcctgatggtgaggagagtgccactctgatgcaggcggtgcatatgcttagttctatgtatgcagtaagtgtggagcgagacaaagccgctcatgacagggaaaactggaatcgaggcaagatttgcaagttggagagtaaggtgtaccgtctacagaaggaattagctgagcttaaaggagagacgccgccgccaacacccaagcttcacctcaccgcaaggaagagaacctgtccaccacctcgtctccagttagcttcgaagcttcgcgtgatgggagatgctgtgccagatcgtgctgaacctgtcatccacgtcttaagtgatgaggaagaagaggaatacccagaagaaagaatggtgaacacgcgcactggaagtggaagtggagctgctaacaatggaggagattccacgctagctcagattttggcccaacaaacacaactgatcaatctgttagtgcagcaggcacagaatcagcaggcaaacaaccagaaccagaatcaacccccacctccccaaaacaagttggcagatttcttacgtctgcatggtcccgctgctgaatggtgggatcactttcgccaagccagggctgaaggagaacctatcacttggcaggaattcacggccgctttcaagaacacgcacataatgacaggtgttgtagctctgaagaagagagaatttagagcgctcaaccagggatctcgttcggtcactgagtacctccatgatttcaatcgtttagctcgctatgctccaaaatatgttcgcaccgatgaagaacgtcaggagaagtttttggagggactgaatgatgagttgtcttatgctttgatgtctacggatttccgggatttccagcagttagtggacaaggctattcgtcaggaagacaagtacaatcgaatagagcagaagaagcgcagggctgcccaatttaaggctcaacagggcagtaaccagaggtcgcgtctcgttacgggacctcaagctacatcataccctcaaggaggatcttcgtcagttgctcgccctcaacgccagttctacaacaacaatactggtaatcgtggcaatgacaaccgcaacgtggtcgctcgtcctgcagcaactccagctaagaaccagcctgtcaggaaggaacagggaagcaagccaggggtgtgcttcaattgtggtgatccagggcactatgctgataagtgtcctaagcctcggcgtgtgaagaacgctccagccccgaacaactctaatactccagcaccgaaggcacgtgttaatcatgttgtagcggcagaagctcagaatgcaccagatgtggttttggatctagatgttatcttagggatggattggttatctcgtcacagaggagttatagattgtgccaaccgtaaggtgactttaaccagtagcaatggggaaaccgtttctttctttgtgtcctctcctaaatatcatggtgtgatcttaaaccaagttgctctacaagagatccccatagtacaagactacccagacgtgtttcccgaggatttgccaggtatgccacctaagagagacatagagtttcggatatacttggtacctggaaccaaccctatccataagagaccatacagaatggcagctaatgagttagctgaggtgaagagacaggtgggtgattttcttcagaaaggatacatcagacccagtacttcgccatggggagcaccagtcatctttgtggagaagaaagatcatactcagagaatgtgcgtggattattcagaagaattcagtggagcaatcattcagaagaagaagccacttgggagcgagaagatgaattga

SEQ ID NO: 96592 - DNA, 425 bp, Oryza sativa
  Clone ID: PAT_MRT4530_94674C.1
ttttgtttttttattttttggggtttttttttttttcttttttttttcgaaaaggtgattcagacgctctgggcaaatagcacgtgccaggatgttaaacaaatcccagcttttggcaaaaccaaaattcaatgggcgccggattcaaaactgctctaggcctaatattacatgaggcctttggttttgccggagattttgaatccacgggcccgggctaaccgtaacggaacaatagaccgatggttgaaggggtcctctcgcaacaaccgaaggtcggctcccgagagatcaattccgggcgggttaccacgggccccctattgaaaaaagtaaacggttgaacttgcccttaggaacgaaggtgtttcgttgccgctggactcctgaccacccgggggcttttccccgaggaagctgattaa

SEQ ID NO: 96593 - DNA, 5136 bp, Oryza sativa
  Clone ID: PAT_MRT4530_94675C.1
atgatgccaccccattcaccgagaaatttgatcaaggtgttagggttcgtcagggagctgaggttgatggcttttgaggtaggctatgaagttgctcccgagtatcgccaaatttcccatgaccccgacgaggagaagtgtcgtgttcgtgtgacgttggctagtgatagtgatgaccttccgtcttttaagttcgaagctggaggaagatcgtacagccatgcttgtcaagaggcagctttggtggccattggagagttgcgtcaacgctttgaagaagagttggattcatcagctttccagtatcatcctcacaagcctcatggtcaagactatggaacctatacctgtcctgacggtgaagagagtgccactctgatgcatgcggtgcatatgcttagtgctatggatgcagtaagtgtggagcgagacaaagcagctcatgacagggaaaactggaatcgaggcaagatttgcaagttggagagcaaggtgtaccgtctacaaaaggaattagctgaacttaaaggagaaacgccgccgccaacacccaagcatcgcctcactcaaagaaaaagaacctgtccgccacctcgtctccagttagcttcgaagattcgcgtgatgggtgaagctgtgcccgatcgtgctgaacctgtcatcgacatcataagtgatgaggaagaggaggaagaccctgaagaaagagagccagctactccagaggaagaagatccatcgcttcgttccgacacaaggcggatggtgaacacgcgcaccggaagtggaagtggaagtggaagtggagctactaacaatggaggagatcccacgctagctcagattctggcccaacaaacacaactgatcaatctgttagtgcagcaggcacagaatcagcaggcaaacaatcagaaccagaatccacccccacctccccaaaacaagctggcagatttcttacgcgtgagaccccctaccttttccagcaccaccaatccagtagaagcaggagattggctgcatgcggtggagaagaagttggatttgatccagtgtactgagcaggagaaagtttcttttgcttcgcatcaactgcatggtcctgctgctgaatggtgggatcattttcgccaaggcagggctgaaggagagcctattacgtggcaggaattcacggccgctttcaggaagacacacataccgtcgggtgttgtagctctaaagaagagagaatttagggcactcaaccagggatctcgatcggtcaccgagtacctccatgatttcaaccgtttagctcgttatgctccggaagatgttcgcaccgatgaagagcgtcaggagaaattcttggagggactgaatgatgagttgtcttatgctttgatgtctacggatttccgggatttccagcagttggtggacaaggcgattcgtcaggaagacaagtataaccggatggagcagaagaagcgcagggctgcccaattcaaggcacaacagggcagtaaccagaggccgcgtctcgttactggacctcaagttccatcgtaccctcaaggaggatcttcatcagttgtccgtccccaacgccagttctacaacaacaatactagtaatcgtggcaatgacaaccgcaacgtggttgctcgtcctgcagcaacttcagctcagaaccagcctgtcaggaaggaacagggaagcaagccagtgatatgcttcaattgcggtgatccaggacattatgctgataagtgtcctaagcctcggcgcgtgaagaacgctccagccccgaacaactccaatgttccagcaccaaaggcacgtgttaatcatgttgcagcagcagaagctcagaatgcaccagatgtggttttgggtacgttccctgttaactctatacccgcaactgtgctttttgattccggtgctacacattcctttttgtctaaaagttttacgagcaatcatgggatggaagttattagtctcgagagacctttactagttaataccccaggcaatcaagtattttcgacacagtattgtccttccgctactatagaaatagaagaagttcctttcccatcctcgcttatcttgctagaatccaaagatctagatgttatcttagggatggattggttatcttgtcacagaggagttatagattgtgccaaccgtaaggtgactttaaccagtagcaatggggaaacagtttctttctttatgtcctctcctaaatctcatggtgtgatcttaaaccaagttgctctacaagagatccccatagtacaagactacccagacgtgtttcccgaggatttgccaggcatgccacctaagagagagatagagtttcggatagacttggtacctggaaccaaccctatccataagagaccatacagaatggcagctaatgagttagttgaggtgaagagacaggtggaagatttgcttcagaaaggatacatcagacccagtacttcgccatggggagcaccagtcatctttgtggagaagaaagatcatactcagagaatgtgcgtggattatcgagcgttgaatgaggttactatcaagaataagtatcctctacccagaattgatgacctatttgatcaattggaaggtgctacagttttctccaagatagatctccgttctggatatcatcaacttcgaatccgtgaggaagatataccaaagaccgccttcacaactcggtatggtttgttcgaatgtaccgttatgtcatttggactcactaatgccccagcctttttcatgaatctgatgaacaaggtgtttatggaatatctggataagttagtcgtggtgtttattgatgacattcttatttactccaagacgaaggaagaacatgaagagcatcttcgtctagctttagagaaactacgtgaacatcagctttatgccaagttcagtaaatgtgaattttggttgtccgaagtgaagtttcttggtcatgtcatctcgtctggaggagtggcagtagatccaagcaatgtggagtcagtgttaagttggaagcaacccaagacggtttcagaaattcgtagtttccttggacttgcggggtattaccgcaggtttattgagaacttttcaaagatcgccagaccaatgactcgtctgcttcagaaggaagtgaagtacaagtggacagaggattgtgaacaaagtttccaagaactgaagaaaaggctagcgactgcgctggtgttaattttgcctgattcgaggaaaggtttccaagtgtattgtgatgcatctcgactcggtttgggttgtgtgttgatgcaagaaggaaaggtggttgcctatgcatctaggcaattacgtcctcatgagaataactacccaacgcatgacctagagttggcagctgtggtgcatgcattgaagatttggcgtcattatcttttcggtaaccgtacagaggtgtatacggatcataaaagtttgaagtacattttcactcaacctgatttgaacatgcgtcagcgaagatggttagagttgattaaagattatgatatggaaatctactatcacccggggaaagcaaatgttgtagccgatgctcttagcaggaaaagctactgtaatatgtcagaaggtcgacgtttaccttgggagttatgccaagaatttgaaaagttgaacttgggaatagtcagcaatggttttgtggccgctttggaagctaaacctactctgtttgatcaagttagagaggctcaagtgaatgatcctgatatccaagaaataaagaagaacatgagaagaggaaaagccatcggttatgtagaagatgagcaaggtactgtgtggttgggagaaagaatttgcgtcccagaaaataaggagttgaaggataccatcatgaaagaagctcatgaaactttgtattccattcaccctggaagcactaagatgtaccaagacctaaagcaacaattctggtgggccagtatgcgacgtgagatagcagaatatgtggctctatgtgatgtatgtcagcgggtcaaggcagaacatcagaagccagccggtctgttacaaccgttgaagattccagagtggaagtgggaagaaataggaatggattttataaccggcctacccagaacgtcggcaggacatgattctatttgggtagtggttgataggttgacaaaagtcgctcacttcataccggtcaaaacaacctacacggggaataagcttgcagagttatacatggccagagtgaaattacaagtagagatgggtacccgtttgaatttcagtaccgcttatcacccgcaaacagatggtcagacggaaagagtaaaccaaattttagaagatatgttgagagcctgtgttctagattttggtggaagttgggataagaatttgccgtacgcggaattctcatataacaacagttatcaagctagtatgcaaatggctccgtatgaagcattatatggccgaaagtgccgtacgccgctcctttgggatcaaaccggtgaacgtcaagtttttgggacggacatattgcgagaggcagaagaaaaagtgaagattatccaagaaaggttgcgcgttgctcagtcacgtcagaagagctatgccgacaatcgtcgcagagatttggctttcgaagaaggagattatgtataccttcgggttacgccgttacgaggtgttcatcgtttccagaccaaagagaaattggcaccgcgtttcgtgggaccttttaagattgtgagtcgaagaggtgaggtagcttatcagttggaattgcctccgtcaatggcgggaatacatgacgtgttccacgtgtctcagttgaagaaatgtttacgtgtacctacggaggaagcagatcctgatcgtatagagcttcaagaagatttaacttatgttgagaagccagtcagaatcttggaagtaagcgagaggaataccaggaatcgtgttatacggttctgcaaggttcagtggagcaatcattcagaagaagaagccacttgggagcgagaagatgaattgaagtcagctcatcctcatctcttcgccagttcttctgaatctcgaggacgagattccgtttaa

SEQ ID NO: 96594 - DNA, 4824 bp, Oryza sativa
  Clone ID: PAT_MRT4530_94676C.1
atgatgcctccccattcaccgagaaatttgatcgaggtgttaggattcatcagggagctgaggttgatggcttttgaggtaggctatgaagttgctcctgagtatcgccagatttcccatgaccccgacgaggagaaatgtcgtgttcgtgtgatgttggctagtgatcgtgaagaccttccgtcttttaagtttgaagctggaggaagatcgtactgccatgcttgtcaagaagtagctttggtggccattggagagttgcgtcaacgctttgaagaagagttggattcatcagctttccagtatcatcctcacaagcctcatggtcaagactatggaacctatacctgtcctgatggtgaagagagtgccactcttatgcatgtggtgcatatgcttagtgctatggatgcagtaagtgtggagcgagacaaagcagctcatgacagggaaaactggaatcgaggcaagatttgcaagttggagagcaaggtgtaccgtctacagaaggaattgtctgaacttaaaggagaaacgccgccaccaacacccaagctacgcctcgtcgcaagaaagagaacctgtccgccacctcgtctccagttagcttcgaagattcgtgtgatgggtgaagctgtgcccgatcgtgctgaacctgtcatcgacatcataagtgatgaggaagaggaggaagaccctgaagaaagagagccagctactccagaggaagaagatccatcgcttcgttccgacgcaaggcgggattatgcagcaggcacagaatcagcaggcaaacaatcagaatcagaatccacccctcctccccaaaacaagttggcagatttcttacgtgtgagaccccctaccttttcaagcacaaccaatccagtagaagcaggagattggctgcatgcggtggagaagaagttggatttgatccagtgtactgagcaggagaaagtttcatttgcttcgcatcagttgcatggacccgctgctgaatggtgggatcattttcgccaaggcagggcgggaggagaacctattacttggcaggagttcacagctgctttcaagaagacgcatataccaacgggtgttgtagctctaaagaagagagaatttagagcactcaaccagggatctcgttcggtcactgagtacctccatgatttcaaccgtttagctcgctatgctccggaagatgtccgcaccgatgaggaacgtcaggagaagtttttagagggactgaatgatgagttgtcttatgctttgatgtctacggatttccgggatttccagcagttggtggacaaagcgattcgtcaggaagacaagtataaccgtatggaacagaagaagcgcagggctgcccaattcaaggcacaacagggcagtaaccagaggccgcgtctcgttactggacctcaagctccatcgtaccctcaaggaggatcttcatcagttgtccgtccccaacgccagttctacaacaacaatactggtaatcgtggcaatgacaaccgcaacatggttgctcgtcctgcagcaacttcagttcagaaccagcctgtcaggaaggaacagggaagcaagccaggggtgtgcttcaactgtggtgatccaggacattatgctgataagtgtcctaagcctcggcgtgtgaagaacgctccaaccccgaacaactccaatgttccagcaccgaaggcccgtgtcaatcatgttgcagcagcagaagctcagaatgcaccagatgtggttttgggtacgtttcctgttaactctatacccgcaactgtgctttttgattccggtgctacacattcctttttgtctaaaagttttgcaagcaatcatgggatggaagttgttagtcttgggagacctttactagttaataccccaggcaatcaagtattttcgacacagtattgtccttctgttactatagaaatagaagaagttcctttcccatcctcgcttatcttattagaatgcaaagatctagatgttatcttagggatggactggttatctcgtcacagaggagttatagattgtgccaaccgtaaggtgactttaaccagtagcaatggggaaactgtttctttctttgtgtcctctcctaaatatcatggtgtgatcttaaaccaagttgctctacaagagatacctatagtacaagactacccagacgtgtttcccgaggatttgccaggtatgccacctaagagagagatagagtttcggatagacttggtccctggaaccaaccctttccataagagatcatacagaatggcagctaatgagttagctgaggtgaagaaacaggtggatgatttgcttcagaaaggatacatcagacccagtacttcgccatggggagcaccagtcatctttgtggagaagaaagatcatactcagagaatgtgcgtggattatcgagcgttgaatgaggtcactatcaagaataagtatcctctacccagaattgatgacctgtttgatcaactggaaggtgctacagttttctccgagatagatctccgttctggatatcatcaacttcgaatccgtgaggaagatataccaaagaccgccttcacaactcggtatggtttgttcgaatgtaccgttatgtcatttggactcactaatgccctagcctttttcatgaatctgatgaacaaggtgtttatggaatatttggataagtttgtcgtggtgtttattgatgacattctcatttactccaagacgaaggaagaacatgaagagcatcttcgtctagctttagagaaactacgtgagcatcagctttatgccaagttcagtaaatgtgaattttggttgtccgaagtgaagtttcttggtcaggtcatctcgtctggaggagtggcagtagatccgagcaatgtggagtcagtgttaagttggaagcaacccaagacggtttcagaaattcgtagtttccttggacttgcagggtattaccgcaggtttattgagaacttttcaaagatcgccagaccaatgactcgtctgcttcagaaggaagtgaagtacaagtggacagaggattgtgaacaaagtttccaagaactgaagaaaaggctagtgactgcgccggtattaattttgcctgattcgaggaaaggtttccaagtgtattgtgatgcatcccgactcggtttgggttgtgtgttgatgcaagaaggaaaggtggttgcttatgcatctaggcaattacgtcctcatgagaataactacccaacgcatgacctagaattggcagctgtggtgcatgcattgaagatttggcgtcattatctttttggtaatcgtacagagatatatacggatcataaaagtttgaagtacatcttcactcaacctgatttgaacatgcgtcagcgaagatggttagagttgattaaagattatgatatggagatccactatcacccgggaaaagcaaatgttgtagccgatgcccttagcaggaaaagctactgtaatatgtcagaaggtcgacgtttaccttgggagttatgccaagaatttgaaaggttgaacttgggaatagtcagcaaaggttttgtggctgttttagaagctaaacctactctgtttgatcaagttagagaagctcaagtgaatgatcctgatatccaagaaataaagaagaacatgagaagaggtaaagccatcggttttgtagaagatgagcaaggtactgtgtggttaggagaaagaatttgcgtcccagaaaataaggagttgaaggatactatcatgaaagaagctcatgaaactttgtattccattcaccctggaagcactaagatgtaccaagacctaaagcaacaattctggtgggccagtatgcgacgtgagatagcagaatatgtggctctatgtgatgtatgtcagcgggtcaaggcagaacatcagaagccagccggtctattacaaccgttgaagattccagagtggaagtgggaagaaataggaatggattttataaccggtctacccagaacgtcggcaggacatgattctatttgggtagtggttgataggttgacaaaagtcgctcacttcataccggtcaaaacaacctatacggggaataagcttgcagagttatatatggccagagtggtatgtttgcatggtgttcctaagaagatagtgtcagatagaggtagccagtttacttcgaagttttggcagaaattacaatcagaattggatacccgtttgaatttcagtaccgcttatcaccctcaaacagatgacatattgcgagaggcagaagaaaaagtgaagattatccaagaaaggttgcgcgttgctcagtcgcgtcagaagagttatgccgacaatcgtcgcagagatttggctttcgaagaaggagattatgtataccttcgggttacgccgttacgaggagttcatcgtttccagaccaaagggaaattggcaccgcggtttgtgggaccttttaagatcgtgagtcgaagaggtgaagtagcttatcagttagagttgcctccgtcaatggcgggaatacatgatgtgtttcatgtgtctcagttgaagaaatgtttacgagtacctacggaagaagcagatcctgatcgtatagagcttcaagaagatttaacttatattgagaagccggtcagaatcttggaatttccgacgttccggaggagagcgtttccgttgaggaaggttccgaagcgtttgcggaagcccaaggcaagtcacacagatcccaaacaaccctttgagcatgttgaacccatttaa

SEQ ID NO: 96595 - DNA, 384 bp, Oryza sativa
  Clone ID: PAT_MRT4530_94677C.1
atgacatccatctcggaccctttgtataaatgggtatagccggagcttcgatatatttcattcacatatgcctcacccaacaacatatagtcccagcagataccacttttacatatagtcagagagagatcaggtgaaacaaaatcaaatgcatagcacggccgtgaaaatcaacggacgctgaccactctgaaaacacacgcaacaaggtggtagacatacttgactccggtacgctcacactgcagggctcacattgacgacaacggctacgacgacaacaatctatggagatgccggaggcttgattgcaacgaaaatcaacagcttgagcggcttgtccttggcgcagccctttgttccggcctactcagccttgaccac

SEQ ID NO: 96596 - DNA, 4377 bp, Oryza sativa
  Clone ID: PAT_MRT4530_94678C.1
atgccgaagatggtggtggaggtggccgaccggtacacggcgaggagggacgggcggccgaacaactccggcgaggcggacggagaggttcgcggcgacgttccggcgaaaccgagggcaggccggggtggagggcgatgcggcgtcgccgagggaggagacggcgacgtcggccgacgctctggcgcggcgaccggggcagccggaggagatgtcgacgaggaggaaggtgaggccggcgcgggcgacggcgttccggcgaaattcgggcgaggaggaggtgatgccggggaagaaggcgatgccgcggtgtcgaaggaggagacggcggcgtcgatcggcgcaccggcgatgaacagcagccggctggagggagtacagtggcaccaatgccactggttgccggcgggggcaccgttccggcgagtttccggcgaggagacgatgccgccccattcaccgagaaatttgatcaaggtgttaggattcgtcagggagctgaggttgatggcttttgaggtaggctatgaagttgctcctgagtatcgccggatttcccatgaccccaacgaggagaagtgtcgtgttcgtgtgacgttggctagtgatcgtgaagaccttccgtccattaagttcgaagctggaggaagatcgtacagccatgcttgtcaagaagcagctttggtggccattggagagttgcgtcaacgttttgaagaagagttggattcatcagctttctatgctatggatgcagtaagtgtggagcgagacaaagcagctcatgacagggaaaactggaatcgaggcaagatttgcaagttggagagcaagttagcttcgaagattcgcgtgatgggtgaagttgtgcccgatcgtgctgaacctgtcatcgacatcatggtgaacacgcgcaccggaagtggaagtggagctgctaacaatggaggagatcccacgctagctcagattctggcccaacaaacacaactgatcaatctgttagtgcagcaggcacagaatcagcaggcaaacaatcagaaccagaatccacccccacctccccaaaacaagctggcagatttcttacgtgtgagaccccctaccttttcaagcaccaccaatccagtagaagcaggagattggctgcatgcggtggagaagaagttggatttgatccagtgtactgagcaggagaaagtttcttttgcttcgcatcaattgcatggtcctgctgctgaatggtgggatcattttcgccaaggcagggctgaaggagagcctattacttggcaggaattcacggccgctttcaagaagacacacataccaacgggtgttgtagctctaaagaagagagaatttagagcactcaaccagggatctcgttcggtcaccgagtacctccacgatttcaaccgtttagctcgttatgctccggaagatattcgcaccgatgaagagcgtcaggagaagttcttagagggactaaatgatgagttgtcttatgccttgatgtctacggatttccgggatttccagcagctggtggacaaggcgattcgtcaggaagacaagtataaccggatggagcagaagaagcgcagggctgcccaattcaaggcacaacagggcagtaaccagaggccgcgtctcgttacgggacctcaagctccatcgtaccctcaaggaggatcttcatcagttgtccgcccccaacgccagttctacgacaacaatactggtaatcgtggcaatgacaaccgcaacatggttgctcgtcctgcagcaactccagctcagaaccagcccgtcaggaaggaacagggaagcaagccaggggtgtgcttcaattatggtgatccaggacattatgctgataagtgtcctaagcctcggcgcgtgaagaacgctccagccccgaacaactccaatgctccagcaccgaaggcacgtgttaatcatgttgcagcagcagaagctcagaatgcaccagatgtggttttggaaatagaagaagttcctttcccatcctcgcttatcttgctagaatccaaagatctagatgttatcttagggatggactggttatctcgtcacagaggagttatagattgtgctaaccgtaaggtgactttaaccagtagcaatggggaaaccgtttctttctttgtgtcctctcctaaatatcatggtgtgtttttaaaccaagttgctctacaagagatccccatagtacaagactacccagacgtgtttcccgaggatttgctaggtatgccacctaagagagacatagagtttcggatagacttggtacctggaaccaaccctatccataagagaccatacagaatggcagctaatgagttagctgaggtgaagagacaggtggatgatttgcttcagaaaggatacatcagacccagtacctcgccatggggagcaccagtcatctttgtggagaagaaagatcatactcagagaatgtgcgtggattatcgagcgttgaatgaggttactatcaagaataagtaccctctacccagaattgatgacctgtttgatcaactggaaggtgctacagttttctccaagatagatctccgttctggatatcatcaacttcgaatccgtgaggaagatataccaaagaccgccttcacaactcggtatggtttgttcgaatgtaccgttatgtcatttggactcactaatgccccagcctttttcatgaatctgatgaacaaggtgtttatggaatatctagataagtttgtcgtggtgtttattgatgacattcttatttactccaagacgaaagaagaacatgaagagcatcttcgtctagctttagagaaactacgtgagcatcagctttatgccaagttcagtaaatgtgaattttggttgtccgaagtgaagtttcttggtcatgtcatctcatctggaggagtggcagtagatccaagcaatgtggagtcagtgttaagttggaagcaacccaagacggttcaaaaatttcgtagtttcttggacttggcgggaagtgaagtccaagtggacagagattgtgaacaaagtttccaagaactgaagaaaaggctagtgactgcgccggtgttatttttgcctgattcgaggaaaagtttccaagtgtattgtgatgcatcccgactcggtttgggttgtgtgttgatgcaagaaggaaaggtggttgcctatgcatctaggcaattacgtcctcatgagaataactacccaacgcatgacctagagttggcagctgtggtgcatgcattgaagatttggcgtcattatcttttcggtaaccgtacagagatgtatacggatcataaaagtttgaagtacattttcactcaacctgatttgaacatgcgtcagcgaagatggttagagttgattaaagattatgatatggaaatccactatcacccagggaaagcaaatgttgtagccgatgctcttagcaggaaaagctactgtaatatgtcagaaggtcgacatttaccttgggagttatgccaagaatttgagaagttaaacttggatatagtcagcaaaggttttgtggctactttagaagctcaacctactctgtttgatcaagttagagaagctcaagtgaatgatcctgatatccaagaaataaaaaagaacatgagaagaggaaaagccatcggttatgtagtagatgagcaaggaactgtgtggttaggagaaagaatttgcgtcccagataataaggagttgaaggatactatcatgaaagaagctcatgaaactttgtattccattcaccctggaagcactaagatgtaccaagacctaaagcaacaattctggtgggccagtatgcgacgtgagatagcagaatatgtggctctatgtgatgtatgtcagcgggtcaaggcagaacatcagaagccagccggtctgttacaaccgttgaagattccagagtggaagtgggaagaaataggaatggattttataaccggtctacccagaacgtcggcaggacatgattctatttgggtagtagttgataggttgacaaaagtcgctcacttcataccggtcaaaacaacctacacggggaataagcttgcagagttatacatggccagagtggtatgtttgcatggcgttcctaagaagatagtgtcagatagaggtagccagtttacttcgaagttttggcagaaattacaagtagagatgggtacccgtttgaatttcagtaccgcttatcaccctcaaacagattgtcacgcccggaaattcactagtaatttccgaacttatttgtgcataaaatcctcgtctaggaatcagccgaggtacacaaactga

SEQ ID NO: 96597 - DNA, 845 bp, Oryza sativa
  Clone ID: PAT_MRT4530_94679C.1
atgtctcatctgagccttttgaccttcaagtacaatcttgagaagctcaagtccaaggccgcaggccggccaaccggccggctgctgtccggcggggaccggcagttctccgacttgacgaggatctacaagcctgacgacgacgagatgaagaaagtgttcaacaagatcgccggcgagcacgaccggatcaccaggaaggatctgaaggggctcctggagaagttcgggaaagccgacgccgcggccgaggcgaggcggatgatctgcgtcgccgacttcaagaagaacggctacatggacttcgaagagttcatggaggtgcacaagagcggcgtgccgctgggggacatgcgccgggcgttcttcgtgttcgaccaggacggcgacggaaggatcagcgccgaggaggtgatgcaggtgctgcacaagcttggggacagctgcagcctggaggattgcagggagatggtgaagaagattgacaggaaccgtgatggcttcgtggacatggatgatttcatggccatgatgactcgctcaaggaagaagccttgagcctcctggaggctggagcatcctgatgtagatgagagccctagatattcatgcgcatgcatatgtgaattgtgatagtagggaataagttgagcaggggcttgaacttaacccctccacctagcttatgagaggttgcgagctaatgtgaaataaggagatgcagctactgtggtgtatcatggcgtgtaataaacatgtaaggcgaatcgtgggagactttccatgcatgtccttgtgggagtactatttcccagcacccaattagattactccataaaaaaaaa

SEQ ID NO: 96598 - DNA, 226 bp, Oryza sativa
  Clone ID: PAT_MRT4530_9467C.1
gcagccttcaaaacagcagcgcatttttttttcttatcagctattgagagtacaaggataacaacaaaaatcctgaaaaggatgtgttctgcaaatccaacttcatcaaaaaaaaaaaaacttggaagaaaacactattacgtgtaggtccgggtagaagaaaataactcgatagttctaattgatgctcgcatgaactctagttctaattgatgctagcattaac

SEQ ID NO: 96599 - DNA, 990 bp, Oryza sativa
  Clone ID: PAT_MRT4530_94680C.1
atggacctgctgctgaatggtgggatcattttcgccaaggcagggctgaaggagagcctattacgtggcaggagttcacggccgctttcaagaagacgcacataccagcgggagaagttcttggagggactaaatgatgagttgtcttatgctttgatgtctacggatttccgggatttccagcagttggtggacaaggcgattcgtcaggaagacaagtataaccggatggagcagaagaagcgcagggctgcccaattcaaggcacaacagggcagtaaccagagaccgcgactcgttactggacctcaagctccatcgtaccctcaagtaggatcttcatcagttgtccgtccccaacgccagttctacaacaacaatactggtaatcgtggcaatgacaaccgcaacatggttgctcgtcctgcagcaacttcagctcagaatcagcccgtcaggaaggaacagggaagcaagccagtgatatgcttcaattgtggtgacccaggacattatgctgataagtgtcctaagcctcggcgcgtgaagaacgctccagccccgaacaactccaatgttccagtaccgaaggcacgtgttaatcatgttgcagcagtagaagctcagaatgcaccagatgttgttttggcctttttcatgaatctgatgaacaaggtgtttatggaatatctggataagtttgtcgtggtgtttattgatgacattcttatttactccaagacgaaggaagaacatgaagagcatcttcgtctagctttagagaaactacgtgagcatcagctttatgccaagttcagtaaatcggcggctcggcttgacggcgacggcggagctccggtggtcggcggcgaaggggaacgggcggccgagattcctctcaccacggcgcacctaacggcggcgacggcaaacggcggcgacggcggaggcgacggcgcggcgcaactggagatcgccggcgacggctag

SEQ ID NO: 96600 - DNA, 3024 bp, Oryza sativa
  Clone ID: PAT_MRT4530_94681C.1
atgcacataccagcgggtgttgtagctctaaagaagagagaatttagagcactcaaccagggatctcgttcggtcaccgagtacctccatgatttcaaccgtttagctcgttatgctccggaagatgttcgcactgatgaagagcgtcaggagaagttcttggagggactgaatgatgagttgtcttatgccttgatgtctacggatttccgggatttccagcagttggtggacaaggcgattcgccaggaagacaagtataaccggatggagcagaagaagcgcagggctgcccaattcaaggcacaacagggcagtaaccagaggctgcgtctcgttgtgggacctcaagctccaccgtaccctcaaggaggatcttcatcagttgtccgcccccaacgccagttctacaacaacaatactggtaatcgtggcaatgacaaccgcaacatggttgctcgtcatgtagcaactccagttcagaaccagcccgtcaggaaggaacagggaagcaagccaggggtgtgcctcaattgtggtgatccaggacattatgatgataagtgtcctaagcctcggcgcgtgaagaacgttccagccccgaacaactccaatgctccagcaccaaaggcacgtgttaatcatgttgcagcagcagaagctcagagtgcaccagatgtggttttggctaatgagttagctgaggtgaagagacaggtggatgatttgcttcagaaaggatacatcagaccctgtacttcgccatggggagcaccagtcatctttgtggagaagaaagatcatactcagagaatgtgcgtggattatcgagcgttgaatgaggtcactatcaagaataagtatcctctacccagaattgatgacctgtttgatcaattggaaggtgctacagttttctccaagatagatctccgttctggatatcatcaacttcgaatccgtgaggaagatataccaaagaccgccttcacaactcggtatggtttgttcgaatgtaccgttatgtcatttggacttactaatgccccagcctttttcatgaatctgatgaacaaggtgtttatggaatatctggataagtttgtcgtggtgtttattgatgacattcttatttactccaagacgaaggaagaacatgaagagcatcttcgtctagctttagagaaactacgtgagcatcagctttatgccaagttcagtaaatgtgaattttggttgtccgaagtgaagtttcttggtcatgtcatctcgtctggaggagtggcagtagatccaagcaatgtggagtcagtgttaagttggaagcaacccaagacggtttcagaaattcgtagtttccttggacttgcagggtattaccgcaggtttattgagaacttttcaaagatcgccagaccaatgactcgtctgcttcagaaggaagtgaagtacaagtggacggaggattattatgatatggagatccactatcacccggggaaagcaaatgttgtagccgatgctcttagaaggaaaagctactgtaatatgtcagaaggtcgacgtttaccttgggagttatgccaagaatttgaaaaattgaacttgggaatagtcagcaatggttttgtggccgctttagaagctaaacctactctgtttgatcaagtcagagaagctcaagtgaatgatcctgacatactagaaatcaaaaagaacatgagaagaggaaaagccatcggttttgtagaagatgagcaaggaactgtgtggttaggagaaagaatttgtgtcccagataataaggagttgaaggatactatcatgaaagaagctcatgaaactttgtattccattcaccctggaagcactaagatgtaccaagacttaaagcaacaattctggtgggctagtatgcgacgtgagatagcagaatatgtggctctatgtgatgtatgtcagcgggtcaaggcggaacaccagaagccagccggtctgttacaaccattgaagattccagagtggaagtgggaagaaataggaatggattttataaccggtctacccagaacgtcggcaggacatgattctatttggatagtggttgataggttgacaaaagtcgctcatttcataccggtcaaaacaacctacacggggaataagcttgcagagttatacatggccagagtgttgaagaaatgtttacgtgtacctacggaggaagcagatcctgatcgtatagagcttcaagaagatttaacttatgctgagaagccagtcagaatcttggaagtgcgcacggaggtgaggaagctcggccgcatctccttcgtcgccgccggtcgccgtagctcgctgccgacggtgtcctccaatcacccggccgaccgccctagctccggcgaggtcgccaacccgagtcggccggtcatggatgacgtcatgctgacccgcgctgccgtgcctgtgccgctgctgccgctgccatgtgctgtgcttgctgctccgccactgcaccgctgctcgctgcgccgctactgccactgctgtgccgctgcattgccgcgccggctgccgccttgctgtgctggccgtttcgccttgcctcgccacgccaccacgccgcttagccgctgtgctgtgcgctgccttgtcgcaccactgctgcacgctgccgccatgtcgcgcaccaccatcgcattgtcgccactgccgccgtgccgctgtgtctctccctgccacagccatgccgctgctgcagtgtgtcgccgctccgccaccacgccgcttgccgccaagcgcaaccgcgccgctgccctagcatcgccactgccgtgccgcaccaccaagctgtgccgtcacttggccgagccgtgctgcagcctggcactacttgccggctcagccgagccattgctaccgctcggtagtcgccttgccgagtcgcggttgagtcgctgccgctgccgcgtgtcgaaacatgatttcggcaatataaaaggggtagcgcacaagacctaa

SEQ ID NO: 96601 - DNA, 263 bp, Oryza sativa
  Clone ID: PAT_MRT4530_94682C.1
aattacgggatgcatgggctggctgctcctcttgttcggatgactaagactgagatcgaccactatttacaggctgatgtcaaggatactcactgacccgcatgtgttatgatgatgttgggcggtgctccaatcagagaaatgctcaattcttgtgttcgtgtctcttttggaacactatggaccgacacgcagtacctgtatgagccttgatgataagatctacctagcctgaattataaacacatgctgtgaggcctgca

SEQ ID NO: 96602 - DNA, 3249 bp, Oryza sativa
  unsure (1)..(3249): unsure at all n locations
  Clone ID: PAT_MRT4530_94683C.1
atggtgaacacgcgcaccggaagtggaagtggaagtggaagtggagctgctaacaatggaggagatcccacgctagctcagattctggcccaacaaacacaactgatcaatctgttagtgcagcaggcacagaatcagcaggcaaacaatcagaaccagaatccatccccacctccccaaaacaagctggcagatttcttacgtgtgagaccccctaccttttcaagcaccaccaatccagtagaagcaggagattggctgcatgcggtggagaagaagttggatttgatccagtgtactgagcaggagaaagtttcttttgcttcgcatcaattgcatggtcctgctgctgaatggtgggatcattttcgccaaggcagggctgaaggagagcctataacttggcaggaattcacggccgctttcaagaagacacacataccaacgggtgttgtagctctaaagaagagagaatttagagcactcaaccagggatctcgttcagtcaccgagtacctccatgatttcaaccgtttagctcgttatgctccggaagatgttcgcaccgatgaagagcgtcaggagaagttcttggagggactgaatgatgagttgtcttatgccttgatgtctacggatttccgggatttccagcagttggtggacaaggcgattcgtcaggaaaacaagtataaccggatggagcagaagaagcgcagggctgcccaattcaaggcacaacaaggcagtaaccagagaccgcgtctcgttacgggacctcaagctccatcgtaccctcaaggaggatcttcatcagttgtccgcccccaacgccagttctacaacaacaatactggtaatcgtggtaatgacaaccgtgacatggttgctcgtcctgcagcaactccagctcagaaccagcccgtcaggaaggaacagggaagcaagccaggggtgtgcttcaattgtggtgatccaggacattatgctgataagtgtcctaagcctcggcgcgtgaagaacgctccagccccaaacaactccaatgctccagtgccgaaggctcgtgttaatcatgttgcagcagcagaagctcaaaatgcaccagatgtggttttgggtatgccacctaagagagacatagagtttcggatagacttggtacctggaaccaaccctatccataagagaccatacagaatggcagctaatgagttagctgaggtgaagagacaggtggatgatttgcttcagaaaggatacatcagacccagtacttcgccatggggagcaccagtcatctttgtggagaagaaaaatcatactcagagaatgtgcgtggattatcgagcgttgaatgaggttactaccaagaataagtatcctctacccagaattgatgacctgtttgatcaactggaaggtgctacagttttctccaagatagatctccgttctggatatcatcaacttcgaatccgtgaggaagatataccaaagaccgccttcacaactcgcaaaggttttgtggctactttggaagctcaacctactctgtttgatcaagttagagaagctcaagtgaatgatcctgatatccaagaaataaaaaagaacatgagaagaggaaaagccatcggttatgtagaagatgagcaaggaaccgtgtggttaggagaaagaatttgcgtcccagataataaggagttgaaggatactatcatgaaagaagctcatgaaactttgtattccattcaccctggaagcactaagatgtaccaagacctaaagcaacaattctggtgggccagtatgcgacgtgagatagcagaatatgtggctctatgtgatgtatatcagcgggtcaaggcaaaacatcagaagccagccggggtggggaagcccggtcgcacctccgccctcgccgccggccgtcggagccccgtcgccgccgccgaccatccaatctccggcgaggtcgccaacccgggccggccattgatgatactgagaagcggcgagaagtccgtgtgggtcgctggggagtccatgcctctagttgtagagggggtgattatgatccagatagaaattttgggcgtgacagcttctgagccatacacgaggaagaagggtctctccttgttggacgttgtcggtgtgcactatgccgtttgccctttcgacttgtccattgctctgagggtgagaaaccgaggcgaagcaaatcttgactcccaatccaatacagtaatcctggaagtcagcgctgatgaactgagagccgttgtctgttatgatgcggtgaggcaatccatatctgcagaatatccctttgacaaacttgatggcattatcggccttgatttctcctgtgggcgttgcctcaatccacttggtgaatttgtcgatggacacaaacaggaacttgtggccgccttgtcctcgtgggaatggtctgagtatgtcgagccccagcacgagaacggccaagaggagatgtttgccgtcgtcggacgagatgcatttgagaagtactccgtttggagcctttttgtacagatctttgccgatcatacagtagattttggcttgtcgggttatcttctcagcttctctgtcgtcttcgggcaactcatcactactcagcaacttaatgagcggggtccgccagtcttccgtggtcttgatatcggcaacgacccgagggagagggcgcgcggaccgggtccacgggagtggggcccacacgtcagcctctcggtccacggtggaccgggtgcacgcggctggcgccggccggcgccgtgggtcccacgcgtcagccgcacccgcgggcgcgggcggctgacggccgggccctacctggcagccgcggggcgtgcccggaggcggcccttcccggcacagccgacgggagacggcgcacccgcgccccgatggtcaccgcccggcgaccaccggcgcggcggaacggcgcccgagagagcggagagganaggaacgaaggggcggtccacggctcaccccgggtcgacggcaacgacgggaacggcggccgaagcggaggaaggcggcggcgcggttcgggacgacgaggacgacggcgctccgacggtcggcgggcgaaacggaggcgcggacgaggtcgacgaggacgctgcgaagccgatggaggtgacgccgagacgggaggaggcgcgcggggacggcgggatgcggcggattcggcggcggcggcggcgctag

SEQ ID NO: 96603 - DNA, 3042 bp, Oryza sativa
  Clone ID: PAT_MRT4530_94684C.1
atgtccgcaggacagtctcagcgctcggttgtctcgagcgcgcggctccggcaggatgccgagctcaccgcggcagaggaacgcgagcgagtggcggcaaagaccgctgcgatgacagcgagggcatcaaggctggcggcggcggaattggcagtggcaagggcggaagtggaagcagcagcggcaacggatgcagcgcgtgcagcggcggcggagctcaaggctctacgcggcagtagcaccagcagctctgtctccgcctacggcagcaccgatgatgagctgatgagggaggcagctcgtgagcaggcagagcagaagcggactgccaaggaggcctgggacgccatcgctgcggcacacatcggcagcgaccgcgctcgcaagtccacactacaggcgcttcgcaaggagtgggagaacctggccttcaagccaggtgaggacgctgatgacttttccctccgtctcaatactctgctgcagaagatggtgcagtacgacggcgacaactacgacgaggagagagtagtcgagaatattttccgttgcgtcctagagaagtacaagagcagtgggaggcctgtcaggatgacgagaggaagggggagtcctcttcctcgacaggcggccgtaagcagcgcaaggcgcacggaggtgtccagctgcagtgggcgcgaagacgcgtcgagggtggcgcttgcagaggcgcccagggcggcgccgctggcaaccacaagctggcacgagacgacgcctgccgcaactgtggcaagcttggccattgggccaaatactgtcgacagccgacgcggccaggcccacgttgcacaggtggaagaggaagagccggctctactcttggcacacgcaagcatcgagctacctccagcggcatcggccgcagcggctctcctccaccttgatgagccgaaggcacatgccttcctcggagatggctctagcaacgacaagactgatgggtggtacctcgacaccggcgccacccatcacatgactggcctacaagagttcttcaccaagtttgactccagcgtccgaggctccgtcaagtttagggatgcctctggcgtggagatcaagggtgtcggttccgtcaccttcaccgccaagtccggtgagcacaggctgctcactggagtctactacttccccccattaaagaactcaatcatcagcgtgggacagctggatgagaatggttcacgcgtgttggtcgagcatggagtcatgagtatttgggatcgccgccgttgtcttcttgccaaggtggcacaaccggtttgccaagccacccattgggacgacgaggagtggcagtggcacgagcgcttcgggcagctccacttcgaggctctgaagcagctcagtgccaaggagatgcctgcagtagaacggcgtcgtcgagcggcacaaccagacggttgtggggatggctcgggctctcctcaagcagagagagatgctggccgtcttctggaagaggtggtggtgatggctgtctacatcctcaaccgctcgcataccaaggccctcaacgacaggacacgtacgaggcttcgcattgtcgcaagccggcagtctcccacctgcgggtcttcggctgcctcatgtttgccaaggagcacgaccacatcggcaagctcgatgacaggagcaccccaggggtgttcatcggctatgcggagggctcgaaggcctaccgcattctcgacccggagacacagcgtgtgcgcacggcgtagtgttcgactaagggcgagggtgggcatgggacaaggcggtggacgatggctcgactctgacgtacgacgatttcactgtcgagtacgtccacttcgagggagctggggagtaggcagctgttcctcctcaccaagcatacctaccccagtccccgagtttccaccgactccggcagcaacacactctcaagctacgacttcagttgcgacgagttcttcaccgacaccaccacaatcagctaccccacgcactccagcaccaacaaccaccctaatgggcacgtccactcccatgccagctcgtgttgagcatagcccggtagagttcactacttcgctcttccacaacaaggagcaaatcgacacgtaccacgatggcgagccgctgcggtaccgtacgatggaggaccttctcggcgaccagccggtgccgggactggtgcctcgtgacctagaggcgcaattgcaccttgtgtgcaatgatagtgagcctcggtcattcgtagaggccttgagacacgcggcatggtgtgccgcgatgcagtcggagatggacgcgattgaggagaaccgcacctgggagctttctgacctctctcgtggtcaccgcgcgatcacccttaattgggtgttcaagctgaagagggatgaagccggagccattgtcaagcacaaggctcacttggaaggccggtgtgttcatcacatggacgtcaagtcggcgtttctaaatggcgatttgaaggaggaggtctacgtgcaccagccgctgggatttgcgatccccagcaaggagggcaaggtgctacgcctgcacaaggccctctatggcttgcggcaggcaccgagggtgtggaatgccaagctggattccatgctcaaggggatgggcttcgagcaaagcccgcacgaggcggccatctaccgatggggcaatggtggaaatgccctgctggtgggtgtctatgtcgacgacgtggtgatcaccggcaccaaggatgcagagactagagcggtggagctcagggtggacagcaagtctgctctggccctggcaaggaaccccgtttttcacgaacggagcaagcacatctgggtgaggtaccacttcatccgaggctgcttggaggaagggagcatcaaggcgagctacatcaacaccaaagaccagcttgcggacctgcgcaccaagccccttgggaggatcaagttcctcgagctttgctccaggattaggatggcccaactttcctacaagacgatgcataagacttag

SEQ ID NO: 96604 - DNA, 566 bp, Oryza sativa
  Clone ID: PAT_MRT4530_94685C.1
atggtgcagtacgacggcgacaactacgacgaggagagagtagtcgagaatattttccgttgcgtcctagagaagtacaacgatgagccacaacctttctcggggcataccaccattggcgggaagctccatctcactcaggagcagtgggaggcctgtcaggatgacgagaggaagggggagtcctcttcctcgacaggcggccgtaagcagcgcaaggcgcacggagaggcgcccagggcggcgccgctggcaaccacaagctggcacgagacgacgcctgccgcaactgtggcaagcttggccattgggccaaatactgtcgacagccgacgcggccaggcccacgttgcacaggtggaagaggaagagccggctctactcttggcacacgcaagcatcgagctacctccagcggcatcggccgcagcggctctcctccaccttgatgagccgaaggcacatgccttcctcggagatggctctagcaacgacaagactgatgggtggtacctcgacaccggcgccacccatcacatgactggcctacaagagttcttcaccaa

SEQ ID NO: 96605 - DNA, 3054 bp, Oryza sativa
  Clone ID: PAT_MRT4530_94686C.1
atgacagcgagggcatcaaggctggcggcggcggaattggcagtggcaagggcggaagtggaagcagcagcggcaacggatgcagcgcgtgcagcggcggcggagctcaaggctctacgcggcagtagcaccagcagctctgtctccgcctacggcagcaccgatgatgagctgatgagggaggcagctcgcggcgcgactctctctcacgggatccaggccgtcaacagggacgtcagtcccggcagtgggtggcctactctcaccaagaccaactacgtcaagtgggctgcggtgatgaggataaggatccagttctcgctttccaggaagcggactgccaaggaggcctgggacgccatcgctgcggcacacatcggcagcgaccgcgctcgcaagtccacactacaggcgcttcgcaaggagtgggagaacctggccttcaagccaggtgaggacgctgatgacttttccctccgtctcaatactctgctgcagaagatggtgcagtacgacggcgacaactacgacgaggagagagtagtcgagaatattttccgttgcgtcctagagaagtacaagagcagtgggaggcctgtcaggatgacgagaggaagggggagtcctcttcctcgacaggcggccgtaagcagcgcaaggcgcacggaggtgtccagctgcagtgggcgcgaagacgcgtcgagggtggcgcttgcagaggcgcccagggcggcgccgctggcaaccacaagctggcacgagacgacgcctgccgcaactgtggcaagcttggccattgggccaaatactgtcgacagccgacgcggccaggcccacgttgcacaggtggaagaggaagagccggctctactcttggcacacgcaagcatcgagctacctccagcggcatcggccgcagcggctctcctccaccttgatgagccgaaggcacatgccttcctcggagatggctctagcaacgacaagactgatgggtggtacctcgacaccggcgccacccatcacatgactggcctacaagagttcttcaccaagtttgactccagcgtccgaggctccgtcaagtttagggatgcctctggcgtggagatcaagggtgtcggttccgtcaccttcaccgccaagtccggtgagcacaggctgctcactggagtctactacttccccccattaaagaactcaatcatcagcgtgggacagctggatgagaatggttcacgcgtgttggtcgagcatggagtcatgagtatttgggatcgccgccgttgtcttcttgccaaggtggcacaaccggtttgccaagccacccattgggacgacgaggagtggcagtggcacgagcgcttcgggcagctccacttcgaggctctgaagcagctcagtgccaaggagatgcctgcagtagaacggcgtcgtcgagcggcacaaccagacggttgtggggatggctcgggctctcctcaagcagagagagatgctggccgtcttctggaagaggtggtggtgatggctgtctacatcctcaaccgctcgcataccaaggccctcaacgacaggacacgtacgaggcttcgcattgtcgcaagccggcagtctcccacctgcgggtcttcggctgcctcatgtttgccaaggagcacgaccacatcggcaagctcgatgacaggagcaccccaggggtgttcatcggctatgcggagggctcgaaggcctaccgcattctcgacccggagacacagcgtgtgcgcacggcgtagtgttcgactaagggcgagggtgggcatgggacaaggcggtggacgatggctcgactctgacgtacgacgatttcactgtcgagtacgtccacttcgagggagctggggagtaggcagctgttcctcctcaccaagcatacctaccccagtccccgagtttccaccgactccggcagcaacacactctcaagctacgacttcagttgcgacgagttcttcaccgacaccaccacaatcagctaccccacgcactccagcaccaacaaccaccctaatgggcacgtccactcccatgccagctcgtgttgagcatagcccggtagagttcactacttcgctcttccacaacaaggagcaaatcgacacgtaccacgatggcgagccgctgcggtaccgtacgatggaggaccttctcggcgaccagccggtgccgggactggtgcctcgtgacctagaggcgcaattgcaccttgtgtgcaatgatagtgagcctcggtcattcgtagaggccttgagacacgcggcatggtgtgccgcgatgcagtcggagatggacgcgattgaggagaaccgcacctgggagctttctgacctctctcgtggtcaccgcgcgatcacccttaattgggtgttcaagctgaagagggatgaagccggagccattgtcaagcacaaggctcacttggaaggccggtgtgttcatcacatggacgtcaagtcggcgtttctaaatggcgatttgaaggaggaggtctacgtgcaccagccgctgggatttgcgatccccagcaaggagggcaaggtgctacgcctgcacaaggccctctatggcttgcggcaggcaccgagggtgtggaatgccaagctggattccatgctcaaggggatgggcttcgagcaaagcccgcacgaggcggccatctaccgatggggcaatggtggaaatgccctgctggtgggtgtctatgtcgacgacgtggtgatcaccggcaccaaggatgcagagactagagcggtggagctcagggtggacagcaagtctgctctggccctggcaaggaaccccgtttttcacgaacggagcaagcacatctgggtgaggtaccacttcatccgaggctgcttggaggaagggagcatcaaggcgagctacatcaacaccaaagaccagcttgcggacctgcgcaccaagccccttgggaggatcaagttcctcgagctttgctccaggattaggatggcccaactttcctacaagacgatgcataagacttag

SEQ ID NO: 96606 - DNA, 350 bp, Oryza sativa
  unsure (1)..(350): unsure at all n locations
  Clone ID: PAT_MRT4530_94687C.1
cttggtcgncgatgccgcctannatcanatactctcnctcaccgatannancannnccannaatggncnccctcgncggcgcatctacngnnttcgcngccaatccggaccnggngcncgcgccatcttcccnngacgcnacggacctccntgtcttgtncancgtcaggaaacanaggctgttcttgagagatnacanaatctccngcggattntgacnaaanattatccgcgtcanncgctcctncccctgtnctgttccnnanagcanctaccncctnnccccnaatncngctgatatcnctnacggnctncgtttncattcccttncnccgcatcctnnttttnac

SEQ ID NO: 96607 - DNA, 1452 bp, Oryza sativa
  Clone ID: PAT_MRT4530_94688C.1
ttaaacaggcattcccaaccatttatcttcccaaaaccgtacttgagagctatctttgatgttgaaggagccaaacctgagaaaatcaggcttggccttcattagactagcccaaaagtgtgagtctcctgctttccactgagcttgagacaaaggctgtgaccccaaatatttgttccttagcatttgttgccatacaccatctgtagtgagtagtttatgcaaccacttgctaaggagagccttgttcttaatttcaagatcttgaattcccaaccccccttggtctttaggacgacatatgatgtcccaccttgctagtctatatttccttttgtgtccatccccttgccaaaagaaccttgatcggaaataatcaatcttcttgatcactcctttaggtatttccaaaaaggacatcatatacattggtaggctggtaagcactgaattgattagtgttagtcgtcctccaagtgataaaagtttgcctttccaacttgccaaccgtttttcaagccgttcaatcacttccttccactccgaattacgaagtctcctatgatgtataggaatgccaaggtaacggaatggaaaagaaccaacctcacattgaaaaaggttagaatattgatcctgagttgtttgggcttcaccaaagcagtaaagctcgctcttatggaaattaatctttaagccagataattcttcgaaaacattcaacaacattttcagattacaagctttctctagatcatgttccataaagagtacagtatcatcagcatattggaggatggacaatccaccatcaatgagatgaggcaccactccaacaagctgtcctgcattatttgctctctggatcataaccgctagcatgtccgctataatattgaataaaatgggagatagcgggtcaccttgtcgaaggcctttctttgtttgaaagaaccgtccatcggagaaaggggcaatgaggtggtcattttcagcctctgtaacttgggggatatcatcaattcttcctcttgatcttagactaaaaatacgtttcttccgatgtttgccatttgcaatcagatgataatattttgtattattatctcccaaacgaacatcatcagtctttgcaatcatattgatgttaatgaatctgtactgagctgtcaccaacagcggcccacctctcatccgtagcatataaccccaaataatgatatcccgtaatctagacaccacgtctaaactaccagatactactctaatatcatcgtcatgacatagagtaattacataagcaaacattatacccgcaccaaagcatctggcccaatttcggcaggcagcttcctcttttgctctcatacacagacttgtgaattttggcctggtttgttgtgtcaattctaagttcttgtcccattcatacacaagtctgattctcgacat

SEQ ID NO: 96608 - DNA, 2637 bp, Oryza sativa
  Clone ID: PAT_MRT4530_94689C.1
tcttgtagcacaactccttcgggaggaagaaatcaagtggtatcaaagagcaaagactgatgatgttcgtttgggagataataatacaaaatattatcatctgattgcaaatggcaaacatcggaagaaacgtattttcagtctagatcaagaggaaggtaagattgagtggaatgaagctattaagaattatatcactgagttttataagaaactctttggaccacctgatgcaagtactctctcttttgatgcaaatagaattgatgatatcccccaagttacagaggctgaaaatgaccacctcattgcccctttctccgaggaggaggtgcgggaggcaatctttgacatggagacaaataaggcaccgggtcctgatggaattctagctgaattttatcagaagttttggcatgttatcaagcacgatttgttgaccatgttcaatgaatttcatgctggggagttgccaatcttcagcctcaactttggggtgatcactttgatacccaaagtcaaggaagctaaccgtatccaacaatacagaccaatttgcctcctaaatgctagcttcaaaattttcactaaggtggccactaatagaataaactcggtggctgaccgtatagtgagtccaactcaaacagctttcatgagaggttgcaacatcctagatggggttgtcgtcatacacgaaactgttcatgagttgcatcgcagaaaattgagtggggtcatccttaagattgactttgagaaggcttatgacaaagtaaaattgcctttcctactacaaactcttcgcatgaaaggtttctcgccaagatggatttcttggattgagtccttcatttcaggaggaagtatagcaatcaaagttaatgatgacgttggacggttctttcaaacaaagaaaggccttcgacaaggtgacccgctatctcccattttattcaatattatagcggacatggtagcggttatgatccagagagcaattaatgcaggacagcttgttggagtggtgcctcatctcattgatggtggattgtccatcctccaatatgctgatgatactgtactcttatggaacatgatctagagaaaggttgtaatctgaaaatgttgttgaacgttttcgaagaattatctggcttaaagattaattttcataagagcgagctttactgctttggtgaagcccaaacagctcatgatcaatatactaacctttttcaatgtgaggttggttcttttccattccgttaccttggcattcctatacatcataggagacttcgtaatttggagtggaaggaagtgattgaacggcttgaaaaacggttggcaagttggaaagacaaacttttatcacttggagggcgactaacactaatcaattcagtgcttaccagcctaccaatatatatgatgtcctttttggaaatacctaaaggagtgatcaagaagattgattatttctgatcaaggttcttttggcaaggggatggacacaaaaggaaatatagactagcaaggtgggacatcatatgtcgtcctaaagaccaaggggggttgggaattcaagatcttaaaattaagaacaaggctctccttagaaagtggttgcataaactactcactacagatggtgtgtgacaacaaatgctaaggaacaaatatttgaggtcacaacctttgtctcaagctcagtggaaagcaggagactcacacttttgggctagtctaatgaagtccaagcctgattttctcaggtttggctcctccaacatcaaagatggctctcaagttcggttttgggaagataaatggttggggaatgcctgtttaagagaacaatatccttgtctctataacgttgttaggcataaacatgcaactatttcagaaattttccaaaccagtcatctaagcttttcttggcgcagggaccttactggctctaagttagtggcgtggaatcaccttctctcacgcatcgctaatattatattatctcacgaccaagatgagtttaaatggaatctaaccactgatggcagattctcggttaaatctctttatcttgcgttggtgcagaccgatgttcccaatataaacaaaagaatctggaagatcaaagctccccctaaagattaagatcttcttatggtacttacgtcgtggagtagtcttaacaaaagataatcttattaaaaggaattggagaggaaacaagtcttgttctttctgccacaaagatgaaactattaatcatttgttctttgattgtcgttttacccgcgcagtttggtatttaatccagtttgcttcgaatattagtttacctaatagtacaactcatatgtttgggcattggataagaagacaaccacgcaatttgagatttttggtcttgttagggcaacaacaactatttggtctatttggctttgcagaaatgatgtggtttttgaaagaaaaaaacatatctccgccgccgctcttccaaattcgatcgcatctttccatctccgttggaaatccgtggattcgatctcgaatcggatttgtctctctccgaaccctaacctttccatcgccgccgccggtcaccgtgggccttcgccgccg

SEQ ID NO: 96609 - DNA, 538 bp, Oryza sativa
  Clone ID: PAT_MRT4530_9468C.1
cggacgagggaagcggcgagccgcgactacaacatcgctccccggatcgactaccgcaccgtcgtcgaggtcgacgggcccctggtcgtcttggacaacgtcaaattccccaaatacgccgaaatcgtcaacgttgtcctcggcgacggcagcgtccggaagggacaggtgctggaaatcaacggcaaaaaggctgtggtgcagattttcgaggggacctcgggtatcgacaacacccacacccacgtagagttcaccggcgacgtcctccggatgcccatcagcgaggagatgctcgggcggtccttcaacgggtcgggcgtgcccatcgacaagggcccccagatcctggcggaggagttcctggacatccagggcatgcccatcaacccgtacaaccggacctaccccaaagaaatgatccagacgggtatttccaccatcgatgtcatgaactcgatcgccagaggtcaaaaaatcccccttttctccgcgaacgggctcccccacaacgatatcggcgcccagatctgccggt

SEQ ID NO: 96610 - DNA, 348 bp, Oryza sativa
  Clone ID: PAT_MRT4530_94690C.1
atggcgccgggcggagcggcgatgggacggccagatccagccggatctggcgtcggcgtcttcctcacggcgtcttcctcgcggacgacgagcggcggcgtggtcgtcctcgcggaggtcgctgccgaccggagccccgtcgccgtcctcgtcttccggccgccgcacttcctcccctccttttccagccgccacgcctccctcctccggccgtcgcgcgtcccctcctcctccggccgccatgctcgccggatctggccgcggacggcgacggcgggctcgtcggctgtgcacggcgacggcgggctaggcggctcgtcagcaaggaggcgccgccaggcgggctaa

SEQ ID NO: 96611 - DNA, 2318 bp, Oryza sativa
  Clone ID: PAT_MRT4530_94691C.1
gaaaaaaaaaattacaagaaaatacatttgcggcgtcgatgctaagaacctggggatcaaacagaattagtgcccgcatgatgcaattggcagcggcgcactagatcatcatccagctaaacaaggcgcaggacatcccgtagcgcctcctccgcacgtcgcttaaaggccgttgtctagcacttgcgtcgctggattgaatcaggctgagtcaacgggcttggctatgtttcctcaagcatagtagcaccagcactcaattcttctaacccaagatcaatgcacgacaacacaagaaagcaattccaatattatgtcacgtcggcgaatgggtgacaacagaaagcaacaagctgagattggttcacgacttcttccttgacatcatggggcgccttcctctccttcatcaagcattgatctagacggcattgacttgcctcactttgacctatcaaagctagatattgagttcgctgaagatgtgaagaaggcggtcttggaaatgccaacggactgagcatcagggccagatgggttcaccaatgaattttataagaggtgttcggagttgatcaaaggagacctgctcacaattctagcccttgtgttgcaagtgaattcctagcacttacatctattgattgcactcttccccaagaaagaagactcgatacaactctcgaattacaacccaatgagccttatccatagttttgcgaagattttttctaaaatcatggctaccagattggctgcacaaatgggtgagctagttggaccagcgtaatcggctttcatcaagaagaggcacatccaggagaacttcatttatgttcaagggcgatcgggctgctacattggtcgaaagtgaccaaccatcctgctcaagctcaatatcaccaaggcatttgatagtcacttgggttttgggggaaaaaatgcagggatggcattgccatcatgctgggaagggcgtcaacaataatctccatcaacagctacaacgcaaaaaggcatcgggctcacaatggggattgcagtagggagatccatattgtttcccctgcttttcgtcctcgtgatggaggcgtttggggcactctgctccacgccggtgcaacgaggggtgctttctccactagttgacgacgtgatgcccttgcaagtgtccttgtatgcaaatgacaccatccttttcttccacccctcgactcaagatgttgtggtagttcatcctgcagctaatgggtcgtgtctctggtttggtaactaatctagccaagagctccatgactattatccactgctcagacgaccaaatagtcgaggtcgcaacgatcctcagctgccaggtgaaggatttgcctctaacctaccttggtttgttgttctccgtgcgcaaaccaaccaaagcacaagttcaaccaatgatagaccgactaacgaagcacacggcaaagagtgaaaaaaatgttgcggtttcttgtggaagggcgacggaaaagcatcgggggaacacaacttggtggtctgggacaaactctgtttgccggtggaatatgggggattagggatccgaaacctgtagcttgcgggggtcgcattgcgggcacgttggcccggctacgcaaagcgcagccagaacgaccatggacatcactctctcgatataaaagaaagtagcacggtgattgtggggaacggcaaggggacattcttctggactgataactggttacctaaagagggctcgattgttaattgtgctctaatcctcgcctccttcgttaagaagcgatctcgtagggtggcaacagctctacatgataatgcctgagtggctgacatcacaggggctctatctcctcaaggtctggcgaagtacttcatggtatcagaaatggtgtcaagggtgcagcttgctgatgacatcgacgataaggtctattgggctccaacggtggatggcttgttctcaatccgctccacctacgcctcctatgcgccgccaagacgaaatgtcgcctcggaaagataatatggaagtccatggccctgtcttgatgcaaattcttcatgttcatagcaatgcaaggggcctgcctcatgacggacaatcttcagcggcgtgagtggcagcttgccttcatctaccacctctacaacatggtagacgaaacttgtgcttcgatgctatatttccgaattacaacaaatgctatattcggaaacttgtgcttcaatgcccttcaccagaccctgacttcccgtcctgaatggaaaggcgctgtcagtacaggccgggcgctctgtgc

SEQ ID NO: 96612 - DNA, 759 bp, Oryza sativa
  Clone ID: PAT_MRT4530_94692C.1
atggagaactcctcaaagaaaacccaagagttcttccctaaaggtgggaatggaggttatgctgagcagctggagctcttgctgaagcagcttcgttttcctaacaagccgatccaccatgcggagcaagtgatcaaaggattccggaaggattggacgatgaagatctacattcaagccagggaagagaagtgtcaaggacatgtgttcaagtcccgccaccttcgagccaacaaagaggccgcactccaggatgcgtcgcgtgaggcattcatgcgtctatgtaagatctacagcatcgaggttgcgagtactccgttctttctacatccattccgtgaatgcggtgaccgccgctgccatattcggaaatttaggggctttgaggagcagtcgcccatccacttctccatgtggatgtgggctgcagacgaggcctatgaggaggccttagaggaattagatatgcttcggtcaaagatcgccggctgggaggagcggtacaaccaccttgctaaagaacacaccactcgtggacaactattggaagcaatcaagcttcacctccagtggtattttcgaaccccatctcaagctcaaatccaacggactttgccaccaccaccacaaagagtgacaagaagtgatggtgaggactatagtcaaatcaatgcacagcaggcatgtctggaaaggtccgaagttaaacttgatagggcaacttcacaagactatctgcaaggatacaagcccccataa

SEQ ID NO: 96613 - DNA, 1076 bp, Oryza sativa
  Clone ID: PAT_MRT4530_94693C.1
tttttgttactttatcaaagatataaggacctatgtattccacatattactttagcacgtaatatcaaataattaatggtgcacttcacaagctaaacttcttataacttaattaacacacgtatatataattgtccaggtcatatatcatgtatttaacacaatacaacaagcatggtattgattggaccctgcaaatactactcataaatagcaaatttattccaacctactacacatataatatatattatatgaaggccttcatctcatcttggaactccttgatacacttgttctccacacactgtgtcataatccgggtccctttctttggcattggtggagcaccaagcactgcgactgccatgtagtctgcataagtgaatggtatgatgtgattaggtgtaccccacccatagtctacctcgaagaatcctaacctcgtccaatcagacacaaaaagcacattgtgttcaaatgtcaatgcgtagggatcaactttcacatcccctgaagcccactttgcaaactccatggggagcctcgcctttccatcccgaattatcttgatcacatcaagcaactctttggtggcaacatcctcagctattgctgtcacagtcactggataaaagcagttgccatagtagcccccatcttttgggagaacctgcgtgagcaggtgacgcgtgtttgcaaagaaacacacatggacctggatctccggtttgtaccctacggggacgcgtggggcctgccaaaccttagcagtagcaacatcaaaggtggaacaatactggccaaaggtctggaagtactcagccttcacgtgagctatacggtcagaggtgacatctgtggagaaatgctgaaaaccaaaggactggaacgatggtggtggcccaggagggagcttaggtgggttcggtatcagcgagcgatcccacacgggagccaccctgagcttgtccatgccacgggccaattcagctactgcagtgatgaattgtgctgctccaagtccatcagcaagggtgtggactgccacaaggcccaagataacctgcagcccg

SEQ ID NO: 96614 - DNA, 660 bp, Oryza sativa
  Clone ID: PAT_MRT4530_94694C.1
gcacgagggaatctcttacaccatgatggcttctaccatcagcctgcctgttcttgtctacattgcgagcgaccgtgagttcttacctgttcaggggcctcctctgggtttcaaccatcgcagggtaccaccgtagtgttatgaataatcctagagtttacccggttgatggtcctgcaatgtttggcacacagaattacaattcaagagtcaacgcttcgatgcagcgcaatcacatgagggccgctatgagtaaaaaacctgcacagacttgtgaaccgattgcatgtggtgccccattcactatatgctacaactgctatgaagtactgcaacttccgaagaaatcccccgtgccagggaaggatgagtacaaattacgttgcgggtcatgctcacatgcgcttgtggtcaagcttgatggaagcaggcttgatgtttcagcaccttcacctatttcacacatatctggcggcagcaaaattagttccaatgatggccaaggaagcaatgcgaattctgctccacatgagagggtgcttccactttatagtttttctgcagcaagtcatggttctcaagacctaccctcgaactcaagtgaagctgaaaaaatgcaagggatatcgtcttcttgcagcatttctgaagatgagaaca

SEQ ID NO: 96615 - DNA, 2387 bp, Oryza sativa
  Clone ID: PAT_MRT4530_94695C.1
ttttttttttttttttttgctgtaaatttgcttgattaccaccgttaccacataattacacccgacgcaatttcaaacacgtacaacgaatgctgaaacaatcccagcgttcactaacacatcctacacaaagaaggttcagatagacgaccgatcgatctacagtagattgtacaaaagaaaaattggacgaaatggaaaacccaaattcaaattcgaatgaagtatgcatcaaaaaaaaaaaattcgagcattgcatcgacctcatattctcaatgaattctcaagcctgaatcgactgaattcgtcgagctagctagcgcgccatggtgatcgagccgtccttgatgaggctgttgctgagcgtcttgaaccgctccctcgagtattgccgcgacgccttcctccaatccgtcccggatttcatcatcgccacgaactcctcgtagctgatccgcccatccttgtcggtgtcgacttctctaaggatgtggtcgagcacggcgtcgtcggcgtggccggagtcgtcggcgagggcgtcggcgagctcggcgcggtcgatgtagccgctgccgtccttgtcgaagaagaggaaggccgtgcggaggtggttgtcgttggagaggcgctgcaggtggatggtcaccgccacgaactcgccgtagtccaggtacccattgccatccacatccgcctgccaatgcaaaatcaagaactcgccattgccgccattgctatcttgaagaagggtaaagaagcttacggcctccatgagaagctccatctcgggctcggcgagcttggagccgaccttggtgaggccgtccttgagctcctggagcgtgaccctgccgttgttgtcggtgtccatgagcgcgaacatgtccttgatcacctccacctcctctaccgacaggtgttccgcgatcacctgcgtgcatcgctgggcggtcagacacagaaacgggctcgccgtcgccggagacgacatcaagagcagagcacgcacgccacgtacccgcatggccttcttcttgaggcggttcatgagggagaactgcttgaggcgggcgcggacgacgtcgccgagggggacgttgggggcgcgggcggcgtggtggagccaggggtggtcgagcacctgctgcgccgtggggcggcggcgcgggtccacgtcgagcatctggcggacgagggacttggcggcgcgggagatgcgcggccatggctcccggtcgaagtcggcggcgccgcggaggatggcgcgcgccacgccctgctccgtctcggcccagaacggcgggacgccgcacaggaggatgtagaggatgacgccggcggaccagatgtccacctccgggccgtagtctcgccggagcacctccggcgccatgtagtacgggctccccacgatctccctgaacctctccccaggtcggaagaagacggagaggccgaaatcgatggccttgagctgcgcgtcctcggccttgccggcgtagaggaagttctccggcttgaggtcgcggtgcatcacgccgtgggcgtggcacgcgcgcaccacctccgccaccgtccgccccgcgccgcccgcggcgcgctccgtgtaccggcccctcgccacgatccggtcgaacagctcgccgccgtcgcagagctccatcaccaggtgcaccgcgtcggcgtcctcgtaggcggcgcggaggcgcaccagcgccgggtggtccgggagcgacgccatgatggccacctcgcgccgcacgtcggcgacgtccacggcggtgcggaggcggcgcttcgggatggacttgcacgccagccgctcccgcgtcgcgcggtccgtggcgaggtgcgtcaccccgaactcgccgcgccccagctcgcggccgagctggtacttgtccgtgacgcgcagccgcgggtggtcggcaccacgccctccagcacgcgcaccgcggacgcggcggcgccgcccctcgccggcagcacccgcggcggcgcccagtcgtacgggttgggcttcgccctcgccctgggcttgggcttgggcttgggttcttggccatgcctctgcctcgtcgccgtcgtcgtcgtcgccgacggcgccggcgacttcttggccgcgtgatgatgatctcgcggcggcgcgcccacctcatcggtggtagccggagcgacgcagcacgtgttgcccatggcgatcttctagaaccttctggaaacttcctcaccacagctatatatctacctctctagctagcttaattctatctacttctacatctctcgcccatctcagctcagctcagcttagcttggatgaacaagaagcataaagaaacaagggaaattaagccgcaaaatatatatatatatatagtgtgaat

SEQ ID NO: 96616 - DNA, 246 bp, Oryza sativa
  Clone ID: PAT_MRT4530_94696C.1
atggctttcgtcatcactgccatgcctcctagtgctctacccctcatccaccacctccaggtgcctagatctgtaggcaagaagtccctgctagatctagcagtctggataagaaagaggggatctaaagaggctctcaccccctctcagtgtactgctggatatgtggtccggtcagaccgggcagtgattgccagtcagaccggcttgtattgcgcggtcagaccggcgcagcccgtggtctaa

SEQ ID NO: 96617 - DNA, 2898 bp, Oryza sativa
  unsure (1)..(2898): unsure at all n locations
  Clone ID: PAT_MRT4530_94697C.1
gcaccaggcatccagcaccagggattgctcctctccaagaagcagctcactgctctctctctctctctctctctgtcccctgcgtcttctctctcacgccaagagagagggtgagcagcggagacgtagctggctcggggtatgccgtggactgggcagacaagaagaatggcgccggctccgactccgcgctgcagcggccggccgccgggtgccagtgctggccgcggcgctacgggggcggtctccctcgcggcgagcgtgggcgtcggcaacgcggccgggtcctccgaccgccgcgcggtcgtcatcaacgggcaccgacacatgcacctctccggcttcatccactacctgcggtagccacgggagaattggaggagtctgatttagagggcgaaggacgacgggctgggcgtctaccaaatatctattacatacggcggtcaatagggatacggctggggtatacagtacaatacctatacggtatatgaactgggtatgagtactgttatttagttgatggctgccgccgctggccgggccgtacgccggagctggctgcaggaactgcggctccggtcacggctgccggcggccggtgtacggtcgccgtcgattatttattattttactagttatttattcgtgaaaggtggatgatggctttgatgatcaaaaaaaaaaaaaaacactgttcgagtggcaaggcggccggagcatcatgtctcaggtgcgagaatgagtttgggccgatggagtcggtcggtggcagcggtgccaagccgtatgcaaattgggccgcaaagatggccgtcgggaccaacactggcgtgccgtgggtgatgtgcaagcaggacgacgcccctgacccagtgatcaacacttgcaatggattttactgcgactacttcagcccaaacaagaattacaagccgtccatgtggactgaggcctggaccggctggtttacatcgttcggaggtggggtgccgcatcggccagtggaggatctggcttttgccgtggcgaggttcatacagaagggtggctctttcgtgaactattacatgtaccatggaggaaccaattttggccggacagctggtggtcccttcattgcaaccagctatgattatgatgctccgattgacgaatttggtctgcttaggcaaccgaaatggggtcacttgagagaccttcacagggccatcaagcaggctgagcctgtgctggtttctgccgatccgacaatagagtctattggcagctatgagaaggcatatgtcttcaaggcaaagaatggagcatgcgcggcgttcctgtcgaactaccacatgaacactgcagtcaaagtcaggttcaatgggcagcagtacaaccttcctgcttggtccatcagcattctgccggactgcaaaactgccgtcttcaacactgcaacggtgaaggagccaacattgatgccaaagatgaacccagtggttcgattcgcttggcagtcatatagcgaggacacaaactcgctgagcgacagcgcgttcacgaaggatggccttgttgagcagctgagcatgacatgggacaagtcagactacctgtggtacaccacatacgtcaacattggtacaaatgacttgaggtctggtcagtctcctcagctcactgtctactccgctgggcactcgatgcaggtgttcgtgaacgggaaatcatatggatctgtttatggtggttacgacaacccgaagctgacatacaatggacgtgtcaagatgtggcagggcagcaacaagatctccatcctaagttcagcagttggcctccctaatgttggcaaccattttgagaactggaatgtcggagtgctcggaccggtgaccctctccagcctaaatgggggcacaaaagacctcagccatcagaaatggacctatcaggtcggcctgaaaggcgaaacgctgggtctacacaccgtcaccggaagctccgcagtcgaatggggtggccctggcggctaccagccactgacttggcacaaggctttcttcaacgcgccggccgggaacgacccggtggcgctcgacatgggcagcatggggaagggccagctctgggtgaacggccaccacgtcggccggtactggtcgtacaaggcctccggtggctgcggcggctgcagctacgccgggacgtaccacgaggacaagtgccggtcgcaacatgcggcgacctgatcccaaatgatggtaatttgaattgtggataatttaaacaggggggaattgcagaattggggatttgggagcgaaggaaagtgggggcgtatagcaattatctatacatacggcgtagatacggatacggctgggtatacgtacatacgtatacgtatatgaactggtagagtactgttatttattgatggctgccgcgctggccggccgtacgccggagcggctgcaggaactgcggctccggtcacggctgccggcggccggtgtacggtcgccgtcgattatttattattttactagttatttattctgagccgtggatgatggctttgagatcagtgcacaggtgcttggagccttggatcgctttactctctctctctctctctccaattttcttcagttctatgagaaaatttgcaacgttgagttgtaaatgggaacagcacttagaattatgaatgataaattattgtcacctgatttataccaaaagaaaaaaattattcttttgtactaaaaaaaaaaaaaaaaaaaagctatccatttttaggaaaactgtttgatgtgttggagattttacgagaagttgaagttgttaaaagctctctagagggccaatttaggatannnnannnnnannnnnnnnnnnannaag

SEQ ID NO: 96618 - DNA, 2645 bp, Oryza sativa
  unsure (1)..(2645): unsure at all n locations
  Clone ID: PAT_MRT4530_94698C.1
caagaaacccaagtttttctacgtgcttcgagctcggccaccggccggcggacgcgcgcgcgccagccaccatgtccggcggcgccgtcgccttcctcctgctcgtcgccgccgccgccgtggccaatgccgccgtcacctacgaccacaggtcgctcaccatcaatggccagcgccgcatcctcatctccggctccatccactaccctcgcagcacccccgagatgtggccggacctgatccagaaggccaaggacggcggcctcgacgtgatccagacctacgtcttctggaacggccacgagccagtgcagggacagtactacttcagcgacaggtacgacctggtgaggttcgtgaagctggtgaagcaggcagggctctatgtcaacctccgcatcggcccctacgtctgcgccgaatggaactacggtgggtttcctgtctggctcaagtacgtcccgggcatcagcttcaggactgacaatggtccattcaaggcggcgatgcagacgttcgtggagaagatcgtgtcgatgatgaaatcggaagggctgttcgagtggcagggcggcccgatcatcctcgcccaggtagagaacgagtacgggccgatggagtcggtgatgggcagcggcgcgaagtcgtacgtcgactgggcggcgaagatggccgtcgccaccaacgccggcgtgccctggatcatgtgcaagcaggacgacgcccctgaccccgtgatcaacacctgcaacggattctactgcgacgacttcacccccaactccaagaacaagccttccatgtggacagaggcctggagcggctggtttacggctttcggtggcacggtgccgcagcggccagtggaggatctggcgttcgccgtggcgaggttcatccagaagggcggctccttcatcaactactacatgtaccatggcggcaccaactttgaccggacagctggcggcccgttcatcgcgacgagctacgattatgatgcgccgatcgatgaatacggtctgcttcggcagcccaaatggggtcacctgacgaaccttcacaaggccatcaagcaggccgagacggcgctcgttgccggcgacccgaccgtccagaacatcggcaactacgagaaggcatacgtgttcaggtcgagcagcggcgactgcgcggcgttcctgtccaacttccacacgagcgcggcggcgagggtggcgttcaacgggcggcggtacgacctcccggcgtggtccatcagcgtgctgccggactgcaggaccgccgtgtacaacaccgcgacggtgacggcggcgtcgtcgccggcgaagatgaacccggcgggcgggttcacctggcagtcgtacggcgaggccaccaactcgctggacgagacggccttcaccaaggacggcctcgtcgagcagctcagcatgacgtgggacaagtccgactacctgtggtacaccacctacgtcaacatcgactccggcgagcagttcttgaagtccggccagtggccgcagctgaccgtctactccgccgggcacagcgtgcaggtgttcgtcaacgggcaatacttcggcaatgcgtatggtggctacgacgggccgaagctgacgtacagtgggtacgtcaagatgtggcagggcagtaacaagatctccatcctcagctccgccgtcggcctcccgaacgtcggcacgcattatgagacgtggaacatcggcgtgctcggcccggtgacgctgtccggcctcaacgaggggaagagagacctcagcaaacagaaatggacataccagattggcctgaagggggagaagctgggggtgcactccgtcagcgggagctcctccgtggagtggggcggcgccgccggcaagcagccggtgacgtggcacagggcctacttcaacgcgccggccggcggcgcgccggtggcgctggacctcggcagcatggggaagggccaggcgtgggtgaacggccacctcatcggccgctactggtcctacaaggcctccggcaactgcggcggctgcagctacgccggcacctactccgagaagaagtgccaggccaactgcggcgacgcctcccagagatggtaccatgtcccaagatcatggctgaatcctagcgggaacctggtggtgctgctggaagagttcggcggcgacttgtccggggtcacgttgatgacgaggacgacatgaacaggaggaagaattgaagtggagatgatttgaattgtggataatttagcagggggaattgcagaattggggatttgggagcgaaggaaagtgggggcgtatagcaattatctatacatacggcgtagatacggatacggctgggtatacgtacatacgtatacgtatatgaactggtagagtactgttatttattgatggctgccgcgctggccggccgtacgccggagcggctgcaggaactgcggctccggtcacggctgccggcggccggtgtacggtcgccgtcgattatttattattttactagttatttattctgagccgtggatgatggctttgagatcagtgcacaggtgcttggagccttggatcgctttactctctctctctctccaattttcttcntttctttgggaaaatttt

SEQ ID NO: 96619 - DNA, 1701 bp, Oryza sativa
  Clone ID: PAT_MRT4530_94699C.1
atgtccatgaacgcggacctcggcaagccgagggagctcaccgggttgcagcagaggagggctctgtatcagccggagctgcctccatgccttgagggaaaggccatcagagtggagtttggcgattcgacgacgaccatcgacccgacatgcgcaaatatggttgtgcaggaatttcccaacacctttggtcagcctctggtacatttcctgaagccgaacaagatggatgcgcaagccaacgatgaacatccaccaatcagggttggtgtggtgttctctgggaggcaatcgccaggggggcacaatgtgatatggggcatctatgatgctatgaaaactcaaaatctacaaagtgttttgcttggatttattggtggcacagaaggcctatttgcaaatcagacattggagatcacagatgatgttctttcagcatatagaaaccaaggtggttttgattttctcggcagaactgttgatcaaatccacacaactgagcaagtgaatgctgcaatgtcaacatgctgtgatcttgacttggatggcctcgtcatcattggaggggtgacctccaattcagatgctgctcagcttgcagaaacatttgccaatcacaactgcaagacaaaggttgtaggcgtgcctgtttcattaaatggtgatctcaagaatcagtttgttgagacaactgttgggtttgatacagtgtgcaaggtgaattcccagcttataagtaatgtttgcctcgatgcaatctcagctgggaagtactaccattttgtccgtgtgatgggttggaaagcatctcatgttgccttggagtgtgcacttcaatcacaaccaaatatggttattttaggggaagaagtggcattttccaagctcactttgaaggaaattataagcaagatatgtgatggagtgcaagcaagggcagcacaagagaagtaccatggtgtattacttatttcggagggactaatcgaaagcattccagaaatgtttgcacttattcaggaaattaatattctccacagcaataaagttcctgagaacaacattccatctcaactttctccatgggctactgccttgtataattacttgcctcctttcataagaagagagattgatactgagcaactcttagctcatttagtagaagcagaaatgaacaagcgaatgaaagaggggaaatacattggaaggaaattcagctccgtttgccactttttcgggtatcaagcgcgaggatccttaccatcaaacttcgattgtgattacgcctatgcaatgatgagtgtgaagaggcactcacgcagtcctggagctgttcctactggaaagccagttatccatccttctccagttgacctgcaagggaaggcttatgcgctcctgagagagaaagcctcgagcttcctattagatgatttctacagaactccagggggcattcaatttgatggatctggaacaaatgttaagccaatcacactgactgtcgaagaccaagactacctgggtgacattgagctactgcaagactacttggagaaggtgaggaacattgtgaagcccggatgctcgagggagatcctgaaggcggcgataagctcgatgtcatcagtgaaggatgtgctgaaggttatgtcggctcccttctatgcagagctccctctgttcaatctgaactga

SEQ ID NO: 96620 - DNA, 1137 bp, Oryza sativa
  Clone ID: PAT_MRT4530_9469C.1
atggcgagctcgccgacctcgcgtgagcgtgacatggcggcggcggtggtggtggaggaggaggtaggagacgcgcagccgcggcaggagtggattatgctggccgccgtccccgacgtccgccggtcatcgaggatgttcccgccgggcaccgacttcgtcctggcgctgaagaagcccccgcatgtctcccacgtcaccgtcgccgcccgcatcgcccccggcctgccggcaactcctacacgcttcccctacgtcgtcgccgtcgacgcggggggtgcgttcctcctttgcgtcacccagcgcgccagggagccgcccctcgccaccggcgcagacgcgagcgtcggccgtgcgcgtcgccgccgcgagttcgcccgcgtcccggcgtacttcctctgcgacgcgcacactggcgtggcctcccgcgtccccgatcctcccgtcggtggtccactgagcgacttccatagggtgggtctaatctcaagaccttgcggcggcggtggcggcggcggtggaggaggaggaggagaaggagttgcctacgccatcgctgagctcgtgcccatgctcggcaccgaccacgccaccctccgcctctactggagcgccaccggtctctggctcagcaaggaggtcaagtacgccgggcttggccatccagatagctgggcaaacgatgccgtcatctcccatgcccagaagctctggtgggttgatctctcctgcggcctcctcgcgtgcgatccattcacggagcaccaggaccttctgttcgtgccgcttccagatgggtgcgtgcctcctgtagccggcacggagaacgacctcatcaagcatcgctgcgttactagcagcggtgggaagcttcgttacattcagattcacagcagacttggcgtaccgatcatcagcgtatgggtgctggcagatccggagcacgcgacctgggattgtgagtgccatttgcccttctcggagatctggagcaggagatgggtaagcaggatcacaaggaagaagagcctcatggttgcggcagcgcatcctgtgcatacagggatgctcttcttcgtccacgggccacggcaagaacctattcacagtggatgtgaaagcaagaaggatgattag

SEQ ID NO: 96621 - DNA, 318 bp, Oryza sativa
  Clone ID: PAT_MRT4530_946C.1
atggtggagtcgtggagccgtgaaggcaatgacaccagtcgggcggcaaacgagtcaaccggcggtgaaaacgatgacacccatcagcggtgtttagagtcgcactgccgtgaaggcgaggacatgagtcggtggcagacgaggcaactggcggtgaagacgatgatgcccaccagtggtggtggagtcgcacagccatggaagcgaggataccactcggtggcagacgaggcgaccaggggtgaagacgatgacacctatcagtggcgatgtcggagtcacgtacttgtggcggcgaggacactagtcggcggctga

SEQ ID NO: 96622 - DNA, 314 bp, Oryza sativa
  Clone ID: PAT_MRT4530_94700C.1
atgtgctgcaaggcgattaagttgggtaacgccagggttttcccagtcacgacgttgcatgcaagctttgccgtcgactccgtggtcgccggaccacgccgtatccactgtcggcatcgcagcagtgaggagaagcccggcagccatctccccgaagccaaaatccaccggagctccatcgtcgccgtcaacccgaacccggccacccctctgttgtcgccgcacatcgccggaaagtcgtcgccgccgtggacagtacctcgccgccctttgaagcgcgtcgccggccatcttccgtcgctgtccgtcgtcgc

SEQ ID NO: 96623 - DNA, 484 bp, Oryza sativa
  unsure (1)..(484): unsure at all n locations
  Clone ID: PAT_MRT4530_94701C.1
cgcgaggccngcccttttttttttttttttttttttttacagaacaaaggctatgttaaagctcttcgtatttcatttgatcgaagcattgttccgatgggcttcataactcagcccaatttccagggatcgctaatctatcagactatacatgaagacatttcgtactagtaagggtatatataaatggcatgcacttattcatacagtttgcacgtatgagttaggatctaatttctcacataagcatgtggaaacaatctggggaagtaagtttgctttgccttgacaatcgaccaatacagaaagaagcaagggatatgaacaatggccatggcgaggtaccatagaggagcccctgacggtgaaaggtcaagaaatgggtatngccaccaggatatagctccacaagcatgaaggacccattggaagggtacataggagcagctccaaaatacaaagaaagccaggcggtaccagggga

SEQ ID NO: 96624 - DNA, 554 bp, Oryza sativa
  Clone ID: PAT_MRT4530_94702C.1
atgcacgacagcggcgcggcgactgcagaacggataaagtacaccggtgaacgacaaaggagcggcggttgccgacgaaataatgcaatcggagggcaccgggagaaagaggaggcaacggcgattcttaccaacacttacgcgacgacggacagcgacggaagatggccggcgacgcgcttcaaagggcggcgaggtactgtccacggcggcgacgactttccggcgatgtgcggcgacaacagagggagggcgatgacgggaggagcagcagggcttcgccgaagatcaaaacgcgacggcgaacttcgggttgacggcgacgatggagctccggtggattttggcttcggggagatggctgccgggcttctcctcactgctgcgatgccgacagtggatacggcgtggtccggcgaccacggagtcgacggcaaagcttgcatgcctgcagcacatccccctttcgccagctggcgtaatagcgaagaggcccgcaccgatcgcccttcccaacagttgcgcagcctgaatggcgaatggcgcctgatgcg

SEQ ID NO: 96625 - DNA, 156 bp, Oryza sativa
  Clone ID: PAT_MRT4530_94703C.1
atggctttcaggcttgccaacgaagagatcctgcccttcaattgtttatcatacacagttgaacttgaggcatatacaaaggtagcagatattagaatgaagttaatggaacagccatcagatgctctccacggcacaatgcaatcacagctctga

SEQ ID NO: 96626 - DNA, 175 bp, Oryza sativa
  unsure (1)..(175): unsure at all n locations
  Clone ID: PAT_MRT4530_94704C.1
gggggggggtttttttttnngggggaaatgttcttgattttactatttatgttagaaacaattgttcaaaactaatttcgtggcatcttggttgtcagcaactcaacatcaatgccctgtaaatggaactgctaccctaatctgcttctttctctacaattctctctgatgattt

SEQ ID NO: 96627 - DNA, 590 bp, Oryza sativa
  Clone ID: PAT_MRT4530_94705C.1
aatcaggcaacaatcaaaaactactttattccttagtttgtgtatctcatcaagatgcaggcacaagggtcaaatagctcatgaaaacaggcaacagtttgggcatccacgccctcatgtgatcagaagagactaaacaagcaacaactagacacgaaaaattccgccttcaaaactaaaagctattgagaaccatttctgcatttattatcttctctcatgccgatagtcattctccacacttcaagaagtagcggcagcctgctgtttgtggacgaactcgatgcccttctcaatgctggccttcaactcaggcttcaatgactcaagggccttggcctcatattcagtcactccctcaaggtcggaagaaatgatggactcaacaccattcttaccaagcttaaccctagatgcaaagaacagcagctcagttaattcagattgaacaaatgtgcactcgtaaacatctggatcaccagccaatgcacggagggatgactcaacaaatctggcagctgcataggccatcgacagggtagcagatccagcaccagctttcgcctccaccacctctgtcccagcattct

SEQ ID NO: 96628 - DNA, 391 bp, Oryza sativa
  Clone ID: PAT_MRT4530_94706C.1
gttgaaaaaaccaaacacagggggggggagcatatttatcgatcacactttaacaccggggccctacggggaaatcaacggggatttggggggcccaccatgccaaaaaccaaaaaaaaaggggggggtttggggggggccaacttatttaattatcgcgccggcttcccgctgaaaaaaacaaaacccccgtgaagagtaggaaatagcaaccctaaagggccccccgggtggaggcccccctagattttattctttcgctcgcaggggaagggggcctgcacacacgccggccgtgcctggggggaatagaaggagttacaccccgggcggccgggcgggcaatgtaactatgtgggggggataactttttaggctcgtgtgggggggg

SEQ ID NO: 96629 - DNA, 315 bp, Oryza sativa
  Clone ID: PAT_MRT4530_94707C.1
gtgacgaggtaaaaaaaaataaagacgcttgggtctatcggaataacgaaagagggcgagctaacatgaaaacaaaaaaagaaaagtcagattgagtctatgtatcttacaagtgcatcataagggacataaagcgattattatgttgattacaggacgagaatcaagcgatagagaaaaatgacccccagaaaaataaaagcatcgccgggaagacaacaacggcaccgccaccaccagattcgtccacggagcgcttgtcagaaacgcttggtcgtagccaccgccggcagattcatgcgcagtcgtaggcga

SEQ ID NO: 96630 - DNA, 203 bp, Oryza sativa
  unsure (1)..(203): unsure at all n locations
  Clone ID: PAT_MRT4530_94708C.1
atgaaccagcaatatggcaccaccagggtgttgcggtgcaatggcgtgctagtatggttgtggttgtactgtactactgtntcggtgtggccctagatgttctgtgactgccgcctttntgtttgagttaatgtggcaccgacgagcttgaggaatgctctttaattagccgaacagtagtacctcacccacgggtgcatgtt

SEQ ID NO: 96631 - DNA, 1404 bp, Oryza sativa
  Clone ID: PAT_MRT4530_94709C.1
atgtcgaagtgggatggatattggatggcgaggtggttctaccacaccatccccttcgaggctggctccgactcagcgaaagccctcctgtgccggcgccagggcgattgcatcgaaccggaaacccaagatcgccatggacgacgctatggaggcacggtttgctctgctacgaagcgaagggttcctgcttcctccgattctgacgccgacgatgaggacgatgtcgaagagcctgacggcgaggaggaaggagaggaagaagaagaagcggaggccgttgccgaaaaggtcacgaacgaggcggccgaagaccgtgtcgacacccctggctacactcctactccaagtccaggtcacaacgagaccggggtggagtcgaacagctccccccttcgacgaaaggatttggagggggcgaagacgctagttgcgttttcgtcaggcaaggcggcgaagggaggtccggtcaagaagatctccaaaaggagaggactcgtcgatgtcgctcgcgttttcagcgacgacgagtcttctgacgagactccgacttcgcccgctggccgcagcctggacctttcgaccgcccccattctttcactcggtgccgatggggcaggcggtagcgccgctgccgaggtttcagcttccgcagaatggatcgtgacggctgcgacgagggtcttcggcagcccttcgcgtcaaccggttgtttcgcctctgattcttgcggctcactgttcgacagaacgaatcgtgcgcgcccgtcttgacggatttaagaaccgtcttcgggccaaggatgacgaaataggccgcaagaacttggagatggaggccctcgccaacaccctcaaagaggcgaaaaccgaaaacaggcgcctccaatccgagtttgagaaaggaaacgaggctagggccgaggtcgatcgcctcaaggctgaactggagaaagaaaaggcccattccgctgcgctgaccgactattataacctcactgagccgaagatggaggctcttcgcctgaaggtcagcaaggctgaagcaagcgctgtggaggagtcgcagcggttttctcgagagatggcaaaaacaaccgagtccgggaaaacggcgtgccaaacgctgcgcctcgcccttactgacatgggtgcgaagttcggctgtgagcacgtcgctgagttccctaactatgcgaaaggggactgggagattagtgcgcagaacatttcacccgcgtttcgtgcatggcgaaaacatttctggcagaaggaaggccggtccactgccaaggcacgccttttggagcaactggcgaaggcgggggcggcagtccggtgcgaggaagaggacgcggcagacaaagagggtggaggcgatgcccaggatcacccagaggtgtga

SEQ ID NO: 96632 - DNA, 1746 bp, Oryza sativa
  Clone ID: PAT_MRT4530_9470C.1
atggaggagagaatacctctgctctcgaaacgattcccggcggacggcaccgccggagtgggaggagggagggaggaggagggcggagataggtggtggagcgggctggcgcgggaggcaggaaaggtggggtccatggcgctgcccatggccgcgatgagcgtggcgcagaacgccgtgcaggtggcgtccaacatgatggtggggcacctccccggcgtcctcccgctctccgcctccgccatcgccacctccctcgccagcgtctccggcttcagcctcctcgttggaatggcaagtggattagaaactctctgcggtcaagcttatggggcaaaacagtatgacaagttaggagtgcaaacctacagagcaatagtcacactaacagtagtcacaattcccatctcacttctatgggtattcataggcaaactcttgaccctaataggtcaggaccccgtgatctcacatgaagctggaagatacatagtgtggttgattccaggactcttcgcatacgcggtctgccagcctctcacaaaatttctgcagtctcagagtctaatatttcccatgctctggtcctccattgcaactctgctcctgcacatccctctgtcttggctgttggtgttcaagaccagcatgggatttactggagctgctttagcaattagcatatcttactggttgaatacattcatgctcgctgcatacatcagattctcatgttcttgtaaggtgactcgctcgcctcctacaatcgaggcattcagaggagtcggtttgtttctgcgaatagcactaccatctgcactaatgttatgttttgaatggtggtcatttgagatccttgttctcctgtcaggacttctacccaacccagagcttgaaagttcagttctttccatatgcactcgagtagcaaatgagttaggcgctgggaatcctgaaggagctcgatcggctgttcaccttgtaatgtctattgctgggacagaggcagttcttgttactgggatgctgtttgcagcacagcgcatcttgggctatgcttacagcagtgatgaggaggttgtcacatatttcacctcaatggttccttttgtgtgcatctcagttgctgctgatagcctacaaggagttttatcaggtattgctcggggttgcggatggcagcacctgggagcctatgtaaacctcggttcattctacctggttggcattccggtagccctacttcttggctttggtttcaagatggaaggcaaagggctttggctgggcatcgcctgtggttccgtattacaattcttgcttctcgccgtcattgcattcttcagcaactggcaaaagatggccgagaaagcgagggagagaattttcggcgagacaccgtcagagaagcaacatttggtgcttgatgcaacgaattcggtctgatgcatcatgatccgttgactcgaactgaagcggatgatcggatcatgtggaggagactggctcctctggatgtgtagggaatctgctgaagaagtaaagcagtgtgcatagttgtactgttgcatttgttggatccgggagaatgtatcaagaactctatgtgaaatgtatgatggcgatatgtatgtacgagatcgaggttccgaatacttccagcctatagaagtatagataaattttccactcttcgtggacagaaagaataaaaggctaatcttctctcggaaaaaaaaaaaaaaa

SEQ ID NO: 96633 - DNA, 177 bp, Oryza sativa
  Clone ID: PAT_MRT4530_94710C.1
atggccatgctgctatgggtgggcgacgtgtgcttcggtggtggactcgctcgtcgtgggcgagcacctagaggaccatcctgctaccacccgctgtcgcccggtatcccgccggcaagaggaaatatggggagaaagacatggcaagggaaggagaagaaagagaaagatgactaa

SEQ ID NO: 96634 - DNA, 1716 bp, Oryza sativa
  Clone ID: PAT_MRT4530_94711C.1
atggctccccgcaagcctaacccttctttggtgaaagggcccgaccctggccggatcgacgacgactccactgcttatttggggatttctctcatggacgacgacgagttggcgaagttggtcagtgctggggcgttagccgaaggacaggctttcgccccggggaaagccgttgtaccgaagcccgtcgacaaccgaacagtggtgttcgccgtgtttttcgaggcggggctccggtttccgtgcaacgcgttgttgccggagatccttcgccttttccaggtggagctcccacaattgagcccatcggcgctggtccggatcgctatcttcgactgggcgtaccggacttccggattcgagcctagcgccgaactcttcggtgccatattgtccgccaccgtgaactcgaagacggtgattaccccggtagggacgaagaagacagtgtttgggagcgtgaactttaatgttcgccccgagcgattcgatctctggccagtgaacgccgccatgtcgaagtgggatcgccattggatggcgaggtggttctaccacaccatccccttcgaggctggctccgactcagcgaaggccctccggtgccggcgcagggcgatcgcaccgaaccggaaacccaagatcgccgtggacggcgctatggaggcgcggttcgctctgctgctgttgacactcgaccaagctgaagccgaagcccataggatgatcggcgacgtgtcggtcgtcgagtacagccagttgctgacacgacaggcagccggccgggcgaaccgggtttacaacggcgaattgcctcctcgggcgaacccccacaaagccgatgacgatacaggaccttcgcgaaagcgaacgcgcggacaggtgaagcttgcccctaggaagcgaagggttcctgcttcctccgattccgacgccgacgacgaggacgatgccgaagagcctgacgaggaggaggaaggggatgaagaagaagaggcggaggccgttgccgaaaaggccgtgaacgaggcggccgaagaccgcgtcgacacctatggctacactcctaccccaagtccagttcacaacgagaccggggtggagtcgaacagctccccccttcgacaaaaggatttggagggggcgaagacgctagttgcattttcgtcaggcagggtggcgaagggaggtccggtcaagaagatctccaaaaagggaggactcatcgatatcgctcgcgttttcagcgacgacgagtcttccgacgagactccgacttcgcccactaggcgcagcctggaccttttgaccgcccccattctttcactcggtgccgatggggcaggtggtagcgccgccgccggggtttcagcttccgcagaacggatcgtgacggctgcggcgaggatcttcgacagccctccacgtcaaccggttgcttcgcctatggtcaaaacgaaggggaagggtgcggctgccgaaacatccgcctcggaatattcccttgcggcgccccacttcgcctctggcgatttcaagacccgggcagaccttattccctttgtcgagggaattcttgcggctcattgttcgacagaacgaaccgtgcgggcccgtcttgacggattcaagaaccgtcttcgggctaaggatgaagaaataggccgcaagaacttggagatggaggccctcgccaacaccctcaaagaggcgtga

SEQ ID NO: 96635 - DNA, 276 bp, Oryza sativa
  Clone ID: PAT_MRT4530_94712C.1
aaaaaaaaagagcttctggactgatccccaaaatttacaaaccgaaggggaaggggggcaaaaaaaaggctgtaaaacaacaatttttgccccaaaaaaaaagggggccctagaatttactttttcctaaccacagatggccccggtgccttcctgcttgggaaacaggggtcccaatttcccctcaaaatttaaaaggggggaaaccaaacacttagacggaaaagggaaccccccaaaaatttttgggggccccttggccatttgaaaaagggg

SEQ ID NO: 96636 - DNA, 1035 bp, Oryza sativa
  Clone ID: PAT_MRT4530_94713C.1
atggctccccgcaagcctaacccttctttggtgaaagggcccgaccctggccggatcgacgacgactccactgcttatttggggatttctctcatggacgacgacgagttggcgaagttggtcagtgctggggcgttagccgaaggacaggctttcgccccggggaaagccgttgtaccgaagcccgtcgacaaccgaacagtggtgttcgccgtgtttttcgaggcggggctccggtttccgtgcaacgcgttgttgccggagatccttcgccttttccaggtggagctcccacaattgagcccatcggcgctggtccggatcgctatcttcgactgggcgtaccggacttccggattcgagcctagcgccgaactcttcggtgccatattgtccgccaccgtgaactcgaagacggtgattaccccggtagggacgaagaagacagtgtttgggagcgtgaactttaatgttcgccccgagcgattcgatctctggccagtgaacgccgccatgtcgaagtgggatcgccattggatggcgaggtggttctaccacaccatccccttcgaggctggctccgactcagcgaaggccctccggtgccggcgcagggcgatcgcaccgaaccggaaacccaagatcgccgtggacggcgctatggaggcgcggttcgctctgctgcgtaaggtttgctcccgccttagctgccacgacttggtggaggaattttgcatgcttcgcatctttcccctctcccaatcgtggcaagtcgcagttgatcaaggcaaagagtctgacggtttgccgaagttggttctccctgagggaacgaatatgttgacactcgaccaagctgaagccgaagcccataggatgatcggcgacgtgtcggtcgtcgagtacagccagttgctgacacgacaggcagccggccgggcgaaccgggtttacaacggcgaattgcctcctcgggcgaacccccacaaagccgatgacgatacaggaccttcgcgaaagcgaacgcgcggacag

SEQ ID NO: 96637 - DNA, 2232 bp, Oryza sativa
  Clone ID: PAT_MRT4530_94714C.1
atgaagagatccaaatccaaatcaattgatgcttcggatggtaaggtcgtcggtgcttctgcattctctactactggtgcctcctcccacgcagttatagggtctatttcaagtgatatggcatacagagattgcaatgtaccattatctccagtaatagccatgattgatgacgataattcaaaggataattcttttgatcataatgatgacatgtcaaactcaatgccaagtggtgatgaggcagcgactggtggtactagtgatgcttctacaggggattcatcgggtaaacgccgaagaggaaagaagctaaaggtttcacccaaagttgctactgtaaaggggaggaagcggtcaacttgttggaataacttcacggaggttaaagttccttccaaggtaactccaggagagacagaaacaaaggctaagtgcaagtattgccattcattgtatgcttacaaggctgggggagctactacacatcttgtgaggcacatgaacaagtgcacgccttacttgaaccagttggccaagaagagggctcaagctgttctcaacttcacggcagagaaaggtgactcagatatccctctcattgtcactcctagtgaatataaccatgaggaaactcgtaaactgatagctaagatgataattgttcatgagtacccatttaggatggtagagcatacttggttcaatgttgtgatgaggtatttaaacccttcatatcagtttattggtagaaagaccataagaagtgaatgcttgaaggtttttcattttgagaaagaaaacctcatgaagagtattaggagtgtggaattgattagcttaacatgtgatttgtggacatcaaatcaaaacctttgctacatggctttggttgcctattacatagataaaaattggacaatgcaatgccgagtgctgaactttgtagagttggatcctccacatactgggaatgtcataggtcaggccatctttgattgtctagctgaatggaaaattgaagacaaggttataacaattactcttgacaatgcttccaacaatgatacaactgtcaagggtttaaaagctaagctagcagctagacgatcaagttgttacaatgctaaatacttccatgttcgttgttcacccttggcatctttgacaaagaacataaggtccactgttaagtacatcaagaaatctccatctcgtatacacaagtttgtagaaatctgtagaaatcttgcaatggaattgggagaggggctgaaacttgatgtgaccacaagatggagttctacttatcacatgttgagaacttgcattgcatatcagcaagcattagattcatatgcagaaacagatttaaattatgagtggaagccaagcacagaagagtgggatttgtatgcatcaattgagccaatacttgggtctttggctgaggttactactgcattttcaggatcaacctatcccactgcaaatattttttacccccatattgtcaatgtgaaagttgctttgagagatgcttgtgcttcagaagatgctaatttgaaaaatatgggaaaagcgatgttggataaatttgacaagtattggaatgtgaaaaacaatgcaatggtgcttgctactgttctagacccaaggtacaagttaagattcattgaatggtgttttaagaagatttatccaactgaatttgaaaaggagttagctgaagttcgaactgaattgaatacactttatgataagtttgagaaggatcatagggagaagatggcaactagcaaaggtaagagcttgagagcttcatcatcagtttcaacttttgacataaacaagtctctaccctctgtttcaagcaattttcagtcctatttgcaatcttcttctgaagatgcatcaaagtctgagatgcttttatatcttgatgaacgaaatgaggacttagcaaacaaagcttttgatctacttgtgtggtggaagttgaatgctcatagatacccggtggtatctatgatggctaagaactttttgactataccagccagctcagtgtcttcagaatctacttttagtgctgggggaagagttctaagtgattatcgtagttctctacgcccaacaatggcgacagaagaagaagaggatgttgagagtattacatttcctcaaagtgtagtgcaaagcaactattgctacttggtaccgaactactga

SEQ ID NO: 96638 - DNA, 216 bp, Oryza sativa
  Clone ID: PAT_MRT4530_94715C.1
atggtgaggaggagcgacgacggagtcggctgtggcgtcgtcggagtcctcggcggtggcggcgtcggcctcgggcgaggaggagcggcagcgacggcgaagggtagaggtgcttttgagttgtactacaccaaaagctggcttttggcaaaagtagctgtggcttttgagccctttggttggcttttagcttttgcaaaagcaaaagcaggttga

SEQ ID NO: 96639 - DNA, 640 bp, Oryza sativa
  Clone ID: PAT_MRT4530_94716C.1
atcatatattccctccatttcaaaatgtttgacaccgttgactttttagtacgtgtttgaccattcgtcttattcaaaaaatttaagtaattatttattcttttcatatcatttgattcattgttaaatatactttcatgtacacataattttacatatttcattaattttttttgaataagacgaacggttaaacatgtgctaaaaagtcaatggtgtcaaacattttgaaacggagggagtatgtctttaaatatttgttgcgataataattatgtaatgcttgtaggttcctgagaactgtgtgttttttgttaatatccatgagccaattatttggcgcctccatgagatgattcagaacctaaaatttgataggatatccagttcagagtcttctgctgtctcagttgaccctatactgaagattgggcttcttaatatttctgaaatacgatttagagtctcaatggcaatgtcccctacccagaggccgagaggggttcttgggttctggtcttccttaatgacggcactgggaaacatggagcacatgccggtccgcatagctcaaaggtatcgggaagaattgtgcatgagacaaagtgcactaatgagttctgctatgtctaacattcag

SEQ ID NO: 96640 - DNA, 2706 bp, Oryza sativa
  Clone ID: PAT_MRT4530_94717C.1
ctaagtcctgagctgagccgagcgcgagccgtgagcacctgacgccccagatccgatccctcccctaatccccttcctccgttcctcagccactagcgcagtggcgctggcggtgactggcaagaggagttgccggccgccgcatccatcccctccccagcgccagaccgccagcggcaggccggcagcgccgttcgaacttcgaagccccctctgtgccgccgccgccggcccgccacctcccttccctgcgcggctgcgccgcgggcgtgccgcctcgctccttgcgccgcctacctcccctactgtggctgcgtcggctccgtcctccctccccggcgacgccccctgtgccgtcggcccaccgcggcgccgcctcccttccctagttccctgcaccacctccggcctccgtccaccgtccccagtgccgctcgagccgagctcgacgccccctgcatcgccggcgtccctgactcgacgccgtccatcatgacctcgccgagacgccatgtcgccaaccgatcgacgacagttcatgcatcacaccgcaacgacgagcctaggatgaagagatccaaatccaaatcaattggtgcttcagatggtaacgtcgtcggtgcttctgcattctctactactggtgcctcctcccaagcagttgtagggtctacgacaagtgatatggcatacaaagattgtgatgtaccattatctccaataatagccttgattgatgacgataattcaaaggataattcttttgatcacattgatgacatgtcaatgtcaatgccaagtggtgatgaggcagcgactggtggtactagtgatgcttctggaggggattcattgggtggacgccgaagaggaaagaagctaaaggtttcacccaaagttgctactgtaaaggggaggaagcggtcaacttgttggaataacttcaccgaggttaaagttacttccaaggtaactccaggggagacagaaacaaaggctaagtgcaagtattgccattcattgtatgcttacaaggctgggggagctactacacatcttgtgaggcacatgaacaagtgcacgccttacttgaaccagttggccaagaagagggctcaagctgttctcaacttcacggcagagaaaggtgactcagatatccctctcattgtcacccctagtgagtataaccatgaggaaactcgtaaactgatagctaagatgataattgttcatgagtacccatttaggatggtagagcatacttggttcaatgtcgtgatgaggtatttaaacccttcatatcagtttattggtagaaagaccataagaagtgaatgcttgaaggtttttcattctgagaaagaaaacctcatgaagagtattaggagtgtggaagtgattagcttaacatgtgatttgtggacatcaaatcaaaacctttgctacatggcgttggttgcccattacatagataaaaattggacaatgcaatgccgagtgctgaactttgcagagttggatcctccacatactgggaatgtcataggtcaggccatctttgattgtctagctgaatggaaaattgaagacaaggttataacaattactcttgacaatgcttccaacaatgatacagctgtcaagggtttaaaagctaagctagcagctagacgatcaagttgttacaatgctaaatacttccatgttcgttgttgtgctcacattattaatttaattgtgaatgatggcttagcacccttggcatctttgacaaagaacataaggtctactgttaagtacatcaagaaatctccatctcgtatacacaagtttttagaaatctgtagaaatcttgcaatggaattgggagagggcctgaaacttgatgtgaccacaagatggagttcaacttatcatatgttgagaacttgcattgcatatcagcaagcattagattcatatgcagaaacagatttaaattatgagtggaagcccagcccagaagagtgggatttgtatgcatcaattgagccaatacttgggtctttggctgaggttactactgcattttcaggatcaacctatcccactgcaaatattttttacccccatattgtcaatgtgaaagttgctttgagagatgcttgtgcttcacaagatgctaatttgaagaatatgggaaaagcgatgttggataaatttgacaagtattggaatgtgaaaaacaatgcaatggtgcttgctactgttctagacccaaggtacaagttaagattcattgaatggtgttttaagaagatttatccaactgattttgaaaaggagttagctgaagttcgaactgaattgaatacactttatgataagtttgagaaggagcatagggaaaagatggcagctagcaaagccagttcagtgtcatcagaatctacttttagtgctgggggaagagttctaagtgattatcgtagttctctatgcccaacaatggttgaggcgttgatatgtgcttctagctggattagaggcgctccaatgattacggcagcagaagaagaagaggatgttgagagtattacatttcctcaaagtgtagtgcaaagcaactatatttacttgctgctgtacatcacaagctggctcgagccggctcgagctttgaaacgagccgagccgagctgcactttttgctcgttcaattaa

SEQ ID NO: 96641 - DNA, 1454 bp, Oryza sativa
  unsure (1)..(1454): unsure at all n locations
  Clone ID: PAT_MRT4530_94718C.1
ccggccggggcctgacgccccagatccgatccctcccctaattcccttcctccgttcctcagccactggcgctggcggcgactggcaagaggagttgccggccgccgcatccatcccctccccagcgccagaccgccagcggcaggccggcagcgccgttcgaacttcgaagccccctctatgccgccgccgccggcccgccacctcccttcctgccgcctcgctccttgcgccgcctacctcccctactgtgggtctgtggctgcgtcggctccgtcctccctccccggcgacgccccctgtgccgtcggcccgccgcggcgccgcctcccttccctagttccctgcaccacctccggcctccgtccaccgtccccagtgccgctcgagccgagctcgacgccccctgcgtcgccggcgtccctgactcgacgccgtccatcatgaaatgggccggagagcatcaactataccactcgtccgcaaatgctgcagggcaaattcagctgcaagaaggaccaatggcgccgatgaaagtgtacgggtgggtggtatcgccatggatggcgcgggtgctggtggccctggaggaggccggcgccgagtacgaggtcgttccgatgagcaggtccggcggcgaccaccgccggccggagcacctcgccagaaacccgttcggtgagattccagtactggaggatggcgacctgacgctctatcaatcgcgagcaatcgctaggtacatctttcgcaagtacaaaccagagttcctgggactcggagaaggtggaagcctggaggagtcggcaatggtggacgtgtggctggacgtggaagcccaccagcacgaggccgccgtgaggcccatcctgtggcactgcatcatcaacaagttcgagggccgcgaccgcgaccagggcgtcgtggacgagagcgtccggaagctggagaaggtgctcggggtgtacgaggcgaggctgtcgggctccaggtacctcgccggcgaccgcatcagcctcgcggacctcagccacttctccaacatgcgctacttcatggcgacggagtacgccggcgtggtcgacgcgtacccgcacgtgaaggcgtggtgggaggcgctgctggccaggccgacggtgcagaaggtgatggccggcatgccaccggatttcggcttcggaagtgggaacataccatagtgtgcttgctgttgtccagctttgcagcttgttattagcatgtctgcatttccaataaatgggatagccagctctgagaacctccaaacaatgtcaatgctctcatcaggcgctcgttgcagaagcaaaaaatcatggcgttgctttccacaccccgtgacaaaaccgagccaacacggagccagcgcccttgctgctcggtaagcttgtcnagcctatggaaaactganttccctgancgancccaancccctt

SEQ ID NO: 96642 - DNA, 315 bp, Oryza sativa
  unsure (1)..(315): unsure at all n locations
  Clone ID: PAT_MRT4530_94719C.1
cctcgccaaatttctctgntttttttttcagttttccatcgccgctttgatccgtccgaggcttagctcatggtgttttctcagttttttttccgattttttggaaaaagacatttcnagaaaacncctcccntttttcctttttntttttnttattctagaacaaattttggtttcnacaaaagggaagtgcaaggaccagtanctgtgctagcttttaggccccctattgttgagaagaggattcaanatgaaannatcaanttaagattatgcatccgtatntgtgnttntntaancaaaaaaaaaaaaaaa

SEQ ID NO: 96643 - DNA, 408 bp, Oryza sativa
  Clone ID: PAT_MRT4530_9471C.1
cggacgcgtgggctcgcctcctacaatcgaggcattcagaggagtcggtttgtttctgcgaatagcactaccatctgcactaatgttatgttttgaatggtggtcatttgagatccttgttctcctgtcaggacttctacccaacccagagcttgaaagttcagttctttccatatgcttgacgactacctctttgatgtatactataccatatggtcttggaggcgctgcaagcactcgagtagcaaatgagttaggcgctgggaatcctgaaggagctcgatcggctgttcaccttgtaatgtctattgctgggacagaggcagttcttgttactgggatgcttgttgcagcacagcgcatcttgggctatgcttacagcaatggatgaggagttgtcacatattt

SEQ ID NO: 96644 - DNA, 564 bp, Oryza sativa
  Clone ID: PAT_MRT4530_94720C.1
tgcacgaggacggcaagggcggcggcttcctgtcgtgggatcgccggtacaggattgccgtcgaggcggcgcgggggctctgctacctccaccacgactgctccccgatgatcgtccaccgcgacgttaagtccaacaacatcctcctcggcgacaacttcgaggcgcacgtcgccgacttcggcctcgccaagttcctccgctccggcggcggcgccaccgcctcgtcggagtgcatgtccgccgtcgccggctcgtacggctacatcgccccagagtatgcttacactctaagggtggacgagaagagcgatgtctacagctatggagtggtcctcctggagctcatcacagggcggcggcccgtgggggatttcggggaaggggtggacatcgtgcagtggacgaagagggtcaccgatggccggcgggagagcgtgcaccggatcgtcgatcgccggattagcacggtgccgatggacgaggtggcgcacatcttcttcgtctccatgctgtgcgtccaggagaacagcgtggagcggccgacgatgagggaggtggtgc

SEQ ID NO: 96645 - DNA, 280 bp, Oryza sativa
  Clone ID: PAT_MRT4530_94721C.1
gaggagcgcgcgcgtggcgggtccggtgcccaacgggagcggcctccggcggcgcaagcgcaagaaatcggagttgggggcagaggggagcgggtgggcgtggccgtggccgaggcgactctggccaaccagctggaacggtggcgcgagcttttctgaggggccgctgactccacgcagaatctacgacgtgattgagaacgccatcgtcgtcgccgtcgccgacgtgccgcaggagctcctgcaccgccgcgaccgccgcttctcgcctcccccctaa

SEQ ID NO: 96646 - DNA, 307 bp, Oryza sativa
  Clone ID: PAT_MRT4530_94722C.1
ataaaaaaataaactcaaacggacgaaatatgtggcatgtggaactttccaaagctctaccaaaaaacttctctcctcgagaacacaatcttgcaagcggaatttggaggttttaatatcgccgaacccggtgaagttggggagaatcggatgtaactttttatgtacatgtccgtggatatattatttgcctgattctgagtccggcggcgccagccatgctggtaccctcctcctgccatgtcggttcgcgtgtgccatggtggcaggaggacggcgccagagaggctagcgccggtaccgcgcc

SEQ ID NO: 96647 - DNA, 435 bp, Oryza sativa
  Clone ID: PAT_MRT4530_94723C.1
acccacgcgtccgcccacgcgtccgcggacgcgtgggcggcggagacgcaggcctggcccatttaccggcccaggcccgtttaccagcccatccgggcctgcaacggatacgagtacgaccgagccggcagtgaccaagacggttcaaactctacctaaaagttgtgtgttagacccgtctcgtttaatcaatctactctagcaattaactacttctactcctcgatagaaaaagaggcaatcaaccttgggatttacctagtcccaatgtctttgtagtgttcttttttacttgtagtatgtagtactcctactagttttttttttcaggatattaatccttggatatatactgctggtggttggtgagaaggcataaaaaatcaaacggggtcatttggcttaataaaaaaaaaatactatgtatttttcttg

SEQ ID NO: 96648 - DNA, 990 bp, Oryza sativa
  Clone ID: PAT_MRT4530_94724C.1
atggcaaccgacaggatgccggatagtcactttatggcctctagcaatggtggggcctgctaccaaaacactcatggtactccaatcactatgggggtccccaacttaggttgtcttgttgctagcataggcattgctccgtcaagctctcttatgccggagaggggtctggcaaccgctaattacaacttggttgctaactttccagaagatgctgccgtggtgcctcaacaacagcagttgcaagctgcatctagtaacagcaactcagggttgatcaaaggagggtggacaagagaagaggatgaagttcttagacagatggtgcgacaccatggagatcgcaagtgggcagagattgcaaagagcctccccggtcggatagggaagcagtgccgcgagagatggaccaaccatctgcacccggacattaagaaaggcatctggacagaggaagaggacaggaagctgatcaaagctcatcaaacttatgggaaccgttggtcagcgattgccaggtcgctccccggccggtcggagaacaccgtcaagaaccgctggaacgcgaccaagcgaagcctaaactcaaagcgccgactgaggaagaaaaacaatgagcaagcagtgccaaggcagccttccctcctcgaagagtacatccgtagctgccagcacccactgcccaatgagacagcaccacccgcatcattcgatatcggtgggtacggtaccggtgggacgatcggtgcaagtccaaccccacccacagtgcatgcgttgggtggatctactccactagggttggtgatgttccttgacctacttaaccaggctacaccgcacccaccacagccagacttgaacttgttgaacataacaccggtggtgccacatctcaacactagtgaatactgcctacagctcgatgcgaggggcaactgtagtatggccagctgccggtgcaaccccacgggatcagcgcccaggtag

SEQ ID NO: 96649 - DNA, 531 bp, Oryza sativa
  Clone ID: PAT_MRT4530_94725C.1
atggacgtcgactctgacccggccgccaagggcaagcccacccagatagacctcgaggaccaggcttctatgcatctacaggtttctgtaattgatagacttcaggaatgctctgaatttgtggagttttctgcacctcagctgacgatcatgggggaggctgcaaccccagcgaggcaggaggatgttgtccagttcattgggtggagctttctcttgtggtgcttttgcctgccatggcaaggccagcaagatgggatgaggcttcagctggctagtggggatggagatgaaatcagaaatttactacttttaataatcagcgtcgtcggccctgatctacattgctatattagtgctggcatcgatcggttaaacaacggaaatgaaaaaaatggtatcatgcctagaaatagggctgtcaacgagccgagctcgagcgagctcgtctgcctaggctcgagctcgatacaagctcgagccgagcctataaaatgttcaagctttctgacaggctcggctcgagcttga

SEQ ID NO: 96650 - DNA, 1645 bp, Oryza sativa
  Clone ID: PAT_MRT4530_94726C.1
cggacgcgtgggcggacgcgtgggtgcacattgcacctcgagtccagaggctgagagagctcacggggagaagcaaaccaaaagcccaaaggacttttctaccatcgcgcggcaactcctcgccggcgtgctgctgctgcacctcgcggcgggcgcggcgggcgcaccggcagtgccttcccgagggcccattgatggaaatgctagcaaccatcatttttgttcctttggtcatattccagcttttgtccacgagcgcggcggggcagcagcagtgcctgtccgcgacgttccagaacgggcagacgttcctgaagtgcaacccgctgccggtgctcggcgccagcctgcactggacgcaccacgccgagaacggcacggcggacgtcgcgttccgcgccccgcagcagagcagcggctgggtcgcctgggggatcaacacccgcggcaccaccatgcccggcagcagcgtgttcatcgcctcgcaggacggcagcggctccgtgtccgtcctcatgaccgtgctggagaacaccagcccgagcctgaccaacggcagcctcagcttcgacgtgctgtccccgcccaccgccgactacaccaacggcgtgtacaccatcttcgccaccatcgcgctgcccaacaactccacgacgcagaacaccgtgtggcaggccgggccagggagcaccgggaacgtcggccagcacgcgacgtccggccccaacgtgcagagcatgctgaggctcgacttcagctccggccagagcaccggtaccgcctccaactccaggctgcaccgccgtaacatccatggcatcctgaacgcggtgagctggggcatcctgatcccgatgggcgccatgatcgcgcgctacctccgcgtgttcgaggccgccgacccggcatggttctacctccacatcacctgccagctctccggctacatcctcggcgtcgccggctgggcccctcggcctcaagctcggcagcgagtccaagggcatcacctacagcgcccaccgcaacatcggcatcgccatcttctgcctcgccacgctccaggtgttcgcgctgctgctgaggcccgacaagaagaacaagtacaggttctactggaacatctaccaccactccgtcggctactccgccatcgtcctcgccgccgtcaacatcttcaagggcctcgacatcctcaagccggccagcggctggaagaggagctacattgccatcctcgccacgctcgccggcgtcgcgctcctgctcgaggccatcacctgggtcatcgtcctccggcggaagaagagcgacaagtcgtcgtcgccgtacggcgccaccaacggcaacgggcgcgcgtagtttgatcagcatctgatcgacgtgtgccttgcgctacggcctacgggtgtgtagttttgctgcgatgtgtgtgtgtatttgtcttctgctagctgtgtatcttccattttttgttactgcttctgtagactacgtagaggttcagagattatttcttttcctttttttttttacattttcaggtctcacgatgacacatttgtatacattttttttcaccttgatgtatgattacctttatttatgcatacgtttgattacgattaaaaaaaaaaaaaaaaaa

SEQ ID NO: 96651 - DNA, 285 bp, Oryza sativa
  Clone ID: PAT_MRT4530_94727C.1
atggtggctggcgtcgcctcctcctcctcctccaccctaccctccagccccctctctcccggcggaggtggaggtggttgcagcgtcgcctactcctccgccatcctcccctccggcccctctctcccggtggaggaggaccgcagcggccgcccagatccgatggcgacaacggagaggaccgcagggccacccagatctggcagtgacagcggagaggaccacggtggtcaccagcagcggtggcagcccttctcctatgcatccgcctcctccccgcaatga

SEQ ID NO: 96652 - DNA, 2400 bp, Oryza sativa
  Clone ID: PAT_MRT4530_94728C.1
atgtctcgccgcctcctcctcccacgccgctccctctgctccacctccgcggcggccgccgccacccacctccacgagctcgcctccctcctcgccgccggccgcttccacgcctccgtcgacctcgccaagtctctcctcctcaccgcgcagccgcccgccgcctccgtcgtccccgacctctaccacgccctcgccgccgtcgccgccgccgccgcatccgcatccgcatccgcctcgcctggagaccctcatccggcctcctccttcctctgcgacgccgcctccgccctcgtcgtcgcgtccgcgcggctccgcctccccgacggcgcgctccggcttctgtccgacctcgccgacgaagcccgcgcgccgctgccatccctctcctcctgcaacctcctcctcgaggccctcctctcgctcggccgccacgccgacgtgcgccgcgcgtttgggatcctcgcgtccgccggggcgcgcccggacacgttcgcgtggaacaaggccgtccaggcgtgcgtcgcggcgggcgacctcggcgaggccgtcgggatgctccggcggatgggacgcgacggcgcgccgccgcccaacgcgttctcgtacaacgtggtcatcgcggggatgtggagggcagggaggggtggtgacgccgttgaggtgttcgatgaaatgacggagagggccgtgctgccgaatcatatcacatacaatacgatgattgatgggcacatcaagggcggcgacctggaggctggtttcaggctgcgggatcagatggtgtgtcatggcttgaagccgaatgcgattacgtataatgtgctcctgtccggtctgtgccgtgctggcaggatgggagagacgtcagccttgttggatgaaatggcatcacaaaagatggtgcccgatggcttcacatatagcattttatttgatggtctctcaagaaatggtgactcaaaggcaatgctttcattgtttggaaaatatttgaagaatggagtgacaattggagattacacttgtagtatcttgttgaatggcctgtgtaaggatggcaaagtttcaattgctgaagaggttcttcagtcactggtaaatgcagggttagtcccaacaagggtgatctataacactctgatcaatggatattgccagactggagagcttgaaggggccttctcaacctttggacagatgaagtcgcggcatatcaagccagatcacattacctacaatgcactaatcaatggtttgtgtaaggctgaaagaatcaccaatgcacaagatctgttaatggagatgcaggacaatggagtgaatccaactgtggaaactttcaatacgctgattgatgcttatggaaggactgggcaacttgagaaatgtttcattgttctttccgaaatgcaagagaatgggctaaaaccaaatgttgtctcctatggttcaattgtcaatgctttttgtaagaatggaaaaatcccagaagctgtagctatattggatgatatgtttcataaagatgttttaccaaatgcccaggtgtacaatgctatcatagatgcatacgtagagcatggtcccaatgatcaggcttttattttagttgagaagatgaagagtaacggaatatctccaagtatagtaacctacaatttgcttataaaaggcctttgcaaccagtcgcagatatctgaagctgaggaaattattaacagcttaagtaatcacaggttgatacctgatgctgtcagctataatactttaatatcagcatgctgttacagaggcaatattgataaagccttggatcttcagcaaagaatgcataagtatggcatcaaatctacgttttcatgtgtacctttgagaaatggcatgttgcagagattaccggtttattttgtttatggtgatggaagcatatttcaaaaaagaaatttggctacccagagagctgggcagggattgttgctatttctaggtgctgatattcattgttttgctaactggccagcaacggcggtggtggctctctacgacgacccgtggagtggaggcggtgggggcaacgctggatggcgtggatggagacagcggcgctggatggccgacgatgggagggctgcgggtggcgacgtcggatgcggtcgagggcggaggcgacggcgtcggcaaggaagaggggcgatgacaacatctcgctgccgctgctcccttcatgccctcgatgccggcggccggcgagcgggaggccttggcaatgctcgccgtcgtgccgtcccaccaccgcatcctaacctcaggacacgggtagtgcagggtgagagaaaactctacgcgtgggacccacgaatagctatgctgtttgggctggccaagtttggccattga

SEQ ID NO: 96653 - DNA, 1196 bp, Oryza sativa
  Clone ID: PAT_MRT4530_94729C.1
atggacgccgccgcgcccgcgccgcctgcctcgccgccgctcgccgtgcacctcgtcaccggcggcgggtcctcgccggagcacgcgctcctcctgcgctccctcgccgcggcgcgcgtcgtcgccctcgacgccgagtggaagccgcgccgccgcggccccgccgtcgccgatgacccttcggcggcggcggcggctactccgcccccgctgcagttccccacggtcacgctcctccaggtggcatgccgcggcgacggcgacgggggaggggctgcggctgccgaggtgttcgtcgtcgacctcctcgcggtgccgctggccgaattgcgggagccgctgcgggagctgttcgagaggcctgaggtgctgaagctggggttccggttcaagcaggacctagtgtacctctcggccaccttcgccgctgccctcggctccagtgccggattcgagagagtggagcctttcttggatgtcaccaacgcttattactacctgaaaggccatgacatgcaaaagaggcttccaagggagaccaagagtttggcaacaatttgtgaggaactgcttggtgtttatttatcaaagggtcttcctccatgggatccttctgctggtggagatggctgcccaaaatttttgtgtgatgtgatggtgattgatactttccagttaaagatatccgaggataagcttatgtcgagatgtacaaagtgcaatggaagattcatccaaaaaccgctcacactcgatgaggctattgaagcttcaaaaggtttccagattatcccttcctgcctcttcaagcgaaacttggagttctggaagtgcactgactgcaaccagctctattgggagaggagtgccaagctgcagagactgtctgacctttggggttttagtcgcccaggatggtgaagatttttcattttatcggtttgccattcatcgtttcctttttttctcattgccccgcccacgcgtccgatagccaatcacttcatccgtttcaaataatagtggtgtggccccctcagccacctgggatcgaattcccactaaactgcaaaaagaaagacaaggctgagaacgaaaggaaactgcttgttaagttgtactactactgtacttgagacatgcaacaatacagtttaacttgggaaattccatacgttgcccatctccgtgactcc

SEQ ID NO: 96654 - DNA, 236 bp, Oryza sativa
  unsure (1)..(236): unsure at all n locations
  Clone ID: PAT_MRT4530_9472C.1
atgggcagcgccatggaccccacctttcctgcctcccgcgccagcccgctccaccacctatctccgccctcctcctccctccctcctcccactccggcggtgccgtccgccgggaatcgtttcgagagcagagagacggcttttggtgtctgtgtctcggcgctggtgggcggaggggttntaatgggagaggactctcgcgatcagcggcgggataaaacaggagttatgggaag

SEQ ID NO: 96655 - DNA, 260 bp, Oryza sativa
  Clone ID: PAT_MRT4530_94730C.1
tcgtggacgcgtgggcacaagcgtggggaagaaggtggtggttagaggaggaggccctgggggagccacagcagcggagctggggccaagatgccactctgagacgaggagagtcgaaccacgagtcggtggatatctctccatacacgtccagaaacgaggactgaacgatgcgagaccaagaccagggacaaacgactaaaggaccgttcgacagactacggacacggaccgagcaccatcaagggacagggccctac

SEQ ID NO: 96656 - DNA, 198 bp, Oryza sativa
  Clone ID: PAT_MRT4530_94731C.1
ctacctgcgactgcgagcgaggcgagtagggcggcttcgtcgttcgtcctgctgcttccgccgcatccatcctgatatgacttgttgagtggaaagaatcaatatagtacaatctattttctttctcaatgcgaagaagaaacagttctgctacacatacataccttattaatcacctcttgcgacatactagacatt

SEQ ID NO: 96657 - DNA, 647 bp, Oryza sativa
  Clone ID: PAT_MRT4530_94732C.1
ccctttgccccgcaatacccgacaattgcacgagtgcgtgtcgaatcgccgatgctgacaacctcagcgatgaactccctcatcccttgtctcgactcatgtgacaccctcttcacggcgacctcggtccgggaccgaggtagcacgcccttgtacactctcccgaatcctccggcgccgagcagccgcttgtccttgaacccgccggtggcgtcgtaaagatctttgaatgagaaccgatgcggcccaaattcaacctcccaatcttcgcgcagctcggcgtacctgagccgctggcggaggaggaggaagccgacggcgacggcggtgagcacgatcgccgtggtgactatgggcagcgcgacggtgagcgccttggaccgaggcttgggcccaatgcggggtagcttgggcagcttggcgtagtcgagcgccggggcggcggcgccgccgccgaggcggaagctccagctgaggacgtaatgcttgcacagcacgatgctggacgccgacgaaaagccgacgtacgccgcgtcggcgacgacggtggagaggttgacggccgtggagaggagcggcttcttggccgcgccgctctagaggatccaagctagtacgcgtgcatgcgacgtcatagctcttctata

SEQ ID NO: 96658 - DNA, 191 bp, Oryza sativa
  Clone ID: PAT_MRT4530_94733C.1
tcccgaaactgaattgattgtttcctgaatcaaaagctcaacagaatcgagtcttgcactagtaccctcggagtttcttggccacggtggtcaacacattgtcgccgatttgggagcgcaagaaccggatgaactggtccttcttcatctgtcctctcttgaagcagttgtacgtcctctgcaaagtctgc

SEQ ID NO: 96659 - DNA, 304 bp, Oryza sativa
  Clone ID: PAT_MRT4530_94734C.1
cttcgctagcagtccatgtcctcctgcgcatgcgcgtgcctaggcgggcacatgtgctccgccatgggggtgcgcaagccggcgcacatgttcatgaacaagctcggcttaacgtcccacgagcatgaagactacgtggtaataaaccactcctggctcttcacatccaccggcatgagccggctgctggcgcgcccgaacttatagctgatcaacgccgtctccgtcgaggacctaataactaaggacggccgtgtatgaaccacgacaaccaactgggcactggcgtcaacgaaccacgaca

SEQ ID NO: 96660 - DNA, 132 bp, Oryza sativa
  Clone ID: PAT_MRT4530_94735C.1
gctggtggcacgctactgtcgtggcaaccagctacgtttcaattgataacacatgtcatgcagcaacagtgttcgaactagctcaggctggtagcgtcacattcacatccatgcatagtagctcaggcatcg

SEQ ID NO: 96661 - DNA, 669 bp, Oryza sativa
  Clone ID: PAT_MRT4530_94736C.1
atggagcagcaaccgccgccgcttcctccttccgcctgccggcgctaccgttcctccgcccgccgtagtcgccgcttctacttcagccttgcggcgcagccaccgccgacccctccgagcgcgcctccttcatgcgccagccagccacaccgcctcttcttcttcctccgcacagtgcagccgccgccatcccctccgagcaccaccgcaaccgtcgttgtccctaccctcgcaatggaatggcacgaagcgcttggcggcaccgggtctgcctcaccgcccctgccgcggagatcgaggaggtccgggttagccggattgaagatggcgagggcggcgtcgacggcgagcaggtggagggcgtcggcagagcaaggatccggcgaggacgactacggtggtagtgtcgtccctgacgccggcttccttggtggcgggagagatggtggtgactttgtcaatctcaagaatttgctggcccagtattcgaagatgctcataggggtaagggaaccttcaccggagaagaagtcgacgaggacatccatggcagaagcaaccagaatgaaggagtcggacgccgatgaccccctcaagctatacaaaatggggttaacccgactatcaaagaagactaaatctaagcctactagcgaagaaaggagctag

SEQ ID NO: 96662 - DNA, 452 bp, Oryza sativa
  unsure (1)..(452): unsure at all n locations
  Clone ID: PAT_MRT4530_94737C.1
cccgccgccgccgccgccgacnagagggtcgtcccccaccggctccaaccctcttcacaaccgatggaagcgcgcggcgcgtgtacagccaaatcaaagcgngctctcacgccattgccattgccagccatggcggccaagaaaggagaagaacatcaaagacgacgacgaccatttcctaatctctatcaatctcttgcatcactgctgcatattatattagcagtaattactgacacttcatcagtagtaagtaatacccgcatttcaaaatataagcatttctccgtgttttttaaaatatttccgaacatttctccgcctattcattttgaaaaacacgcataaatgcttatattttagagcgggggaagtactaattagcagtagctgacacatagtatgattatcagtaacaatcctcggctttcttcaaaaaaaaaaaaaaaaaa

SEQ ID NO: 96663 - DNA, 311 bp, Oryza sativa
  Clone ID: PAT_MRT4530_94739C.1
ttgctactcatcatggattagttgagttgaccaccaccaccaccaccacaccacgacagacgggccaatccacccaaccgtctccacttccctccccaccgcgccaaattcccaccccctcctccgccgccgccgccgccgcacgtgcgcctccacctcctctccattgccgccgccgcggcacggtcaaccacccccacccttcggcggagtcgcggaggaatgcggggggggcaatagaaaattcgctcgctagcagttggcatggcggattagtttaatcttgaagtccttggtggtggtggagagga

SEQ ID NO: 96664 - DNA, 308 bp, Oryza sativa
  Clone ID: PAT_MRT4530_9473C.1
atgcggaaaaggaccttttcatcagtgaaacccagtacccaccagcccagccagcccagccggttgaactctcccaggcgaagcagcgagccagccggcgattcagagcggaagcagccggcgacgaagtgtgagatagcgagctatcgagccagcccagccaccgcaaccgcagcgacgctcgcaggggaaaagaaaagattccccctgcttgccccctctcgcctaagagtccgagcacaaggcaacaaaaaggctaagcgagaggcaagaccaaccgaagcaaaaaaagacccaaaccccggagg

SEQ ID NO: 96665 - DNA, 159 bp, Oryza sativa
  Clone ID: PAT_MRT4530_94740C.1
attcttttggatctaattaaatgacctcctccacatgcccttcttcccacggatcgaacgggccgggttctcacaaactggggcgccgcaacggcgacgctaaaaaggtaaaaaaggcccacttgaaagcttgctctatacctctgagactgtgaaaac

SEQ ID NO: 96666 - DNA, 1452 bp, Oryza sativa
  Clone ID: PAT_MRT4530_94741C.1
atggctcgccgtgcagatgcaagaggcggcggtggcggcggcggcggcaaattcatgtcgaggatggtgacgggccagaagccgatccatgtccggccgccgaggccggagaaggaacgcgtggacatggtgccccgcgacgtcgtcgagcggtgcatcgtcgcgctgttcgagaagcgcgggtcgacgcgggaggcggccatggaggacctcgtcggcgcgctcgagggccacgtgtcggcgcgggaggttagctgcaagtacaccaccatcgtgtcccgctgcgtcttctcgctcaagaagggatccgtcagggaggcccgcctcgcctaccgcgccatcggcatcctcgcgctcaccctcggcggcggcggcgacgacaccgccggcgccaaggatgtcctcgccgaggcgttccccttcctcgccaagacggtggaggcgtcgcacgacatggcgaaggtgctcgccgcgatcgacggcctcgccgtcgccacgttcgccggcgaggacggagacgacgagatcgagaggtccatggacgccatctggggcggcgtgatcgacccgagctcagctgggccgggcggctccaggctcgccgcgggggacgcgaggaagacaacgcccgaggccctcgccgccgccgtgtcggcgtgggcgttcctcctcaccgtcgtccacgaccggtacgaggcggaggagggcgagagctgcaaggacaagatcgcgctcctcgccaagctcctcgacgaccacgacgaccgcggcgtccgggtcgccgccggcgaggcgatcgccgcgtgcgtcgagctcaagctggcgcacgacaccccgccggaggacatggaagcgctcaacgccaccgtctcctacctcgccaccgagccctccggcaagggcgccggcgacaagcggcgccacgccgggcagaaggacatcttccggcagatcgaaatcttcttggacgacggcgaggccccgacgaagtcggtgaggacgtcgtcgagcaggcagagcgtgctcaaggtgacaacatggacgaagctcctccagctcaacttcctcacccggtacctcggcaatggcttccacagccacctccagcacaacccgctgttcggcgagacgttcgaggtcgacggcgacgaggtggaggggctaccggcggcgaggaagatgatgagcaggaagcagagggagaagaagcggacgctggagcggaggaggtgccgcgaagccgtgtggaaggagaagaacaagttcgggctgccggaggaggagcccgagagaggcacgacggcgctcatgctgctcccggcgctggcgtgctgccaccacatgctgccgccggtgcaccggcagccgcatctgctgccgcctactgcaccggcgacggcgagccacatgttgccgccggtgcagcagccgattttgttgctcgagtattag

SEQ ID NO: 96667 - DNA, 3652 bp, Oryza sativa
  Clone ID: PAT_MRT4530_94742C.1
atggaggagatagaaggtaatttgctggagtcctcgattggatggctggcggataccatagtggagaacctggacaacgacaagtttggcgcgtggattagccaggtcgggctcgccgatgacaccgaaaagctccggtctgaggtcgagagggtggaggtggtggtcggtgctgtcaaggggagggcgatcgcgaacaaaccgctggcccgatcactcggtcgtctaagggaggtgctgtacgacgccgacgacgcggtcgacgagctcgaatactacaggctccagcatcagctccaaggaggtaaagcgtgtacataaaaaatacattgttcttcccttcttcgtaacgcaggacgtcgtaccaagcagcgagaccgagttgcaacgctggcatagcgagtagcagtggtggcaaaaaacgatccaaggcttgggaggacttcgatatcacggaaaaggaaaacggaaaggcggtgaaggccagatgtatccactgtcacacggtggtcaagtgcggttccgacaaagggacgtcagttttacacaaccatctgaagagtgacaattgtaagaagaaacgtgaagcaattggtccgccaccagacccttccagtgccggtgagggtgcaccaaatgcacctggtaattcagttggcagaaaaaggatgaggatggatggcacttcaacactccacgaggcagttagcacgcatccttggaacaggggtgaactctccaacatgatccaacatatgactcatcagttacaagaggctgtaaatggggttatgaggctatgtgggtatgcaagtttaaatcagaggtgtgagagtacacccctggccccaaatgcaataacatcatcttatcctcttgagcccaaaatgtatgggagagatgcagagatggaatccatcaaaaatctaatcatgggaaataaatccaatgacataaccgtcctaccaattgtaggcataggagggatagggaaaaccactctgtcccaacatgtttataatgatccggaaatcggaaatcagtttgagatcaagatatgggtccatgtatctgataaatttgatgtggttaggatcacaagggagattttagggtgtgtctccaaccgaagttaccaaggaataagcaactttaacatgcttcagcaggatcttgagaaacacatgaaatctaagaagtttctgattgttttggatgatgtctgggatgtcactacagaagactgttggaacaaactactgggtcctttaagacctaatcatgtgaatgcatcagaagtgacaggtaatatgatcattgtgacaactcgaatactgactgtcgctcaaaggtgtggaacggcaggatcaataaatttagaagctctggaagatggtgatatatggtcactatttaaagcatatgcatttagtactgatcaacatggtagtaatcaaaatttagagaatcttgggaggaaaacaattaaggagctaaaaggcaaccccttggcagcaaaaactgtgggctccctactacgaagaaatcttactgaagaccattggatcaacattatagagaacaaagaatggcaatccctgaaacatactgatggcatcatgcatgtgctgaagttcagttatgattatctacctaaccagctacagcaatctttctcttattgttctcttttccccaagggttactctttcagtaaagcacaactgataaaaatatggattgctcaaggatttgtggaaaaatccagtgagaagttcgagcacaaaggatgggaatatctaactgagttggtgaactcgggtttctttcagcaagctgaaagttggtggtcttcatcagtagtttttgttatgcatgatcttatgcatgatttagcacgactggtttcacaaacagaatgtgcaactatagatggatcagagtgcagagagttagcaccgagtatacgtcatttgtcgatagtaactaattctgcatactgcaagtatcaaaatggaaaattatctcgtaatgaggaatttgagaaaagtttgatgaaagttatgtcaaggagtaagttgaggacattggtactaattgggcaatataaccatcatttttttaaatccttccaagatgctttcagggaggctcagcatttgcgactgctgcatatcactgcagcttatgctgatcttgattccttcctttccagtttggcgaacactacccatctcaggtatctaagatttaagaacaaagagtcccatggagctttgccccatgctctgagcaagtgctaccatcttcaagtactagatattggttcatatggaagtccccttatacctgatgacataaataatcttgtcagcctgcggcatcttgcccaaaagggagtgtgttcttccattgctagcataggagaaatggcctcacttcagaagctaacaaatttcaaggttgagaattctattggctttgagataacacaacttcaatgcatgagcgagcccgtagaaccgggtgtgtctcgacttgaaaacgttacaactcagcaagaggccagtggagcaagcctgaaaagcaaccattgcttggagggactacatttgttctggaagggtgtacggaatggatatgacagtgacgggaatagatacgacagtggtgggagctctatgcactcagaaacagaaggggagagattgcaaatgagtgatagcaatggtgcccctagtttagatcatattctagacatagcaagtgaggagcttgaaggtcttgaaccccatcacaacctcaagtatctacggatatcttggtacaatggaactaaagccccaacttggctttccacttcacttacctatctgcaaacacttcgtctagaaaattgtgcagaatggcatacactttctttagaagggctatcattgcttagaaagcttgtgttgatcgagatgaagaatgcatcggtgctctcaatccgttcaccgcaggatattattttaattggaatgcaaaacttgcatacgtgctcttgcacttccatggtggacttcaactccagtttaaggatcctgaagattaaaaggtgcccggttctgaaggtctttccgttgtttgagaactgccgtaacttggggtgctcatggttgccccacctcagcaacctcaccatcgatgattgtcctgatttcactgtgcctcatccttttcccccttcaactactgtttcagagttcttcatcaatggaatttcaacacttccaacgatgagtgaccaggcgagcgtacatgattattccctacaaacggcgctaccctgttttatagggaagcccgtccgcctcaaaaaattactagtgcagaacaacgcaagtttggaatgtctgcagttgcaatgctgcacggcacttgaagagttggagattcgagaatgttcacagctcaccaaaatagaggtctcgcaatccctctgcaatctcaggtttttgaaagtatacaaatgccccagcttccacttgccaatagctggccaaatactcccctcgtcgcctcctcctctcttacgcaacagtgaggagtaggagcagcagtgccgcgagcccaccgttgccgccccctctgctgcaacggcaaagagcag

SEQ ID NO: 96668 - DNA, 276 bp, Oryza sativa
  Clone ID: PAT_MRT4530_94743C.1
catgatctccattcgtttatgagttcctcgtaggcgggggttatattaaactcatgggcgttattaacatcggaatcaatgggttcggacgcatcatcaggctggtggtcaatgtcgcgctgtacagcgaggatgtcgagctcgttgccgtcaacgatccattcatcaccaccgagtgcatgacatacatgttcaagtatgacacccgccacggccagtggaagcatcatcaggtcaaggtcaaggactccaagaccctcatctttggcaccaaag

SEQ ID NO: 96669 - DNA, 1479 bp, Oryza sativa
  Clone ID: PAT_MRT4530_94744C.1
atggcttccacgtcaggcacagcaaaagaccagccggtccatggccgcgccacccaacgtcgcgagtccacctccacctccaccgctgcagccgagggcggcgccgtcgcctcgcagccgccgcgcccgcctcagccccggcccggcaccacccgcccgccattatggcgtccgccgcgttggccatggggctccagctccagcgccgccaccgccgcggcacccggtggtgcttcgaccgccgctgcagcccagggcggcggctccgctgcctctcgcccgccgcgaccgccgcgcccgcctctgccgccgcggccaccgcgcccgcccctgccgcctcttcgagagcccggagagggaggaggccgcggcgacggccggggcgccaccggcaccggatcgagctccgccgctgcagcggtcgaccggaaggggaagaagaaggtcgacgaaggtgatcgggatccggaacaggcgctaaggaagtctggtccccttgaagggaagttactccagagcagcattcgtgcgtatcaagggccccccgccgccgagaaaccatccggcgcgccgccggcagcaacaccccccgcccgcaacaccggccgtctggggctctccgaccgtgaggcagatgatgccttgaacgatatcgacctggcgatggccaggcagctacctgttgttgataccactgttcagaaggaggaggaagagaaggagaaagagaaggagaaggaggaggaggaggatgatgacgacgatgaggagggggagctgctgtcgcacgtttccaggagaaagaacccactccggagtagaattgatggctacatcagcatggacatgaatggcaagcgtagagcaattctggaaataccagttctgttcccctgctatattggtgtttacaagttccacgcattccctgtttccttggagcaagtccttgacagggaggacacagatgaggaacaacgcctccttgctgcccttgaaattgaagttaaaccaatggctatgcaaattgattatcctgaatgggcaactgcattttcctggggccacgaagtatttaagaagctgatagagaacataattggatggaagaatccagcatcaacatacagatcattagcagctacctggatttgctcgcacaaggacgagtatgaacagtatgtagatgatcttggagatgattaccccctggaattttggtgtgctaccaatctccttccacctcgtctgtacacagaccatgttccaatgagggccttggcagccgcgtttagggtgcccctccaagtggaaaatctgcataatggaccagctcaagatatctacaccgcggatggcgtcgacgttcctcgtgtcaccttgctgtacacaggtgcccactatgatatcctttacccacgccctcctggtgagagatcgagacgacgggctgcaggttggctttgtcgcttctggtag

SEQ ID NO: 96670 - DNA, 528 bp, Oryza sativa
  Clone ID: PAT_MRT4530_94745C.1
atggtgcgcggcagcgttgtcgtcatcaacgaccagggcggcatcggagcggtgaccggcgaccgccatcccaagaacgtacttgttaggcccatatcgtggaacacgcagtcacagcccaaaggggagcaaggcggcagcggcagcctcctctccatgctcgcagacgaggaggagcaaggcggcggcgtcagcctcctctccgtgctcgccgatgaggaggagcggcgggcgaccacggcggcagagctggagccacatgcacagccggcggaggcgcggggaggccggcgagctcgtcagcttggtggtggcggcaaggcaaggcagcccgctagacccagcgtcgcggcggtgccgtcgccacagaccgggatgccgacgagcaccctcaccaagcacctgcgaggcctgccgctcctgctcaaccgccgccgtcctcgccacgtcgtttccccaaccgccgcgccgctttgctgtcttcgccgtgccactcctctccttccactttgtgaggcctacgcttag

SEQ ID NO: 96671 - DNA, 441 bp, Oryza sativa
  Clone ID: PAT_MRT4530_94746C.1
tcgttttgcatacgcgtacatgcaccggatgaatgctgggtagtaatcctcgcggcctggccgctagttccaccaccgggcgccaccatgtgcgggatcctgggcgtgctcggagccgccgactggtcgcaagcaaagagggctaacgtgctgtcctgctaccggaggctgaagcacaggggacccgactggtgcgggttgcaccagtgcgagcgaaacttccttgctcagcagcgactggccatacgatcaccgctctacggagaccagtcggtgtgcaacgcggaccgcaccatagtagacttggccactggagagatctacaaccacaagaagatcaggaagcagtaactctccaagcacactgttagtacctgtagggacagcgaggacataatgccgatgtatgaggagtacggtcaggacttcggaggcatgctg

SEQ ID NO: 96672 - DNA, 1536 bp, Oryza sativa
  Clone ID: PAT_MRT4530_94747C.1
atgcctccatgtcgaggtggacaggtggtagcgtatggatctggtggtggatcggcactggtggaagcagatggtatggaggaatcccttgcccgcccaagcctcactgtagaggctcacagcacggagcagcggcaccggagatacggtgttcgggaggtggccgtgcatctacgaccgctcccagtctcgtcctctcccaagcgggagcagtacaaactgcgctcggcgtcgttacaaccgccgctggaggagcatcggttgggctcggctttggagaatgggttggtggcatggggtagacctccttggtgggcgcgggtggggagcatgggggcgattacaagggtgaggaggacaggggccgcgaccgatccccatccgatccgatcccccaatccgatgctccccaccgtcgtcgacgacccctccgccgccgccgccgccgcagtcggcgcggccgcctcctcctccttccccgacgccgacgtctatggcaacggggactcggacgacatcgacttcccctccgaccccaaccacgccaccacccaggccttctcctccgccgccgccgccgcggcggcggcgggtccgggcggcggcggtggcgcggggtcggggtcgggcggggagcggcggccgctgttccagcggctgtggacggaggaggacgagatcgtgatcctgcgagcgttcgcggagttcacggcgcagcgcgggacggcgttcgcgtcgcaccagtacgacacggacccgttctacgaggacatgcggcggcgcctccagctcgacttctccaagagccagctcgtcgagaagctccgccgcctcaagcgcaagtaccgcaactgcgtcgaccgcctccgcgccaccggccagtccttctccttccgctcgccgcacgagcaggccatcttcgagatcgcccgcggcatctggcgccccacctccgacaagcacggccgcgacgccgactccgacgacgacgcgctccccgacgccgccgccgccgtcgccgttcctgccccggccaacggggaggtcaggtccccttcctccacaagagcgcagcagcgccgcggccgccgcaggcgcacggccgccgccgccgccgccaccgccaccgccgccgacgcatccgagccgccgcagccttacccaccggctcccgcgccggcgcccgtcaaggcggaggacgcgctcccgcacttcttcccgcagggcgcggcggtcaccgccaccgcgcacgtccacggcgtggatcccgcctcggcggcggcgtcggcggcggcgaacgcggagggcggcatcctggcgccgctgttcaaggagatggtgcgcgccatgctcaccgccgggatggcgccgccgtcgctggagccgccggcgccggggatcccgatgaaaggggagaggtggaggcagcagcggatcctggagctggaggtgtacctccggcgcatcgacctgctgcaggaccaggtgaggacggcgctggaggagctcaagtccacgccgccggcgacgcagtga

SEQ ID NO: 96673 - DNA, 666 bp, Oryza sativa
  Clone ID: PAT_MRT4530_94748C.1
atgtcgccttcctcaccccctgtcctcctcacccttgtaatcgcccccatgctccccacccgcgcccaccaaggaggtctaccccatgccaccaacccattctccaaagccgagcccaaccgatgctcctccagcggcggttgtaacgacgccgagcgcagtttgtactgctcccgcttgggagaggacgagactgggagctgcactgcgaggacggtggtagggagcaccaagatcggaatgatgggaaggagaaagagaacaaaaggaggagagggagaggagcagccgcgttcacaccttctacccaagctcctcctcctcctccttgccaccattggcatccgccccgccgcaccggtcgtagatgcacggccacctcccgaacaccgtatctccggtgccgctgctccgtgctgtgagcctctacaaaaggaaataagtcaaaagccctttgcctatgttgacacatcaatatgggaggccatgtgcgaggcaacatcttttgggggcatcaatgtaagactagcagatagtagaaaacaaatgcgcaaaagcatacatttcactgtttcaaaaggttcctttcaggtctggtgcatcggcatcagtctctcggtgcataacacgccttgccatgctaagtgtcgagcaaccatatattag

SEQ ID NO: 96674 - DNA, 451 bp, Oryza sativa
  Clone ID: PAT_MRT4530_94749C.1
aaaaaaaaaccacaacctttcaaaaataattataacttttaatacaaggaacccagcttacattcttacccaaacatcacaaaggcaaaccaggccttattttttttcttgcaaaaaagcacagatgcctgcaaaaaccatatcactgccccccccataaaacaaatactaattaatccttctacaaactcctccaatcatctccatgaccccctgaatgcacccacccaccgggccagtgtgggggcgcgaccgctaaaaaactgacactgctccttctgatgtggccgccatggtggtagccctcctcgccaagcttaatttccttattattcttcctgccctttttttccttgaaatccccgcccaccccttggacaccggtgaacttgtccttgatcttctccaccacgccttccttgtgctcccctcccttcttgtggagctcccc

SEQ ID NO: 96675 - DNA, 238 bp, Oryza sativa
  Clone ID: PAT_MRT4530_9474C.1
gacactatagaagagcatgatgcacgcgtacgtaagcttggatctctagagcgcttttagtcaattgggattatctcaaagataatgacacaacattgagataaaatattttttctctagggcaatcatgttctcttctcttgatcaagtaaatttggagaaagaaaaaatggggaaaagaaagaaaggagaaaaaaaagaagaataattgaacaatggagtggtggtcgtcatgatg

SEQ ID NO: 96676 - DNA, 543 bp, Oryza sativa
  Clone ID: PAT_MRT4530_94750C.1
cccacgcgtccgcggacgcgtgggcgcgcacgtccacggcgtggatcccgcctcggcggcggcgtcggcggcggcgaacgcggagggcggcatcctggcgccgctgttcaaggagatggtgcgcgccatgctcaccgccgggatggcgccgccgtcgctggagccgccggcgccggggatcccgatgaaaggggagaggtggaggcagcagcggatcctggagctggaggtgtacctccggcgcatcgacctgctgcaggaccaggtgaggacggcgctggaggagctcaagtccacgccgccggcgacgcagtgacgtcagcacctcatagtacattgtcgcttagcctgacagggaaggaagatgaaggtgtttgttttgcagataggattagcaggaggggttgggacagtaggggtattattatgattattccttgtgtgattctgattcaggtcgctaaatattcatcagtctccctcacattctctgcttctgtcacataagaattagccgtatgcaataaataattgagttatcag

SEQ ID NO: 96677 - DNA, 1065 bp, Oryza sativa
  Clone ID: PAT_MRT4530_94751C.1
cccgaggcccaatttcccgatcccccctcctcctccgccccagatcccgccgagccctcgcccccgagccccaaattgcccccggacccgagccccccccgcccccggctcccctccgctagaggtttcccctccccccgctgtctcaatcggctcttagtccggcgagccctcgtccccgagccccaaattggccgcggatccgagcccccctcgccgccggcttccgatcggtacaggatagtatggtgttttcgcacaacaaaaattccaaccagtttgaccctctttcttatgttaacctgagtggactagatgctgacagtcaatctgtttcatttactgacatgaactcaagagatgctccttcaaattcacatgttacagatgttggaaaggagaatatgttgaataacccagaggaatcaaagatagcaagcactggtctgaagcctggttctccaatttctcctgagaacttcagtttttcttctctcccaggcagcagttgtcatttgtctacgctggatcatggcaagcgacctctttctgatgtcaggccattccaggttgcttgtaagcgtccgaagcaaatagacgaaaatacctggtcaacgagcacgtttgagacatccttttcagatttagctgatgagaccagagagccagattacatctatcataatagtggtatctcagcctgcaatactagttccagcatcccttactctaatctcgagcaattaattggagaggagaacttatacttacctgattgggtgactactttccctggttatactggagatttttggccagcacctgtggctgatcaggttgatgacattgactctcctatccatgaccacctcccaagaaaagctgtggcaattggacctgaccaccaggcagacattccagaatggaggcctaggatttcgatgaccgtgccctacggttctggttctttgtgctgatctgtcatacagttctgtttcacttcagggtctgctcccagggatgaggacagtgaaagtgataagtggatcaagcactgtgtcattg

SEQ ID NO: 96678 - DNA, 846 bp, Oryza sativa
  Clone ID: PAT_MRT4530_94752C.1
atgtcgaacgaggtgaaccatgtagggaaggctcccatgtttaatggcacaaactactccacttggaaaattaaaatgtctactcacctcaaagctatgagcttccatatttggagtattgtggacgtaggctttgctatcaccggcacgcccttgacagagattgttcaccacaacctccaattcaatgcccaaggtatgaatgctttgttcaactctttgagctaagaggagttcgatagagtgagcaaccttgagaccgcatatgatatttggaacaagttggcggagatccatgagggcacaagtgagtacaaggatgcccagcttcatttcctcaagatccaatatgagacattctccatgttgcctcatgagagtgtgaatgacatgtatgggaggctcaatgtcattgtgaatgatctcaaggggcttggggcaaactacaccgatcttgaggttgcccaaaagatgcttagggctctaccggagaagtattagacccttgtcaccatgctcatcaactccgacatgtcaaggatgacacccgcaagcctcttggggaagattaacaccaatgacatgtacaagttgaagaagaaggagatggaggaagcatcaccttccaagaagtgcattgctcttcaaaccgaagttgaagacaagagcaagggcaaggtgaacgaagggggccaagaagccgagagagagagggagagagaaaccgaaaaggagaaagagagaaaggaaaagaaaagagagagagagaaaggagaagaaaagaaaagagagagaatggaaaagaaaagaaaagtaattattaaccttttaaaatttattgtgaca

SEQ ID NO: 96679 - DNA, 194 bp, Oryza sativa
  Clone ID: PAT_MRT4530_94753C.1
tcgtacactctcaggacgacaaacgcccaggagagataattatagagcagcatgtgcggtctcttccaccgccacgaggaatgacaccgggacccaaattcggcaatgaggacggcttgaagaccgaacagacacagcgaggcgcctgccacagtcttgcctacaagacagaagggcacgtacatggcgaagga

SEQ ID NO: 96680 - DNA, 1077 bp, Oryza sativa
  Clone ID: PAT_MRT4530_94754C.1
atgttgcctcatgagagtgtgaatgacatgtatgggaggctcaatgtcattgtgaatgatctcaaggggcttggggcaaactacaccgatcttgaggttgcccaaaagatgcttagggctctaccggagaagtatgagacccttgtcaccatgctcatcaactccgacatgtcaaggatgacatgtcgcgaccgggaaaattgccttttcccgaacgctagtgtattaatccccgtcccaggaaaagccgggactgagccacaaactaagccttacccattagacatgtggaagtacggtagtgctttgcaacagaggcccgagcttaatccttatagtggccggggtgctacttcccacaactggcatgcacccaaaccccaccgaaaacagggtgaacaaggtaataataacaatagcaataataatgtcataacaaagccgagggagcggggcgcgcggaccgggtccacgggaagtggggcccacgcgtcagccccacggtccacggtggaccgggcgcacgcggctggcggcggacgtgacatgacacccgcaagcctcttgggtaagatcaacaccaatgacatgtacaagttgaagaagaaggagatggaggaagcctcaccttccaagaagtgcattgctctccaagccgaagttgaagataagggcaagggcaagaccatagaagaaactcgagcaggtggaacatacagggagatacgcaacatggcaagaaatgaatgcgaaggttcaacgtcctcaacacccgtgcaaatgtatgaggctggttgggagccaactggggatgcgcccggatggacccaagctccatgccatagcattggaggctcaggctgggaaagtgccaggattcaatccttatcaaggaccctaagcaaaagccaagcttggggggagatgtctctccccccaccaagggtaagtgctctctcaaagattgaatatgagcagccaacaattatccaggaacctaagatatttttcatgctctatgatcaagatcatatacccacatatttgcacatgttcaactcctacactgggagctag

SEQ ID NO: 96681 - DNA, 2526 bp, Oryza sativa
  Clone ID: PAT_MRT4530_94755C.1
tcaacgacattcctgcttcagggcctcgtcgatacgcccgccgatgccttcaagctgagcacaagccccgttcagccacgagatgtagccagccgctgactcctcgggacccccgcaaggtactcggagctctctgcagacaacggccatggttgtgcaacaactcctgaggtacgagttgaaccatacctcgcgacctcggagcatttccacagcccggtccctcttcacctccaatatagttctctcaagttcggccacctcaaacttcgtcctccagtactgaatgcgacggtcgcgatcagcaagcacactctcgaggtccgcccaacacgcaaacacctcttccatcacatccttgcgcgcgtcgctagccgccccctgatccaggatcttctgaagatcgagttcaggatgcgccagcctcacacacgcaaggacatggcacgccccggtatagatcccgttggacgtctcctctccgatcctagccgcatgcttggaggggattgcctccatcgcagtcgccagttccgcaagcgaagacgtcagcgagaactcgttgggattcgccgagatggtggtcttgacgccacactccccggcgagctggtgcagaccggtgtaggtgacccgcagcgagccacggatctccaacaagttgttctcgagctccgacatatggcgctcgagcccttgccgttgtcgctcgttgccggccaccagctccctcatcttctggaggtccttgcgaacctctgccaagtcgcgcgtcagcctgtcggcgcgctcattcaccgccgcctccgccaccgccctcgcctccgcgatcttgtgactaatgccgcgagcaccagcctcgaggatgcatcccatctcgacctggagctcttcccaagtgaggacggcagctggcaggcctcgaccagccgcgatatcactggccgggccgctgggcgtcaccttgcggctcctgggcatgaccacgacctcagttgaggccactgcaggagatgcgctggagtttgctccagacccatcttgcgccaccttcgcccgcgccttctcgccgagtgtcaccagcctctgccgtcgcggaggcgggggagacgcatccgaggccgatggagtgggcatcttccagcggttgccgagcacggaggaaaatttcctccccgtcttcggaatcttgccgccgctggtcgttgcagcagcagcggcaacagccgcatcggacgcctcccgggcaacgtcctccttcaacgaagccgccgtctgatggtccacgagcggcccgatgacgtcagtcaaggggagagcgttgatcgcggcttcacgctcaaccgcctccctctcgcaaaaaggggtggggacgttgctcgtcgtcgtgggaccgctaatcatcacctgggcaacatggtgttccatggttgcgccgctcagaccccgaggagaaacccgggtcgcgtcctccggcccagagtagccaaaggctggatgggctcgagcctggagcggctggatccgtctaccaatgaagttggcagtgacttcataccccgacaacccccgtactcggaggtcatcaatgatatcgatgaaagattggagggatggggtcaaggcgggtttggcggtccaagatggaatcttgtctggttgctcctcaagaacaatgaagactggatccgaatcttctatctgaagatagaaccacctcccccgccatttgttgcgagatgaggggcactggaaggggagagagagaacgacggcgcgagctcgattccgacggggagagagaacggcgagtggcggaaacggtggagggaggcacggggagcgtttaaatagtgttgggagggggagagaactgccggatgagggggaatcggccgcggaagatccggccgccattgatgcgccggcgaagtttgcgggagtgtttccaaacgaatccgagggagagagagggaaaagtggggggaaagggagagggaatcacggggagtgatttccccctctttattgcgcgcgggggcggcgggatgcggcggaatccgcggcggcggcggcgctagggcacgggcgaggcggcgggtcttgtcgcgaccgagaaaattgccttttcccgaacgctagtgtattaatccccgtcccaggaaatgccgggagatgtccatcgacccccgacttcgtccatttccatccgtgtacttttgtttataaccagactgagccacaaactaagccttacccactagacatgtggaagtacggtagtgctttgcaacagaggcccgagcttaatccttatagtggccggggtgctacttcccacaactagcatgcacccaaaccccaccgaaaaacaggttttaggggctttgaaagaggaagagaggtgcagcaaccacaacaaccatggcagtccacctccacctcctcctccgcctccaccaccaccaccagacaccaacgctattctcaaagaaagacaagacgaagaggatgtgcgttgactac

SEQ ID NO: 96682 - DNA, 520 bp, Oryza sativa
  Clone ID: PAT_MRT4530_94756C.1
tttcgacaaaacttggagctccaccgcggtggcggccgctctaaactagtggatcccccgggctgcaggaattcggcacgagctcgtgccgaattcggcacgagcaaaccctagccgcctctcgtttcttctcgtcctctccacgcccccgacatctcacgagcacacgacgacgaacccatggcgtccgacaccgacacgttcgccttccatgccgagatcaaccagctgctgtccctcgtcatcaacaccttctactccagcaagggagatcttcctcccgcgagctcatctccaaattcctcccagtccattgggataagataacggttccaaaagccttcacggacagtaacaagcttcgaatccccacccgggagctttccttccacatttgtccccggacaagggctagccaacccccttttcgatcatccaaccattggttttcggcattgaccaaattcgggactctttcagacaacctccgggtaccatccccccaggttccgggggacca

SEQ ID NO: 96683 - DNA, 840 bp, Oryza sativa
  Clone ID: PAT_MRT4530_94757C.1
atggctgatggtgccaagcttctcctgtggttgctgctcttgagcagctcgccgtggtgtttttgttctgaacttgatgtccaatgcctggagacactctatcgatcagtgatagattccaacggcatactccaatcctcatggacttttgttgacaacggtactgacgggtacatatgcaaatttactggtgtggagtgctggcatcctgacgagaacagggtactttctttgcgtctcggtaacctaggacttcagggcccatttcctcaaggtctgcagagctgtacaagcatgattggcctggatctgtctagtaacattttttcaggaccaatccctgctgacatcgccacgcaggttccctgtctaacatctttggatctctcatacaacagtttttcaggtccaataccagccagcatctcaaatatgacatacctgaacacactcaaccttcagcacaaccaattcagcggtgaaattccaaggcaattcgattcaattggccggttgatttcgtttaatgttgctgataatttactatcagggcctattccatcctcattacagaaattttcggcttcaaattttgctgaaaaccaaggcttgtgtggtgctccgttggataactgtcccaggaggaggagatggagactcaggctgcacagaatcaacgacgagtccagcatcggagcggctgttggtttcgtcgttgggttcgtggtggccttctacttccctcactggtttgtcttctccaagaggcttcatccctacatctttcaaatatggtccattccttctggaaatctatctgccaacctgcgaagaacatga

SEQ ID NO: 96684 - DNA, 613 bp, Oryza sativa
  Clone ID: PAT_MRT4530_94758C.1
tgctagcggagatctcaatagctcctcgaatcatgactgacgttgatggtgcgttgaaggcaaagcaaatgagggctcaggttgatgaatacctaaagagaccagaaggttccctctttttaactaatctaaagcagaagttgttgctaccacaaaacgaggcaaatgttgctggcactcgttacaatgtccctctagttaattcacttgtcctttacgtgggcattcaggctgtgcaacagttgcaacaaaacaaggcgaatgcatcagcagctgcagcggcacaaatcagccaaagtcctcaaatggatatattccagattgaaacagctactgagatgttcagaaaccttgtaatgactatggacacagaaggtcgctaccttattctcaatgcgattgctaaccagcttcgttatccaaatagccatacccactacttctccttcataattctgtacttgtttgctgaggcaactcaggaaattgtgcaggagcagataactagggttcttttggaaaggctgattgtcaaccgccctcatccttggggattactcattactttcattgagctgattaagaatccacgctacagtttctggactcgatc

SEQ ID NO: 96685 - DNA, 468 bp, Oryza sativa
  Clone ID: PAT_MRT4530_94759C.1
atggcgccgacgcggcgcacacgtggcggccacgtggcagccgtgcgggcggcggggttggatggccccgatctaccgcccggtagatcagacggtggaggcgtctcgcggccgggcgcgcacgagcacggcccaagccgacccggcggccgtggcgcgcggcagcgcagcgcgacacgacggcgtcgcaaggtggcgaggggccaacggtggagagcagcggcgaccgacgacgagtggcggcgcacggcgagcgacggcggcgcggccccgagtggaaaggcagcggcgctaagagggagagggggaaagacgacggggagatgctcaccggggttcagccggcacgagggggcgatggcgaacggcgcggaggccggcagaggagaggtggacgggacgacccgcaccacggcgagcgcgacggcgttgatggcgcggctcggcacggtggctagcggcggctag

SEQ ID NO: 96686 - DNA, 222 bp, Oryza sativa
  Clone ID: PAT_MRT4530_9475C.1
attgggcaagggtttcaaagacccccccatgggggtcccaggatctcattgaacggaacttttctccacccctcacaggcccacaaaaaacagccgggtgcctgcagggaaaaaatttacccgaggaccccacccgtcccattcctcattctcgtccccgtgttatccccgggaaactccggaccgcaccccgcctgacctccacttttaaaattggtaccc

SEQ ID NO: 96687 - DNA, 131 bp, Oryza sativa
  unsure (1)..(131): unsure at all n locations
  Clone ID: PAT_MRT4530_94760C.1
atantaaataantncttatgacatatatactatgttgcncgatgtagcttttgtacatatttcatgcatgattctcagtgtattaattaatnatattatgagatttgcaaaatgttaaaaaaaaaaaaaaa

SEQ ID NO: 96688 - DNA, 497 bp, Oryza sativa
  Clone ID: PAT_MRT4530_94761C.1
ggctcttaaacatccaatacctttccagacaaaaccaaaaacaaacattgatcctgcaaactggagggcagctgagcaaccatttgttcatatgccaatggtttttactctggttggttgatcgaaacagctactggaaacaaccatttattcggatcgggggttgtaaaagcaaaaaagaaaaaaagaaagaccccgagttgttttggctgattgggcaaaagctttaggacctgcaaggcggcggggggttggtggaacaagaggagcggaaggcgtcaatggggtcctggcacttggagggggcgcccttgttctccttgaggcacttgggcagggccgccacgttgaacgccgccgcctttttttttgtggccggcccgtcccttccgccgccttcggctgttcccggcttcgccttcggcggcggcgttgtttccatgggaccctgggggggccctttgcaaatatggatgagcggaaggctcgaggtcccc

SEQ ID NO: 96689 - DNA, 1024 bp, Oryza sativa
  Clone ID: PAT_MRT4530_94762C.1
tttttttttttttgttaaaggttcaaaccaggtagacattctgactccaatataacaaggttttacaagcggatacaagccaaataatattattgttctctgaatgcacatgaccttcattgggaaaaaactgtaaagaccgcgcaaagaaagacatggtgctctggagcaaaagcaagaagatcattatttatctctggaaatttctcaaaggactaatattctgaatcttcatcctctacagatccagattgtgatgccttctcatggtcattctcaagttggctgaagttccccttctctttgatcaactgaatatggtggtgcttgcaatagagcttcccttcgtgtgcgatgtaatttgaggggctaatggtgcatcctccatgacagcacttgaagcagcttttgtgatacatggtgttattgacagtaaccctttcaattggatagactgtcttgttgcatcccacgcatttctctctcgtgccagcaaatgcgctcgagactttaatagcattctcattctcaactgttttttctggcttgacaacctttggagttccttcaaagctcttgtctaaacttccagtcctcttgaacagctgatcaaagtgaggcctgcagtagagcactccttcaaacgagttgtagttcgcgagcttgagggtgcccttgcaatggtggcaccggaagcaggccttgtggtagaccctgttgtcggcggtgagcttgtcgaccaggtacaccgtcttgtcgcacgccatgcacttggtcgtcgtcccctgaaaggaagtcgccattgcccagctccctcaccttcttcttccctctctctccctctccctctctgcttgtgctttcagtgtccaagaaaaacgacccctcagcccttgagctccttatggttatatgtgaatggtgtcgtggttggtggtgtcctggcctgcagtcattgatcctgcagggaggaggaggagcaggaggaggccagcgaacgcaagcaggcacaggcaagaacaaa

SEQ ID NO: 96690 - DNA, 534 bp, Oryza sativa
  unsure (1)..(534): unsure at all n locations
  Clone ID: PAT_MRT4530_94763C.1
aaagnccacgcnccccgcaccgcaccacccaaagcggggggaaacccaaaccggcgaaaccctagatctctctccgctccgcctcgtcgctcccccaaaccctagatccccgccatgcaccaccccagggcgcgctacccgcccggctacacctccggcggcggcggcggaggcggaggcggaggaggaggcggccgtggtaatggcggcggcggatttgaggagggtggcggcggcggcggcgggaaccacggctactacggccggggtccgcagccgcagccgcagcagcagcactaccaccaccaggcgcagcagctgcatcagcatcagcagcagcagcagcacgcgcagaggaacagctcctcgcagcagcagcagtggctgcggcgggaccaggccacggcggcggctgcgtccggggaggtcgcggcgaggacggcggcgcagctggaagccgtcgactcgagctctgaagattggaaggcacaattgaatttgacagctgcagattttttttataggactgaggat

SEQ ID NO: 96691 - DNA, 533 bp, Oryza sativa
  Clone ID: PAT_MRT4530_94764C.1
gggttggttttttattttttttttttttttttttttttttttttttttttttactctgtgattgtgatttgttttaatcgcgtcgacgacttatattatttttttggcgtagacgaggggttacgaagaaaaaaaacagagacacggaacgggggggggggaaaaagcaggataatagggggacaaaaatgcacccaccgcaaaaatggggatggggaactagaactccagtagaaagagagcaagccagtctagaacaagccggaaagggaaggggaggtctcaacggaccaaagaaaaaggtttcaataaaaaaaaatgtgggaaaaggagcaagggtttatttagaaattttacaaaaagcaacaaaaagaggggggggttgaaaaaacccgggggaaataaaaaaagtttaaaaaaggataaggggggggggggggaaaacccggaaaaaaatgaggcggcaaaaaaggttccagggggggggcccagaaaaacgaggccggaaccgtgggaaaaaaaaagtttctata

SEQ ID NO: 96692 - DNA, 2764 bp, Oryza sativa
  Clone ID: PAT_MRT4530_94765C.1
ctcccgatttcgacttcctcctgatccacctccaaagcccacgccacccgcaccgcaccacccaaagcggggggaaacccaaaccggcgaaaccctagatctctctccgctccgcctcgtcgctcccccaaaccctagatccccgccatgcaccaccccagggcgcgctacccgcccggctacacctccggcggcggcggcggaggcggaggcggaggaggaggcggccgtggtaatggcggcggcggatttggaggaggtggcggcggcggcggcgggaaccacggctactacggccggggtccgcagccgcagccgcagcagcagcactaccaccaccaggcgcagcaggtgggtcagcatcagcagcagcagcaacacgctcagaggaacagctcctcgcagtagcagcagtggctgcggcggttgcaggtagtggcattgctcggtcagggggcgttcgcggcaaggacggcagcggctcttccatccctgggtgggatgacagaggtttttgttgcagtagtcatgtcaccaggttcagaaaaacgtcatatgacagcggatgacgttgcaacgaaaggaacaggccacggcggcggctgcgtccgaggaggtcgcggcgaggacggcggcgcagctggaagccgtcgactcgagctctgaagattggaaggcacaattgaatttgccagctccagatacacgttataggacagaggatgtcactgcaacgaaaggcaacgagtttgaggattactttttgaaacgtgaactactaatgggaatgtatgagaaaggattcgaaaggccatcacctattcaggaagaaagcatacctcacaagtttgtaaagagcttgggaagtatctgaatattcaagttatggttagtactggtggaaccagcttaaaggatgacattatgcgtttgtatcaacctgttcatttacttgttgggacacctggtcggatactagatctaactaggaagggcatctgtgtgctgaaggattgttcaatgctcgtaatggatgaggcagacaaactgttagctccagagtttcagccttccatagagcaactcatccatttccttccagctaatcgtcaactattgatgttttcagcaacctttccagtaaccgttaaggatttcaaagagaaatacctacctaggccttatgttattaatctcatggatgaactaacactaaagggaattacacaatactatgctttcgtggaagaaagacagaaagttcactgtctgaatacacttttctcgaagcttcaaataaaccagtccattatattctgtaactctgttaacagagttgagctactggctaagaaaatcaccgagcttggctattcatgcttctacattcatgcaaaaatgttgcaagaccatcgaaaccgagtgtttcatgattttcgcaatggtgcttgcagaaaccttgtgtgcacagatctgtttacaagaggaattgacatccaagctgtgaatgttgtcattaactctgacttccctaagacttctgaaacatacttgcataggtttgcttttgttactgttggtcgttcagggagatttggacaccttggtttggcggtgaacttaatcacttatgaggaccgtttcagcggaattgacatccaagctgtgaatgttgtcattaattttgacttccctaagacttctgaaacatacttgcatggagggttggtcgttcagggagatttggacaccttggtttggcggtgaacttaatcacttatgaggaccgtttcaacttgtatcggattgagcaagaacttgggacagaaataaaaacgatacccccacaaatcgatctggcagtgtattgtcaatgatcaatgtaacattgtaacggtgtttttatcatttacttattgttaggcaagtacatcagatgtacatagcacctcatcagggttttatttggtgccttgatgacacatctaagcttatattccattagtgaggaagtgttttctgtcggcactgatactaatcatgttaactgtggacttgcatttttggctgcttgaagacgctgcttgaagacccagggctgcggccaaactgaacctttttcttgctccttgtatctgctcaatatttgctttatattcatttgctagcgacagttttggttgtgttatattaggatactgctgcttgagtctgttaccgtcactgtggttccttaattttcctttcctttttcccttttcttctcatgtttggattggactagtagaagtatttccctcactgtattcctcgtgtcaatttctattatccttggtgtagactgttaactttctttaatttaccctcgtttcgtaataaaaaaaaaaaaactggttgctgccgtccaccggcagagtgcgggtacccagctgtaaacgcttcctactttgatttgagctatcatccagtcagcacgaatgtcgactgcaaactgtacaaaaacgcacgctctgttctgtgctatgattgtgattcttgcaaagctggggttgctcaatacatgaaaacagagtggagggtggtagccatctttaacgtcatactgtttgtcatcttgttggcttgtgaacattttaggaataagttcattttaggtcccttaactttacaccgaatccgattttcatccttcaacccaaaaaccagatacaatcggtccctgagctatcaaaaccggtgcaaacgaggtcccttggcggtttag

SEQ ID NO: 96693 - DNA, 4966 bp, Oryza sativa
  Clone ID: PAT_MRT4530_94766C.1
aaaaaaacaatgaacgatggattaaaaagggaaatacctaacattaatttaaacttattttggtagacctgtttttaaacaaaataacaagcatgcccgcgcattcacgcgggctacctttccagtttgctttctagtttgtagtaagtacttcttcccttgatgaaatttggtctgctttcttaaccggctggcgaaaaaaataatctatcaccataggccaagcaagtattgccatccagcctgccaaccgtattgagcaccctgtccacacatcatccgctgtcaccaaaacgcccctgctgaattgaattgctgatgatatcatcgggtgtgtccaacggctccagcacatgaactgcaccatcgctcatgccgactgcaaactggttaggcttccagggatgcgcagcgacaaccatgggatacacaatttcaccaccgctagaaactgaagatggtatataggcagaaggtgcaatcctgcactgtaacatgagagattccacttgaaatattccaattgcaccatcacagaatccagcgtagatcaataagccatccgatgagtatactgcactcgaaactggagcagagagtggatcacttgggaaccatgagcacaagcattctagctcctcatcgtagatcgccaattggctctcatgaactactaaaaggcgcttttggtcatagtgaaactgcaccattatatcaccaactaaagctccagaatgattagatggaggttggatatatctggatttcttcttcgcccaatcttccatactccaaacacatagcagtccagttatctttttctgatggcccttgagcacccatttaacctgtgcaattcgattaagataagtcaatattttgtcatgttgctcgtcaacacggatattgtagagtagaatcgaagagtcatccgttccaatagctatgatgttattgtcatgcgggtggaatgcgaggaaagttgcagagggtggaggtgctatgaaagtagtcatggtcttgaaatttaacatgttgaacaacgaaactttgccaccagatgcagaaattagatagcagtcatttttggatagtagactgcaggcagctgcttcttcagggttgccattagcagtgtcattcattagaatgtcactttccggttgccacacttgaggtgggacagatgtggtggacatgccagcaggattcttgtcattgctctcccatttccacagcttatgaacagcatttgagctgagagctaaaagtcccttcccactttttctataaagcagacagataactttgcttgaagatgcttctgtaactggcatacgcagtgctcgaatacggccagagctaacaatgttcgccttccaggcctcatttaccaactccggggttctgctcacatgcatatatgcctcttggtagggtgagagcacagcttgttcgtcttgccatttggtttgaacagttgggtgtttgggatggaccgcagctgagttcatcaatgcagcagccacttcctccacctctgacagacgggcatctccacatttcagtactatggtgactttctggagcgaacttcttccaagcttctcgaagctaagcagcttgtcaaaaccaagctgggttgcatctttcaggaaccgcatatggacagcaaactcgaggaattcaagacttggcatgataatagatgctaagcttctattgtctgtgatgttgcacttgctgccgtgcagatcaaaccagatagatgtaccaagtatccttaagattctcaacttccgaaagtagccaacatcttcagtatgaatctttatgctaaccaattcggtctcatgcaaacgcagcacaaggcagcggagctctggcaacctcgcaagggtttccatgtcctgctctttcacaattagcacaaccacatccagacaggagaggttcggagcaagcgatgatttaatccatgctggcagtccagagaacacaaagcaattcagacacaggtatcggagatgcaggcaggagacagatcttgcactgcttgtcactctccttgtcactaggggtgggccctcaatgtgcaggtcccggatattgtgcagcttgcttagggattccaacaaagctctctccatgctctcattcaaatcctcaaaataagtccggagcacccttagttccctcagtaggcccagctcattcacaaacttcatcgtagacttcgtagtatcatcaacagcagcagcatcatcatcatcatcaacagaagcagcatcgtcatcataaacagcagcagcaggctctatccaaagctcttgcaatgaggtcaacttaccgatcaaaccaatcttcaccattatttcccaatcagctcgtaggcaaacaagttgtgtcagcagtcccacctcctctggcagctcctttatgcgacttccccttaaatccagtgtctgcagaaacttgagataccttacttccctgggcagcttagtgatatatgtatctactaacccgaggtacctcaggtgaagtaaactcccaagatggcttggcatagttttgtccctatcttccaaaacattaggcgtctcactttctgcacagtttatcacatctaatacacgtaaaaccggagtgtgtaggcataatgaaccgaagcactgactggcaataagggatctcacattcttcagagtgatattagctagctgaccatccttgtgcactagaacacgctgcagggctaacctgcgagcaatgctccccggaagtttctgtcgctcatcaccattcaatacagtgacaaaattttcttcactcgataatgagtggatcatatcaagaaccatatcatgaacgcagcaaccatctacatacccttcatgttttgtctccactggctggatcatgcttctatttatcaactcattgaagcacctctccccgagctcaaataatcctaaccctgctgctagttcctcatggatgaaaccttcagctatccacttccatatcaaactatttttctctatcacatgatcttcgggaaatacacatagatacaataagcaatctacatcatcattgtcttcatgcccaaaaccgacagagttgtagacctcagaccagtcctcccctggtttactggccaacaaactagctattgtaatgatagctaatggtacaccaccacatttcttcaaaattttttcacatgccttagctgatggattatcgaaatacttccattcaccatcaactattcttgcatacaataatttttcagagttatcacgagaaagtggctgaattttgtaagcttcaccagcatgtgtggcaacttcagaaatacgagtagttatgacaagtctacttccacaatcactttcttgcagagcacatctgattaatttccatgactccttgtcccatatatcatcaataacaatgaaacacctcttctccttgacgaattccttgagttcgtccatgagctgcttttcatccaacaccatcatattcggattcgtgtacttttccttgtcaagatcaatgagaatgtctctaaagactttcttcatgtcaggattccgacccactggaacaaaagctccgcattcgaaatgcggttcaacctggtcatcgaatgctttattcatgtcaggattctggtcgactggaacagaagccctgcacttgaaatgcggtttgaagtggtcatagacagctttggcaagagtggtcttgccgagtcctccaaatccaacgacagagatgactttcatcttcttgtcggacacatcaacatcaccccccagggatagcttgtttatgagatcgtcccttggcccgtcaatgccaacaagctctgttgcccttttgtacagattctggagacgaggatcgatggtcgttgccgctagagacttgaggacaacgctgtcgactgtgtacttgacatgccttgctttcacctgctcgaacttcttgttaatgtcttggatcaggttagagatcttacggcgagccttgctcttcttgaacagcttgcctaacttcttccggaggcgcaggagcatgtgtggatcggtggggtcagggccatcgtcgtgcaccaagaatgtgtcgacgatgtcctccatttcgtaggatgcctccctgacatcgcgcgcccaaagcttgaccagctcatcgacctgctccgatggcacatcgccgatgcccgtttgcaggccgtactctttctcgagcagctgaagcagcttgggcagcaggctcctcatcgcccccgtcgccagctccatgcttgcaaactgggggtcgggaacaagcctgtcgtagacagcaaggaaggcccgcccgccccagatccgccgcctcctcttggcctgaagcaggagggacgcgcagctctgctgtccctgccgctcgccggccagatccagcccctggaaggggttggttgacttctgtgagaccggaatggaagtcactccggatggtcgcaccacgccgctcccaccgccatcatcatgcctacttcctaccgctcctaccatgccaacccgcgctaggtcagcctcccgccaacctccttccgtgcgcgacctaccaccgatgccgaccgcgccacattggccactatgcccttgccccaccatgttagatgctcggtgccagccagagccaaccacggagttgccaggcgccaaatctaaccatcgtctcggccctcgctccacaccgttgtctccttgcgcccgacgccgctgtctccctgcacccggcgctgcctttcccgcacttcgccgcctctcacaggaccaccccgccaccatgcccgatctggctgctcagctgctagatcgtcgagagcgctgccggagtgttcttcccgccgcctgagtcgggggtgagcggcggctaggtttttcgccacctggttgcccat

SEQ ID NO: 96694 - DNA, 447 bp, Oryza sativa
  Clone ID: PAT_MRT4530_94767C.1
cttttcttcttcttcgttgggcgtgggcgtcgcgagaggcgagatggctgcggcgacgttggcggcggctagcatgggggtggtgacggaggtgctggggagcgacgtcgtcgacgaggtcgaccagcccatcatcgactacattgccaacgtcctcgccgacgaggactttgacttctgtgcccccgacggccacggcatctttgacgcgctcggtgaccttctcatcgacgctcggtgcgtcgccgactaggagcactgtctcgaggtctgcagtaagatttgcgaaaaatttggaaagcatggccttggtaaacctaaacaagctatgctgagcctttttacttcttttcgtttgaacgatggaatggactattatggtgtcccccaaaagcaagcttgagtttttgttggacccttggttttcattacggacaaaacctatat

SEQ ID NO: 96695 - DNA, 511 bp, Oryza sativa
  Clone ID: PAT_MRT4530_94768C.1
gattccagcgtagatcattaagccatccgatgagtatactgcactcgaaactggagcagagagtggatcacttgggaaccatgagcacaagcattctagctcctcatcgtagatcgccaattggctctcatgaactactaaaaggcgcttttggtcatagtgaaactgcaccattatatcaccaactaaagctccagaatgattagatggaggttggatatatctggatttcttcttcgcccaatcttccatactccaaacacatagctgaagatacaagcacattcattgatagcgagaataccagtccagttatctttttctgatggcccttgagcacccatttaacctcgtcaacacggatattgtagagtagaatcgaagagtcatccgttccaatagctatgatgttattgtcatgcgggtggaatgcgaggaaagttgcagagggtggaggtgctatgaaagtagtcatggtcttgaaatttaacatgttgaacaacgaaacttt

SEQ ID NO: 96696 - DNA, 633 bp, Oryza sativa
  Clone ID: PAT_MRT4530_94769C.1
atggccctgcttgtcttcaccagccgcggcggcgctgctcggagaggcggcggcggcggccgagtcgacgagcggcagagagagagagagagagaaaaggcagagaaggttttgaggccacaggaggtggggtcgcgctcgcgttttgttaccgtcgctcgcagcgccgaagtggcgtgtggtgcccgagtggcattctcgtcatttccatgccacggactcggggcgcccgaggtttacgccatccgaaacccgctttacccttttactcccaccgacgggtggggccccagatcaccagggtcccacaagtcatcgacgtggaggggcgatacgtgtggtccacgcgggcgaggaggccaatctccagcccaccaaacggggatggaaactggcgttagccatgtccgtgagggcgagagggggggtgggggtggggcccaccgcgtcagggaccgaccggaccgtccgtccatgcagcacggcacgggtcctcgtacgatcggattttcggtgtgggcccggcgtgtcagttttgatggtgtggtttcacgccgtccggccctgtgctcctggactcggtctactctttccccggcgcggcaaacggtgcgggaccccaccggccagtga

SEQ ID NO: 96697 - DNA, 4206 bp, Oryza sativa
  Clone ID: PAT_MRT4530_9476C.1
atggctgagctactctcagctcttctacctgcccttctgaagaaagctggcgagtctctctccacagagtttagtttcattgggggtattgaacaccggcgttcagagctgtataccttgctgcttgccatcaaccaagtgatctatggtgccgaggagcaggcatccaagaagcctgctgtgaagtcctggatcaccaagctgaagctggctgcctgtgatgctgatgatgccctcgatgagctgcactacgaggcgcttcgcagcgaggcactccgtcgtgggcataaaatcaacagtggcgtaagggctttcttctcttctcattataatcctttactgttcaagtataggataggaaagaaactccagcagatagttgaacagattgatcagcttgtttcgcaaatgaatcaatttgggttcctaaattgccccatgccagaggatgagaggatgcagacctattcctacgtcgacgagcaggaaggtattggaaggcacaaagaaagagatgaattcacccatatgcttctaagtgccaagagtgacaaattgctaatacttcctattgttgggataggaggattgggcaagacaactcttgcacagctggtcttcaatgacgtgaaagtgaaagcacattttcaaaagcatatgtgggtttgtgtctcagagaacttcagtgttcctgatattgtcaaggggataattgacactgcaattgggaatgattgtggactgaagagtgataacctggaattgctacaacaacgtctccgggaagaactgagccaaaagaggtacctccttgtactagatgatgtttggaatgaagatgaacaaaaatgggaggctctaagaacattgctttgttcctgtaaaatgggaagtgcggtggttgtcactacccgaaattcgaatgttgcgtcagtcatggggacagttcctccattggctctagaacaacttagccaagaagattcctggactctattctgtgaaagagcgttccgtacaggtgtggccaagtcttgtgagtttgtcgagattggtacaaaaattgttcaaaaatgttctggagtcccattagcaataaatagtatgggaggcctgctgagtagaaaacatagtgtaagggattggctggcgatccttcaaaacaatacttgggaggaaaataacatactgacagtcctatcattgagctacaaacatctaccttcttttatgaaacagtgctttgctttttgtgctgtattcccaaaggactacgagattgataaggatgatctaatacatctgtggatatcaaatggattcattccatctaaagagacctcggacatagaagaaactgggaacaaggtttttctggagcttctttggagatcatttttccaaaatgcgaagcaaactcggtcccgcaaggaagagtacatatatgggtacaaagatgtaactacatgcaaaattcatgatcttatgcatgatcttgcagtttctataagcggggatgagtgctatactttgcaaaatcttgttgaaataaataaaatgccgaagaatgtccatcatctagttttcccacatccacacaagattggtttcgtgatgcagcgttgtccaattatccgaagtctatttagtttacataagaatcatatgaattctatgaaggacgtcagattcatggtgtccccttgtagagcgcttgggcttcatatctgtgacaatgaaagattctcagttgaaccagcatatatgaagcacttgcggtatcttgatttatcctctagcgacataaaaacactccctgaagcggtcagtgcactgtacaatttacaaatactaatgctcaatagatgcaggggcctgactcacctgcctgacggcatgaaatttatgatcagccttcgccatgtgtaccttgatggttgttctagtctacaaaggatgccgccgggtctagggcagctcagcagtttacgaacattgacaatgtatatggttggcaatgaatctgattgtagacttcatgaactcaaggacttagaacttgggggcaagctacaaatacataatttgctgaaggtaacaaatccgttacaagcaaaagaagccaaccttgagaataagaaaaatctgcagcaactagcactttgttgggactcacgaaatttcacctgttcacattgtcattctgcagatgaatatttgcaattatgccgtcctgaagaagtgctggatgctcttaagcctcccaacggattaaaagttctaaagctaaggcaatatatgggctccaactttccaatgtggatggaagatggtgtgacactgcaaaatattgttaaactcagtttgagaggctctgtaatgtgtgtcaaactcccaccagtgtggcagcttccctttcttgaagttctccgtctcaaacgaatggagaggttgaaatacttgtgttacaggtaccccactgatgaagaatatggcaaccaattagtggtatttcaaaaattaaaattattgtcactagaatggatggaatccttagagaactggcatgaatatgacactcaacaagtgacatcagttacttttccaaagctggacgccatggaaattatagactgcccaaaactgacagcactgcctaatgttccgattcttaagtctttaagtttgacaggaaacaaagtactgctggggttagtgtcaggtattagtaatctatcatatctgtatctcggtgcaagtcaagggagttcacggagggtaagaacactatactatatctataatggagaacgtgaaggaagcactgatacaaaggatgagcatattttgcccgatcacttgttgtcatggggttcactcactaaactacacctacaaggattcaatacaccagcaccagaaaatgtgaagagtataagtggtcacatgatgtctgtgcaagacttagtcctgtcttcttgtgattgcttcatccaacatgaaggattacagtcaccactatggttctggatatcatttggatgcctacaacaattagaaatctggtactgtgatagcctcaccttttggccagaggaggagttccgaagcttgacttctttagaaaaactcttcattgtagattgcaaaaacttcacgggtgtaccacctgaccgactgtcagcaaggccctctacagatggaggcccatgtaatttggaatacttacagattgatcgctgccccaacttagtggtattccctacaaacttcatctgcctacggatccttgtgataactgacagtaatgtacttgagggcctgcctggaggatttggttgccagggcactctaacaactctcgtaattttgggttgcccaagttttagctccctgcctgccagcattcggtgtctttcaaatctgaaaagcctagaactgacaagtaataacagcttaacctccttgcctgaagggatgcagaatctaactgctctcaaaacactacattttattaaatgtcctggtataaccgctttaccagaaggtctccagcaaagactgcatggcctccaaacgttcaccgttgaagattgccctgctctggcgaggagatgcagacgtgggggagattattgggagaaagtcaaggacattcctgatttacgagtgacaagaactttggcatcattcctctcatgttcagaaattttgcagcatattcagatctggagacctggagttctgaagacttaccatgaatctttcgctggggacctggagctggtgccgtgcaagcccgagttcgtgagggggctacgctatgattcgctgcttctcgcaggccatgaccgacgccgtggtgcgcaacgcccacgtgaatgctacggccggggtctttactatagtggaattttacagttcttgagaaagtaccttgagctagacgtgaagcagcattacggctgcgattccggagaacatgccctcacggaaaaaacatggaaaggcacaggaatgttggctggggctgtttgccatgctcactatctccaagtagacctcattttcatggtaggaaaccttgccattggtgagctgatttggaaggcaacagctccagctagagtaaagttcgtgtggttggctgttaaaggccggtgcttaacggcagacattctgctgaagagagggatggcctcatga

SEQ ID NO: 96698 - DNA, 1095 bp, Oryza sativa
  Clone ID: PAT_MRT4530_94770C.1
atggctgagatcggcaagggcttggtgttctcccccagcgacgaccagctcaccgacggctacctccggagctaccttgtccggaccagcctcgacgacctgccctccgccgccacctcctacttccacgtcgccgacgtgtactccgccccacccgatcagctcgtcgccggcctcgccccggcgcccggcaccggcgacggcgatggccgggtgtggtacgtgttcaccccagtgcgcgttctcggcagccgcggcgcgaggaaggctcgcaccgtcggcggcggctgcggcgagtgctggcacgcggagggaggccccaaggacgtcaagggcagcgccgccggcggcaagctgcagaagttctcgtacaagatcaagacggcgttgggcgccgtcgtcaagcccgggtggctcatggtggagttctcgttccccggctccgaccacctcgcgctctgcaaggtctaccgctcgccccgcacgtcgcgctacggcgcgccctcgccgccgtcctccgccgcgtcgtcaccgtcgagggccgcgccgccgcccgtgtcgtcgacgtccggccgcaagcgcaaggcagaggaggagtccgaccaccccgaggcgccagcgagcagcgcgccgcggcgaactctgccggcgtcggagcaacacgtcgacgtcgacgccgctgcagcatccgagccggatcagggcggctacctgagcactgaccagctggacagcgtcgcggcgttcgtgcaagaacacgaggcgttcgtgcaagaacacgagggggacgaggagttctgcaagagcctcgggttcgacgagcgctcggatccgcaatgctggaccaacttcttcttgtcggcgttggaggagttcgggccggcgccagaaaccgacgccgccgccgtcgccgtcgccgccgttgagcctggcccttgcccggagtacgaggaacacgatgacactgccactactgctgcgtccagccatgcttacgacagtgccacggctgagctggtgaacctctcggacaaggagttctatgacatcatcttctccggtgaccaacaaggcggcgccgctgtggctggatga

SEQ ID NO: 96699 - DNA, 309 bp, Oryza sativa
  Clone ID: PAT_MRT4530_94771C.1
atggtggcatcctgcctttcacggagtgtcaaatacccgttgtcgtacggctttgcatactcgtacgtcctgactcctgtggtccacggcgagcggctcaggccgctcgaggcgcgggacctccacaggctcaggctaaaggcaaatgggcccaaatgggtgcaagtcaacaaccgggccggcctagaaaaccgacaagccagcaaactgtgtaggcgaggccgcgagagcaccaaggccagccggccggaaacaaatcgtggcaggcgaaagcgcaaacagcagcagtgtggtgtgctgaaagcgtaa

SEQ ID NO: 96700 - DNA, 5671 bp, Oryza sativa
  Clone ID: PAT_MRT4530_94772C.1
atgagcgcatccggcttcggccgcgacgccggccccctcaaccggggcccgggcaccgcccccttcgccttcggcgccggcgccgccgccgcctccaccccgcccgcccctgctcccttcccatccgctcgaccggtcgcccctatcgggccccccgccgccaccgccgccgcctctcgcttcccgagccctcgtccccagctcgctgccaccccacgcccacccgccacttcccccgttcccgtaccctcatcctccgcgccgcgcggcccggcctttgctcacggcgccgccaatcccgtgcgcttccctagctctcgcccggccatcgatcctggcgtgcccgccgccactgctcgccacgttggtcggcatctccagccccagccgaggccagctgcatcatcaatacgcagccctgtgcgtcctgttatctcctcaaggagcaggtccacatctcctctatcaaatcagcgtattgattctcctgcagactatgataatggtatgggaaaaagaagggtggtaaactatgcggacccattgtttgaaaatggaagtgcacctatagaggacatgaggacacagccttcagaatttgggaaaacagcacgatcaccaacttcaaacattaccagcaagtttagaccaccatcaggcttccaaaattatcaccctgtgcaggctgccaatcctcttgaatacaaacctaatgtaacacctgcgatgttcggaaaccagaacctccatgatgtacgagcagctccctctcctgctttgaacaacaaccgtttagttcctggaagtggcagactacgtcctgccttagggggtggtgcatctcccacggtgcttggtgatgcaagtcagtatgataattcaacacaatcagttatggctcgacaagagatgagcgaacatatgcgaccgaaaaggtttcttgcttcatttcaaagccgatcattggatcataatatttcgaaaaggtctaggtcacctactttgtcccatcaggatgctgatggtgctgaagctcatcaagatgctggtgtaaatgctagaagactgatagactatacggattccttgtttgatgacggaatggttgaaacttccaagcgaatgaaatcaccttcattagaattcacaagcatggtcaaatctccatcttcagatattagaggcgatactagaccatcacctgcaggtttacgcagcaatagtgcagcccagaatctacgttcaagtgttgatatccaaaaggctagttcatctgttcccaaggttggaaatcaagtgcaatttcgtatcggtgatgtgcgttcaccaccatatcagattgacccttattccaatgaacagaacacagctgctgtttctccaccaaagccttctattcttggtgctagcaaaagaattgggacctctctgctggactttactgatgatgataacatgatcccttcaactgaaagtgagagagaaaaacaagcaaaagcgaagcgcttgactcgtttcagtgttgaattaagcagaccggtcgataatattaatgattttgtaaaagcgcagaagggctctgcagacaagcaaaaacaagcctcttcaatgggaaaagttccaactggatcgaaagatgatatcgatgaaagatctatggctgatgcagattccccagggttagctgcaattattgggctttgtcctgatatgtgcccagaaccggaaagggcggagcgtgaaagaaaaggagatcttgataagtatgagagattagatggagacagaaaccaaactactgagcttctggcttataataggaccgctgagagagatgcagacttgataaggcctctgccagttctgcagaagacaatggattaccttcttagtttactggaccacacatacgatgacaacttcttgggcttatacaacttcttatgggaccggatgcgagcgataagaatggatcttagaatgcaacattttttcaatcaagatgctatttctatgctggaacaaatgataaggctccacattatagcaatgcatgaattatgcgagtacaacaagggagaagggttttcagaaggttttgatgcacatcttaacatcgagcagatgaataaaacatcagtggagctatttcaaatgtatgatgaccacaggagaaagggtgtattgttcccaacagaaaaggagtttcggggttattatgccctgctcaagttagacaagcatcctggttacaaggttgaacctgctgagttatctctagaccttgctaagatgtcccgtgaaatcagaggcagtccagacatcttgtttgcaagggaagttgcaagagcttgccgaatggggaactttattgccttctttcgtcttgcaaggaaagcaacatacttgcaggcttgtttgatgcatgctcactttgcaaagctaagaaggcaagcactggcttccttgcacagtggtcttcagaatacccaaggcatccctatttcccaagctgttgagtggcttgctatggaggacgaagacattgaaagtcttttagaataccatggttttggattgaggcagtatgaagaattgtacttagtgaaagaagggccttttcttaacagcgagactgatttcccatctggctgttctcaacttgtgcacttgaagaaatcacagagaatcatcaatgatgtttcttctggtccagtttgtgctcctactagccaaaaagaggctcttgcatcaaattctggtgggttcgctctaacacgagggcatgttcacccacagccttctcttctggtaaaaagagaatttggtctgtcctttcctggacctgtttctcccacttctgggagacagactacctccctgtattctggttccttttcccccaaagctggcaacaagcaatccagtttgccatcttcaagtcctatgtccccaacttctggcaaaaaggagagtgttcatgtaccttttagtactcctccacatactaccaagcaagctatattaccgcgcacaggatggatagatgaacaaaaggtagcttcaccaaaagcagaaagcaacacaaaggcagctgatgattttatacctgaagatcaggatggtggtcttgtagggttccctcgagggcaacctgatgtaccgtggacacaagctaacattcaacaggacagtgctttggaagaaaccaaattttcacctcctctcgcagatggtgtatccttagattactccaatatgcatggagaggaaaatgaattcaggccagatggttccagcattgacgcagatatggatgaggagagtccatcacacagagaagtcaacttcatacaacctgagtcatttgtgggttcacatttatctgattcagatcacaaggaatatgatgatcacaacattggtgacagagcagcagataacatgttaccagtagttgtatctccaaagaaaattatttccaatgaaaggttgaagataatactgaggaaatggaggcaccgtgctatggacaagagatttattagagagcagaaaaatgctcttgctattgcagcattgagttctctgtcacttggtccacctgttcaccaaactgcagtggtgccggtgcatgcagttcatgatctagacatcagtcatgcatttaaagagagacactcaagacaacaactatcgttgtcacctctaaatgtctcggagttggctggtcccattttaacagaaaggaaccctgatgctagatgcatctgctggaagctgcttgtacttgtcccccctggtaccatggaattcaccagcaattatgcctcaaagtggttactcaaaaagctcatgggctctggaaatgaagatgctggattgcttttttcttcagcagacctatcaatttggacaaagtggaacagttctccagacacatgctgtttatctattgctagggccattgaccagcaagtcattggtaacgacatagccaatggcacaaactgtataatattcctggtatctgaaaccattccgtgggaaatgcagaaggcacggtttagcagtctgttagcatctatacctgctaaatccaatcttcctcttctgattttgagtggcgacacatacaatgaagagtatgattatgcgtcacagagtgtcattgacaggcttggcctcggttgtttgagtgaagaaaagatcgcatcatgcttggttatttttctagttgcagacgacatggaaggttatgccaatgggttctttgatgatgagaagttacgtgggggcctgaagtggctgaccagaaacttgcctccacagcctgatgtcactcttgtgaagacccgtgagttgcttttgaactacttgaacccatcacttgacttgcttaacagccgtgctgcacctgaagtttgtcccgagcattgcatttcagtattcaacaaatctgtcaaccagcttacagaggagatttctgcagcagcatacacagcttctaaccaatggccagctcctgagattaatcttctggagagatcaagcagtgagagaatatttgcagaaatgtttctacctagcattggatggtcactgccatcgagaattcagccactggttgcagccataaagagttgcaagcttccagaattcagttacgacatgtcttggctaaacaaaggctcttatatgggcagtcaaatccaagaccagaagttataccttgaggagtgcttaacaaaatacctgacaaaatcagctcatttgctaaatgaagcccaggcggctaccgaagtgaaggttatggtgcagaaaggtgtcggcctcgagctccgtggctcgcagtaccaccttgtgccaagatgggttactatcttccgccgaattttcaactggagactagccaagctttccacaggagagttttcagaagcttatgtcctgagtcagcatctttatcagacaccggcagctgattcacttccaaatggaggaacccagcatgatctctctgccagcagcaacaccacggatgaggcggcacccattctggaggatcgcggcatggcgccttccgtgtcgtcccgcctctccctagatgagatcatcgagatcagctgcgatctcgatgccgtcagcgccctgccaccggcgaaaccgttgccaccccaaccgcccacccaggttcgctatgaacctcaaccaccgggtggggtgaacggtgtgcttggagctggtgatggcgtgcggatgccgagaaggacggagcttagagatttggtgcccattgagagggatgacaagcttgcgaggctactggagcagtgcagcaagctgcaagacaggatcgacggcacgctctccatatacttctgagtcctgagccttcttttttgtttgaaggccacatatacttcctgaaggtttgaaggggcaactagaactagctgtagctgttacgctcctgccttctttgttgtaagctgctgtaacattagtatcatgctgtgaaaaaccatttttacggccatatgagtgggcccagagtagagtagggtttacatgtaagagattccaaccgtactaaagagatttttttttttatttggcgtaatcccgcaaaaaaaaaaaaaaaaaaaaaaaaaaaaaaaaaaaaaaaaaa

SEQ ID NO: 96701 - DNA, 266 bp, Oryza sativa
  Clone ID: PAT_MRT4530_94773C.1
aaaaatggcagggctgttagcctctcaagtctcaacattggttggtagtggggcagtgaggctcaggagcatcgagcagacatgcgaccgtgatggaagctcacaactgatccctttcaggcttgagtacacgagaacgtgcacaattgggccgggcgtgtttttgttggtgggcctgttcttgaacctgatgggctttgctggctgggctgggctaccacgagttcatgagtggggtgatatacagggcaaaacttggctatcaa

SEQ ID NO: 96702 - DNA, 368 bp, Oryza sativa
  unsure (1)..(368): unsure at all n locations
  Clone ID: PAT_MRT4530_94774C.1
aaggagaaagagagggtttattattattagtcgaaagaatggacagttcataattttaaaacaattgcttgcaatttatttatttagttattttttatacgcaagccgtccctccgatgaaattgttcgcaaaaaaacacnccnggtaacaccagaaaaggaanggagagaatgcaccgaacacaattgctttattatgcttgagcctctgagcctcttctcttgaaatgcgataagcatttgctaaaacaacatttcggagagaacgggagatggaactttttccttgcatgtggcttaccataaagttaggaaggggcttgaatgcaatgtaagcacatacttttttttgtgccttctttacaaat

SEQ ID NO: 96703 - DNA, 453 bp, Oryza sativa
  unsure (1)..(453): unsure at all n locations
  Clone ID: PAT_MRT4530_94775C.1
ggcgcaaccgcctgcgcggctcaggtgctcgcgtggagcatcgcgccgcaaccgccgccaccgcagccgccgccacagcctgaaccgcagccaccggacttggcatgtccaacggtggagctttccatggccacgccgccaccacagcctccgccgcagccgccgccgcagccgccggacttgacatggacagccttggagctttccatgaccatgccgccgccacaaccgccaccacagccgccgccgcagcctgagccgcatccgccggacttgacatggccagccttggaggcttccatgaccatgccaccgccacagccgccgncacagccgccgccgcagcctgagccacagcctgcacacttcgcatggacatcatccttggagctctcgacggccatgggcgccgacccgccgncgncacagncaccaccgcagcccgagccacat

SEQ ID NO: 96704 - DNA, 1808 bp, Oryza sativa
  Clone ID: PAT_MRT4530_94776C.1
ccacgcgtccgcggacgcgtgggcgccggcgggcggaggctcgcggcagatgcgcccggcaggtcaggccgccgccgtagcccgtagatagggtgcgcgcaggacggagctgttcgtggaggccgtggggtatgcgctcttgagatgtctaatctatcagagccctcaaaagaagctgtgtcagctgacgattcaagtgctgtccagaaaactggagcatggagtaacacgttgaacattcttctgcaacaaacttcagtctatggtgtggctgctcaatagtgcagaatgacagaggaggcagcagaaattgctgaagatgcagcaagggctcgaaagtagctcaactcaagaatgcaagcgtcatcttaagcctggtaggaaatttggcgtcgatatcttactctcaacctcaagacggcttccctgtatcatattatgggatgctaaagaagaatcatttggccaaaggatgtttgttcgtcatgctagaatcctgtaatgctgttggcatgaaaaatctcagagaaaacttaatgtcactttaaaattctttgtttagtggtataccgtaattcatttgttagacctgtggtagggtatcaattatcaaagaatcctgaaacatactcgaacagaatactccgtatacaatatgctgtttcattgataatacagggtggttacccttttccatgcagtataaaaaaatttgtctacatcaagcacgttgtcatgaccattggcctgaacacatggggccttgtgctttacaacaatctggaagctttcatgctcttccctcttgagatgcttctaacgggggagcttaatcagatgaagggcgacaatgctaaagtgacaaactggctttcatctgatgtcattcttcctgttgctctgtcgtgcttgttcgggctatctatatccttcttcgggttctcctgcagacgggctatctcggcaactggatttaccgtgctcggtatagtgaacaagctcctgactgttgtgattaatctccttatctgggacaagcatgcctcctttgtgggaacaattgggctcttgatctgcatgtccggtggtgttctctaccagcaatccaccacaaaaccaaaggcccccaaggctgagccaaaagaggagaatgatgaggagcagcagaaattgctggagatgcagcaagggctcgaaagtagctcaactcagaagcaagcgtcatcttaagcctggtaggaaatttggcgtcgatatcttactctcaacctcaagacggcttccctgtatcatattatgggatgctaaagaagaatcatttggccaaaggatgtttgttcgtcatgctagaatcctgtaatgctgttggcatgaaaaatctcagagaaaacttaatgtcactttaaaattctttgtttagtggtataccgtaattcatttgttagacctgtggtagggtatcaattatcaaagaatcctgaaacatactcgaacagaatactccgtatacaatatgctgtttcattgataatacagggtggttacccttttccatgcagtacgcgcccggcaggcaggccgcaggaatagcgtcggcgtgcaggaaacgagggtcacgtaccctgagtctcggactccgtgaggctgtgggctatatatgctcttgagataacagagctggacaatcgaggtatttgtttttgcttttcgttttgtgatgaaggaaaattatcttttgtactcaaattgcctgtatattatgtattctgtattgtgttgaaggcttgaagcaggttttgtcctgagtt

SEQ ID NO: 96705 - DNA, 2884 bp, Oryza sativa
  Clone ID: PAT_MRT4530_94777C.1
gctgtccccccgcaacgcgtccgcaaaagcgcaggtgggagaaggaggaggagatggacggggagcaagaggcgcggtggctggcggcgcagggggtcgccgtaggtgccgacatggtcgcggcggcgctccggcagctggagttcctcgcggcggtggaccgccgccggtggctctacgaggggccgctgctcgagagggccatccacaggtacaaatcatgctggcttcctctcctttccaagcacactcaggctgctgttgtagatgggcctttagttgttcctcttgattgcgaatggatatggcacttggtcaggcttaacccggtacaatacttaaaggactgcaagagattgtatggcagaatactcgacaataggaatgcgccttcttcggagactgcggtggcggcgcgcccgtctgggagagttccacctgatcgacatgccaaagacccgttggctccggtttaggcaggctcctctggctacggaggcatggctgctgagtcaggtgcagatgatgtcgcctacgatggcgtcgcctctgtcggtggttacgcctcgttgctctacgcgatcgcctgaccagctaagccagttgcgccgttgctgtcacggcgcgccgttctggaccagctggtgtagtgtgtcatcaaatcaaattctcagcaaataaaaatgcgtttgaaaaaaaaaacctatgatgtggatgtcatctggcacactcaccaactgcatcctgctacctactgccatgatatgctgaagctcattggacgagttctggagcatgatgacaccgatgacgatcgatcagaaggaaagaagctcgatactggattttcagggactaccaaacagtttgagaatgcctttggtgcaagatactggaaggctggtgctatgtaccgtggcaacttgccgtctcctgtgacatccaatcctcagatgtttattagtgaggtggatggtgaatttagtgttggcaaagctgagtcgcaaattaccattcttgaaacaacagttatagagttattcttgcaaattgtggacatcaagaacttgccacctgcaattccaaaggaaaatgtgtacatatggttcacaaagaatcaaccagacatgttcatcagtgatggtggcaggctggatatctctacaaaaacagggaagtcgattggagccagtatccaatgtgagcctactggtgaactcattctaacagtactggttgatcgggaatcatcatcgaagaaacccaaaaagattgggaagatttctatccctcttcaagagtttacatggtctgattccaagctctcctttgagaggtggtttgaattgaaacctcatgatgggcatgccagttcacctatcgtcagccttcgagttgctgcctcttccactgtcccagtgaaggctcagcaggttcttagcatgatcaggacagaacctttctctcttaagagttttctgtcaccgaattccatcaaggatcaaaagatgagctgctggactcactttgtgtatgattgcaatactgaacttatccgtcttcaaattagggatcagaaggcaaagaacggcatggttgtcgctcgggagttggtcggagtaacaaagtcatcaaagaaaccatttaagctagcagagttcgtggacaacaagtggtcactgagcaactctaacttatgcatcactaatgacatgaaaccaagcaaggatggctctatacttgagctcaaatgtgacaacaaaacgatcaaactctaccagggaaagaggctagaatttcaacggaagtgctgcaacaatcacgcagaggagaatgcttcagctattactgctgtgaagttctctgctgaacatccatatggcaaagcagttgcattgcttgacaccaaatctgagctgataatggtaaatgaggatcgttttctgcttccttggatcgtgatgtcgttcctgttccaagacatcaatgtcgaagacggctcgaagctcatcggtggcgccattgctcagaaaggcgcgatctctgagcccgacactgctgccatggcgatgtcagccgagacggtggctgctcctgctaactgcggcacttgcggcacggcgtgcgacagtaacatggcaggcgacaaggtggtggccgccgcgagatgcaaggccgcgcgatgcaaggctgtcgcggcaagcggcggcggcggcggccaggcagagtcggctgggtgcggctcgggatgcggcggcggctgtggcggcggtgttgccaaggtcgttgaggccaccaaggctggcgtcggcggccatggcaagtccggtggatgtggctcgggctgcggtggtggctgtggcggcggcgggtgcggcgccatggccgtcgagagctccaaggatgatgtccatgcgaagtgtgcaggttgtggctcaggctgcggcggcggctgtggcggcggctgtggcggtggcatggtcatggaagcctccaaggctggccatgtcaagtccggcgggtgcggctcaggctgcggcggcggctgtggtggaggctgcggtggcggcgtggccatggaaagctccaaggctggccatgtcaagtccggcggatgcggctcaggctgcggcggcggctgtggtggcggttgtggcggcggcatggtcatggaaagctccaaggctgtccatgtcaagtccggcggctgcggcggaggctgtggtggcggcgtggccatggaaagctccaccgttggacatgccaagtccggtggctgcggttcaggctgtggcggcggctgcggtggcggcggttgcggcgcgatgctcaacgcgagcacctgagcggcgcaggcggttgcgccggagtcgtattacaattc

SEQ ID NO: 96706 - DNA, 2622 bp, Oryza sativa
  Clone ID: PAT_MRT4530_94778C.1
atggacggggagcaagaggcgcggtggctggcggcgcagggggtcgccgtcggcgccgacctggtcgcggcggcgctccggcagctggagttcctcgcggcggtggaccgccgccggtggctctacgaggggccgctgctcgagagggccatccacagagaagtaatcctcaaaatgtgcatctttcaggtacaatacttaaaggactgcaagagattatatggcagaatactcgacaatagcaatgttgagtcttcgattagagcagaatccaagcatcagtctgagaaggtttgggctgagcaatatcctaaggagccctttgagctggagaacacaagctcttctgacaactcaatttatgcaaatgctggagctgcagaggacatatcttatgatttggtcgcagctgttaaaagacagtcttctttcttctaccaggttgacacaccaactatgcatgatcagcgatttctggaagaagctttagctcggtacaaagggttcttgtacctgatcaagacgaatcaggagaacaaaatgaaactcttccgcgtgccaacctatgatgtggatgtcatgtggcactctcaccaactgcatcctgcaacctactgccatgatatgctgaagctcattggacgagttctggagcatgatgacaccgatgacgatcgatctgaaggaaagaagctcgatactggattttcagggactaccgaacagtttgagaatgcctttggtgcaagatactggaaggctggtgctatgtaccgtggcaacttgccgtctcctgtgacatccaatcctcagatgttcagtggtgaggtgaatggtgaatttagtgttggcaaagctgagtcgcaaattaccattcttgaaacaacagttatagagttattcttgcaaattgtggacatcaagaacttgccacctgcaattccaaaggaaaatgtgtacatatggttcacaaagaatcaaccagatatgttcatcagtgatggtggcaggctggatatctctacaaaaacagggaagtcaattggagccagtatccaatgtgagcctactggtgaactcattctgacagtactggttgatcggacatcatcatcgaagaaacccaaaaagattgggaaggtttctgtctctcttcaagagtttacatggtctgattccaagctctccttcgagaggtggtttgaattgaaacctcatgacgggcatgccagttcaactcctgtcagtgttcgtgttgctgcctcttccactgtcccagtgagagctcagcaggtgctaagcatgatcaggacagaacccttctctcttaagagtattctgtcgccaaattccgtcaaggatcaaaagatgagctgctggactcgctttgtgtacgattgcaacacagaacttatccgtcttcagattagggatcggaaggcaaagaatggcatggttgtcgctcgggagttggtcggagtaacaaagtcatcaaagaaaccatttaagctagcagagttcgtggacaacaaatggtcactgagcagctctaacttatgcatcactaatgacatgaaaccaagcaaggatggctctatactcgagctcaaatgtgacaacaaaatgatcaaactctaccagggaaagaggctagaatttcaacggaagtgctgcaacaatcatgcagaggaggatgcttcagctattactgctgtaaagttctctgctgaatatccatatggcaaagcagttgcattgcttgacaccaaatctgagctgataatggtgaaagaggattggtttctgcttccatggatcgtgttatccttcatgtcccaagacatcaatgtcaaagacggtgagaagctgatcctgatcggtggcgccatggctcagaaggacgcaatctctgaacctgacactgctgccatggcgacgtcagccgagacagtggctgctcctgctaactgcggcacttgcggcacggcgtgcggcagcaacatggcaggcgacaaggtggtcgccgccgcgagatgcaaggccgcgagatgcaaggctgtcgcggcaggcggcggcggtcagacagagtcggctgggtgcggctcgggatgcggcggcggctgtggcggcggttgtggtggtggtgttgccaaggtcgttgaggccaccaaggctggcggcggcggcgtcggcggcggccatggcaagtccggtggatgtggctcgggctgcggtggtggctgtggcggcggcgggtgcggcgccatggtcgtcgagagctccaaggatgatgtccatgcgaagtctgcaggctgtggctctggctgcggcggcggttgcggtggcggctgtggcggcggcatggtcatggaaagctccaaggctggccatgtcaagtccggcggctgcggctcaggctgcggcggcggctgcggtggaggctgcggtggcggcgtggccatggagagctccaccgttggacatgccaagtccggtggctgcggttcaggctgtggcggcggctgcggcggcatggctgccaagtcaggcggctgtggtggcggctgcggtggcggcggctgcggcggtggttgcggcgcgatgctcaacgcgagcacctga

SEQ ID NO: 96707 - DNA, 2670 bp, Oryza sativa
  Clone ID: PAT_MRT4530_94779C.1
ctacttcttcaatggttgggcatcttgagcatcggttccagggataacttttaaagacttggtcagatcagcaacattcttgatagccgattttagccttgccttctgctcttcaacagattttgggagatcggctagctttttatgttctatatccaactcggcgttgcattcttgaagttgtgccaaaagttcaatcttgcgagcttcgagccgatcaatattggatttgatcgggccttcagatagctgatcaagcttggccttctcttcatgaacgagctgccgattgacctggattgtggcctcgatgtctttgcattctcgacgctcagctaatctcagcttagcctttttcagcttgaattgatgctgctcaagatagacagctggagtaaggacatcggctagctcatctgggatcagagcttgaacttcgtgtagcctagtcctaattgatccacagtcaactaccaagctgtctagcgatgatgcctctagccgatgagagatatcttcaagaattttcttcacatcatcggataagggagctatggctttacttgtagtatcctcttctgtctcatcaaggtagtctccaatgttaaaagagaaaagatcggctaagactgggatagcaggggcagctggttgaacctcttcttcaacatgatgactccctacagccgatggagtttgattacttgatggttgttgaacaggagaagagggagcaggaggaggtggtcgagccggtgtgagagtcgttgttgccgatttcttcttcacagcaactctctttttttcatctgtggcttgatcaacatcctcgccgatttcgtcttcatccagagcttgttcaatggatggatctagagcaggcagatcatcggttggtttaggcttctttagtttggccttcttctttggagcgggagctgatgtatccacaaccgatgatctggttcttctctttttgccagcatcggctggttctctaatgaacccttggagaagagttgaagtcctgggggcatgatagtcgatgacagggggagatgatccatctccattaggaatcagacctggagcatattcgatattcttgccactattgctctggtgaggaggagaaaattttgtcgtctgagggataacatttggaaagaggtctgtcatgtacatggaagccgattgatggaatagatgcagtttccactcgccccaccatctgtcaaatgctttgctcctgaaggttgccaactctatattttcaatgctgcctagaggatgtacttggagattgagcagccgatccatcatcaaggttgatgaaatttcccctcggcactggatcttatcagcaaagaataagctgattgggagttggcctattccaagttgtctggctgaactcgtcggatgataaaactcataagaaacctggatatttcttccctgatgaatgccgacaggaaggatgcatgggctgattgtagttgaaaagacttctctggacttttggtatctttcatggttgatgtcttcaaatctgaagtccaatggattttccagaagtgctgaattttcatagaggaaccaaattcgagcttctttgagaaaacaatcataaaagctgcagaaccagtctttgagcagtttggctgatagctttgctcctgcatcggctggtgtggaggcatattctccataagatgtacacctacgatgggtgcgttcttccccatcatcatctacgaccggctccagtctcgggaattcggcttctgttacagatggtcgattgacaaatttcatgactactagattcagccaagactgtaataaccaccatggtccacctactccgactactgagccgacggctatcttagccgatgcattgttaagcatttgatacaagtagccgaggaggattttacctaaaggaaattgtctcttcgtttccaaggcttcggctacaaactgccaattggttgtagggccacaacttgatccacggaagaggaatttttctagccacatcagcagaaaggccacatgctcttgaggggtgacagagccttgacccatatatgctgccacataacctgaccagccgcctatgctcttggtcttgaagtcatattgattcctcgttttcaaattcatagggttagccaatgaagtgacatctagaccggtgatcatggtgatgtctactagagtcagggtcatcggcccttggttgaacaagaaggcattgatagtgttggaccagaaataggaggcggctgccattaagggttcgtctttggccgagttggctatggtgaggtcgagtgcttggccgattccaatttcatcccaatgaactcttttgctagctgacatgcgcttgaaccatgtactccaacttttctcgggtagagatttctcgagagatgaccaagatttaaaggtgttcttccagtgacttagatctgggttggctaatctgaaagggatcatatttgtttcaccgatgatgaactcagtagtatcagggttaccaactgggccgagaaagtagtagttttcgtgcgagaggcttggaattgcaactagattggagaggtgctcagcatacacggctgatggcgcgacagacgggttggcagaggacgacat

SEQ ID NO: 96708 - DNA, 332 bp, Oryza sativa
  Clone ID: PAT_MRT4530_9477C.1
cccacgccgtccgaaaaaaaaaaggggaggggaaaaaaaaaaaaaaaaaaaaaaaaaaaaaaaaaaaaaaaaaaaaaaaaaaaaaaacaaaaagcatccaaatataaaatgatccttttatttgcgaacaccttaaattacaatctatttggccttttttttaacaacatcctatactggattaaaccctggcggttgttgggggaaacacctttcataaaacccttttttcacctggtttaataatcttttttacgtccccccctttccctcttgcaaacatttcctacaaccttattggcaattgggataccccctgaatgcgcacttta

SEQ ID NO: 96709 - DNA, 1556 bp, Oryza sativa
  Clone ID: PAT_MRT4530_94780C.1
ttttcagaaaatgagtgaaatttgctgttataagttttagttagcagtgcattgagtttactaaaaagcttgcaagtttacaacgtacacccggagataggacaagggatacatctgtgttacatccatctgattaatttaactgaccacctagctacatcgttgatcgttctgccatgagctgatcaagcctcgtaccacgttaacgagctcgcaattaacagcttacttggcaggtcccctgggcatggtgcaatgtatgtgagcttcttcctttggatgtcaacatctgtcacgtggatgaatccggcaacattgctggaaactatttcatcaggttccttagcatatgaaacagcaagcacggtgtggaccatatctgtgctgatgttaacagcaacaagtcgagtagggtctgccacaggctctgcaccaatcggtagtgcagacttaggagcttgatgagtgccaatcttgtaaacagatacatcactgaagttaacaacatttgagtgtggtgctagatcattcgcaatgccattaaaagtactccttgatacggaagcttctagtcttttgacggaactttggatttctcggaacaacaccttttgatttatgaagttttacaacatcaatgttgggcttattttttgctgcatcttttagcatcttccatagtttctcattagccttgaaaatctcaattgaattgtgaagtaactctaaaccaaggttttcaacccaccccatagtattgataatcattcctgctgccctagattcagaatttccagagaattgtttatccaatgtctgagctagctccttcataagagctctgtaaacatctggactaacacttgggcttggatggccgtaaaagtatgcaagcggcatctccaagggaatcccatcaactatatctataggcttctcaatgggtgttgccgaaatacatccaggtatggttatcgaaccttggccaatatctaaatccacatatgtaggcttccagccctgcttggcagcccagctaaggagcattttgcacaaagtactttttccagaatcacttggccccacaatgatcactctgggtccctgcgaggactccggcagggcaccctgagccgcggcggccctcgccctcgccctcctcgcgtcaaggatcgcgtgggtgttcacataaaccaccatcggtgtctcgtcggacgtgtactcgctctcgctgaccccgtccagctccaccgtcgcgccgtgccaggtgaaaatggcgatcttggagcggggcgggacggggacccagccctcgggggggagctcggtgccgaagacctccgccgtgccggcgacgaggcggacgcggacgggcgcgtcggggggcacctccacccgcagctcgctctgcggcgccagcttgtactgccgcggcggctgcgcggccccgcccgcggcggccatgcggggagggggtgggttctctaccggcggcggcggcggcggcgccggctaatcggcgaacgaagcgacggccgccgtgaggggagagaaaa

SEQ ID NO: 96710 - DNA, 1986 bp, Oryza sativa
  Clone ID: PAT_MRT4530_94781C.1
atggggaggctttcctgtatcaaacgccttcctcgattcgctctccggcgcggcgtctccgatgctttcctccgtccccttctccgcaccgcattcctcctccgccgccgccgccgtctcagcaccgcggagagcactcatcctccgcggcggggacgcttccgtcgggaccccgattctgatgagagcaaactcgtctccctcgcgcggcagcgtggggcggcggccgctcgcgccatgttcgacggaatgccgcgccgggacgatgccgtcgcgtacgccgcgatggtcggaatccacctctgggaccgggaccttccccacgcggaggcgctctaccgtgcggcgccaccggattgccgggggatccatcttgacactgtcatgctcgatgggtacgtcaaggcaggccaggtcgaccgtgcccgcaggctgttcgacggaatggcggtgaagaacgtggtcgcctggacatgcatggtctctggatattgccgtgcgggccttgtggacgaagcgcgccgcctgtttgatttgatgccatacaggaatgttttttcgtggacgacaatggtgcagggttatgcacacaatgggatgctacgggaagcgagggagatgtttgataagatgccagagaggaacgtggttgcttggacagtgatggttaaagcctatgttgataatggttgtattcaggaggctttggagttgttcaacaggatgcctcagatgaattcatattcttggaatgccatggcaaccggtcttatgagtgctgggaaagtggatgacgcggttcagttgtttgataagatgccacataagaatgtagtctcttggactataatggtcactggcttggcacagaatggttttgtttctagggcaagagagttctttgacagaatgccaaagaaggatattccggcatggaattcaatgatcactgcttataccaatgatggccaagtgaatgatgcacaaaggttgtttgatattatgccttcaaagaacctggtgacttggaatatcatcattgatgggtattccatgaataatctgaaggacgaagctttgaggttgtttcttcttatgctccgctcagcagtatctcctgacagcactacattaattagtgtcttagtagtatctgagagcacaatggaggttagacaaattcatgggttgtccacaaaactggggtaccagcccgaaactaacttaggaaatactctggtttcaatgtattctagaagtggcgatctgtcatctgcatggcttgctttcaggagattgaacgagaaggatgccataacatggacatcgatgatacaagctttagcaaaccatgggtgtgcaccttgcgccttgcagggctttgcccaaatgttaaggtgtggatataagcccagctcaactacctttactgctgtgttgtcagcttgtaaccatgttggattagtggagaaaggccgaaaaatattcaaatcaattagccatgtttatggactagggccaaccattgagcactactcttgccttgtggatctcctaggtcgagcagggtacgtgagggaagccaaggaagtggttgacggtatgcagcgggatatgtgtgatgaggccattctagggacgcttctgggatcttgcatgacacataatgaggtggaggtaggaagagctgtgggtgaggatcttgtcaaaattgacccctctggttcaggaggctatacgcttttggccaatgtttttgcatctggtgggatgtggaatgaggtggcaagtgtgtggaagattatgaagggaagcaaagtcaagaagactcctggttttagccagattgaagtaaacgcaaggaaccatgttttctactcaagggaccagatgcattcacaacgtacagaaatttatgagatgctaaatagtaggcttgtccctcagatgaagggttcatcaagtctaggaactgatttctactga

SEQ ID NO: 96711 - DNA, 449 bp, Oryza sativa
  Clone ID: PAT_MRT4530_94782C.1
tatttctttgtggtaatactgccatttcctggcggtctgtaaagcaaaccctggttgcaacgtcaaccaaccactcagaaataattgctctatatgaggccacacgagaatgtgtgtggcttaggcggatgatcggtcacatccagaagtcatgtggcctaaacattgataacacccccaccattatctatgaggataacgctgcttgtgttgcacaaatacatatgggctatgtgaaaagcaatttcacaaagcatattgttcccaaattcttttatccccacgagctccagaagagcggggaaataaatgtcctgcaaactaagtcatgtgaaaatctcgcagatttatttacgaagtctctgccagcctcaagtttccacagatgtgttcgtggcattggcatgagacgacttagtgaattgcaaggatcagggggagcaaagaat

SEQ ID NO: 96712 - DNA, 2940 bp, Oryza sativa
  unsure (1)..(2940): unsure at all n locations
  Clone ID: PAT_MRT4530_94783C.1
atggcgaccgccaccgcgtcgtccctctctctcctcttcgcccacccacactcgtccaaccccaggcccttcgccggcgggcctcacctccgccgcccgctgcgcgccgcgccccaccgcgcgcgatgcgcctccgacgccgccacgacggccacgaggcaccgccgccccgcggaggagaacatccgggaggaggccgcgcggctccgcggccccgggaacgacttctcggcgtggtacgtgccgttccccccgacgcccgaggacgaccccgacgagcgctactcgctggacgaggtggtctaccgctccagctccggggggctcctcgacgtgtgccacgacatggaggcgctcgcgcgcttcccgggctcctactggcgcgacctcttcgactcccgcgtggggcgcaccgcgtggccctacggctccggggtgtggtccaagaaggagttcgtgctcccggagatcgactccgaccacatcgtctccctcttcgagggcaactccaacctcttctgggcggagcgcctcggccgcgagcacctcggcgggatgaccgacctctgggttaagcactgcggcatctcgcacacgggctccttcaaggacctcggcatgacggtgctcgtcagccaggtgaaccgcctccgccgcgcgccgctctcacgccccatcaacggcgtcggctgcgcgtccacgggcgacacctccgccgcgctttccgcgtactgcgccgccgcaggtatccccgccatcgtgttcctccccgccgaccgcatctctctgcagcagctcatccagccaatcgccaacggcgccaccgtgctctcgctggacacggactttgacgggtgcatgcggctcatcagggaggtgaccgccgagctaccgatttaccttgccaactcgctgaactcccttcggcttgagggccagaagacggcagccatcgagatattgcagcagttcgattggcaggtgccggattgggtcattgttccaggaggcaatcttgggaatatctatgccttctacaaggggtttgagatgtgccgtgttcttgggcttgttgatcgtgtgccgcgtcttgtatgcgcacaagctgcaaacgcaaatccgttgtatcggttctacaagtcagggtggactgatttccagccacgtgtagccgaaactacatttgcatctgccatacagattggtgatccagtatctgtcgaccgtgcagtggtcgccctgaaggcaactgacggtattgttgaggaagctacggaggaagaactcatggatgcaatgtcacttgctgaccgcaccggaatgtttgcctgcccacacaccggggttgcacttgctgctttgttcaagcttcgagaccagcgcataatcgggcctaatgaccgcacagtggttgttagtacagcgcatgggcttaagttcacacaatcgaagatagactaccatgacaggaacatcaaggacatgctgtgcaagtacgctaatccaccggtcaatgtgaaggctgactttgcttctgtgatggatgttctccagaacaagctgaaggttgatgaacttggtgtgtcacagccgggcgaggctaggcggcgcgcggtagtcgggagaggagggcggtgcgaagcggccgggcagggcggcgcgcgacggccgggagaggtgggcgggcgcgcgacggccaggagaggcgggtggcgcgcggcggccgggcgaggtggggaggcacccatgaccccgctccgccgcagcacgtcacgcagatgcgcgccacgccacacgaaggttgagatggcgctggcagttgaagccgacggtctggcgcaccatgttctgctccttgtgttggttgcccgcgcaaaccaacgtgacggggaactccacggtcaagctgttccatgtctgcccctcgcctcctccgccatggccacccccaccgccgcggccccccctcccctcttcgcccacccacacgcctccaaccccacccggccgccgcggccctccttgcccgcccgccgcccgtccccgccgcgcgggcgccgccaccctgccacgaacgcccgcgcccgccgcccctccggcgagccatgcacgaacgggccgcggcgttcccccccccgaggtacgccttccgccgcgtgcgcggggaacccccgcacgcccgagaacgtgccgcacgggcgcttcggctcacggtgggcgtctgccccatcgtccacctcggcgttacccgccgtgccgccacgccgagggtcacgctcgacggtttctcgtgcccctcgcgggtcgacctcttctactaccacgcgggggtgcccagggcggcctcggcgacaggggttgtgtataagaccgggttcgtacaccccgctgtgcgctcggaccgcatcggctcaccatgcgagcccacatccagaatcgcgtccaccggcgcggagccaacttttattcaaccgacggcgagataatagggtggtccggcaacagagggtgggagttggggactccgttgttttggcacccagagacgggcacagtagccatcgagcggcagcaagttgagggagatgggtggcagtggcttgtgagcttgtctaacgctggggatccaacttccaaggagggcaaatgagctctgaaaagtgtgtttggctaactnncccctcccaatcaatnntgctggtatgtcagttnngttcttctgcatnncaaattcgaaaatgcggcgggtgnnnactgtggaagcgattgattncgtcgantttgtagtagtattgtaggtccctgaacncttgaagatcgtccatgcttgagagtaaagattgagaggctatctcttgtacctgttctgtgttgtgtgtgggtgggtaataagcgactaccttgttgtttgaaactctgaataatcagatcatctagtcc

SEQ ID NO: 96713 - DNA, 198 bp, Oryza sativa
  Clone ID: PAT_MRT4530_94784C.1
atggccgactccggcgactcgtcgccgcactctaccgcagccatcgacgacgagcaccaccagctctcgtacgccaacggcgagacaaagatcctttcgctcaagaggccactccgcttcgccaatttcaccacgcggttggtcggccggcggctgccgctcgcttgtagaagagaagttaactgtagtgaattgtga

SEQ ID NO: 96714 - DNA, 1688 bp, Oryza sativa
  Clone ID: PAT_MRT4530_94785C.1
ggcggaggccacggccgaggttggcgccatccccaacgccaagctcggccagccgtccgccgccgcattggccgagcaggccctgctcggttcagacgccagcctcgccgtccacgcgggtaatcacgatcaatcccctctcagatctatcgccttccccccgctgcttcggtttttttctgatccatttcgtgcttttgatatacctatcgaaggcgagaggctgggcagaaggatcgccacagacgcgatcaccacgccagtagtgaacacctcggcctactggttcaacaactcgcaggagctcattgacttcaaggaggggaggcatgctagcttcgagtatgggaggtatggtaacccgaccactgaggcattggagaagaagatgagtgcactggagaaagccgagtccactgtctttgtggcatccgggatgtatgcaagtgtggctatgctcagcgcgcttgttccagcaggtgggcacgttgtgaccaccactgattgttaccgcaagacgagaatttacatggagactgaactacctaagaggggaattacgatgaccgttattagacctgctgacatggatgctctccaaaatgcactggataataataatgtatccctattcttcaccgagactcctactaatccatttctgagatgcatcgacattgatcttgtctcaaaaatgtgccatagcaagggagcattgctttgtattgatagtacctttgcatccccaatcaatcagaaggcactaactctaggtgctgacttagttatccattcagcaacaaagtacattgctgggcacaatgatgttattggaggctgcatcagtggcagagatgagctagtttccaaagtccgcatctatcaccatgtagttggtggtgttctaaatccgaatgctgcctacttgattcttcgaggcatgaagacactgcatctccgtgtacaatgtcagaataatactgcaatgcggatggcccaatttttagaggaacatccaaagattgcacgtgtctactatcctggtctgccaagtcacccagaacatcacattgccaagagtcagatgaccggctttggtggtgtcattagttttgaggttgctggagactttgatgctactaggagatttattgattctgttaagataccctatcatgccccatcatttgggggctgtgagagcattattgatcagcctgccatcatgtcttactgggattcaaaggagcagagagaaatctatggaatcaaggacaacttgatcaggttcagcattggagtggaggattttgaggatttgaagaatgacgttgttcaggcgcttgacaagatctaagcacctgattgcatcctcatcatgagagttcatctatctgatcttgtttgcctctgcatcacgtggagaactttgatattccagctgagaattgcgaataagtttcttcattagttcccattatctagtctttagttccaattaagtttgtgtctctgttttttcctctcaaaatggctatgttcagaattatttttgaaatgctgaaaatccaccgttgtgttgtgtaaaaaaaaaaaaaaaaaatcctgttggtagtcggaacagaaaagttgctttgcaaaccgttgggatgcattatacccgtagtttttttaaaaaaaaaaaaaaa

SEQ ID NO: 96715 - DNA, 198 bp, Oryza sativa
  Clone ID: PAT_MRT4530_94786C.1
atgacgatcaaccggagccacgtcgtgtcgttcctcgccggcgccgctctgccggcgttgctgctcttcttcctcgcctccgacaggggatctagcgatgtctctgatctcgccgggcacggattcgagaaggaagactaccctgttgtcgaccacgagtcagaccttcagaccgccatgccgacaacagttagatag

SEQ ID NO: 96716 - DNA, 495 bp, Oryza sativa
  Clone ID: PAT_MRT4530_94787C.1
ttcaacgtcctagaccttttgtttggttgtggaagacaaaatgtgtaatgaaaatcaaagtctttgcctggttaccattcactgacagattaaatactagagataagctagacagaagacactgtgcaaaagaggatgatgatttatcttgcgttctatgtaatggaggccacagagaaaccaggttacaccttttcttcacttgccctttcagcattgaatgttggcagcatttcttgggatttcgtgggatgctacactggagtttttctaaatgatagtgcttgcaagggttaactttggtaggaagggtttcttggaaatctgcttcattgctctgtggcatatctggaaaaaaggaatgggctgatttttcaaaatgttccaccatcttttcagtcctggagaagcctattcaagaatgagattcttctgcatatgtgcaaaatgaaggaccctatgaaacaaatagtttttgattggttacaaactgta

SEQ ID NO: 96717 - DNA, 318 bp, Oryza sativa
  unsure (1)..(318): unsure at all n locations
  Clone ID: PAT_MRT4530_94788C.1
gaacgaaggaattgttttaaagaattttaagatggtaaatacacacaagagaggggtacggtatacaaaacttagttttttttaagtacaacaaatattcaattcctcaatgatcctataaggttttaaacccaaaccacacaaattactatgcacgggcctttttccttcactgacaaataaactggggcttgagnngcaaagaatctatgtggggatcagaagccaatgtcagcgttgtcaacaacgaggttgccggtaatgagctaacggtaggggggaacggaccaaatgaacctttttgggaggagtttgacg

SEQ ID NO: 96718 - DNA, 384 bp, Oryza sativa
  unsure (1)..(384): unsure at all n locations
  Clone ID: PAT_MRT4530_94789C.1
cagctaaggatttggaggatctggagatggtgatggtgaagcttaacgnggcggtggccgcgcgccgttgtgctgtctctgttggtggtggtcgccgtgcatccggcggcggccgacgccggcggcgattggtacggcaagaagagcatcgaggagacggtgaggaaggaggtggagaaggccatcaagcacaatcccggcgtgggtgccgcccttgtccgtttggtgttccatgactgctgggtcaacggttgtgatggatcggtgctcttggacaagacgccgtacagcagcagcacggagaaggcggcggcgaacaacatcggccttgacggcttcgacgtcatcgacgccatcaaatccaagctgggcgccgacgtcttc

SEQ ID NO: 96719 - DNA, 1334 bp, Oryza sativa
  Clone ID: PAT_MRT4530_9478C.1
cgccgtcgcttcggccaccggcggcgactgtggccccgtccgtgccggatccctccccgtcgggccacgtgacgatccgcccctccgagctgtcccgcagggaggcccaggtgctccgcgcgcggctcaccggcgagctcagccgggtccgcgccctcctctccgacatcgacgggtgggaggcgcggcggcggcggccggcggagcctccgcggcagcgggggcacgtgtcgccgcccccggccctccaggcggcgatgcggaagcggtgcacgcagatcctgacgcggctgcggaagcagaagatcagcgtgtggttcaactcgccggtggacgtcgagcggctgaagctgcacgactaccacgccatcatcaggaaccccatggatctcggcaccgtcaaggagaacctcgccttcgggaggtacccctcgcatgaggcattcgccaccgatgtccgcctcaccttcagcaacgcgctgcggtacaatccggccgaccaccatgtccaccgattcacacggggatgatgcccaagtctcccgattaggtggtgcttctccctctaacaattaggattttagtggttttattaggtgactgaggtccattttggcaacgtatttttagtagcgtggtataggaaattggatgggttctctgttcaagttgttgtgagctatgttcgtgtgtccgcctgcattcaccttaggttgttggtagtaatggatagctagtttatgtgggtagtttggcaaacgaagaccattgtaaagaagggaatataatcgaaggaaaagagaaaggtagcaatgtgttagcatttaaaaaaaacgctaatgggagaggtcgttgagcttgatttcgacgaaatggatgtcgagacgctgtgggagctcgatcgatttgtggtcaattgcaagaaggcgctcagcaagagccggaggactgtcgcgatgaacggtgatgctgttgatgcgactgctattgttccaactgaggacgataccgtgcaggagaatgacacgccggagaagagggtttcagaggttgatatggttgatgagtatgttgatattggcgatgagatgccgacggcaaattaccagtcggtggagattgagagggatgcccaggtgactgaggtccattttggcaacgtatttttagtagcgtggtataggaaattggatgggttcttgttcaagttgttggtaatccattcaaattgctatgggacatacaccttttgggttgaaggtgttttcccctatgctgactccattgtcattgcaaccaaaccaaacatccttatattctgtcttgactcttga

SEQ ID NO: 96720 - DNA, 372 bp, Oryza sativa
  Clone ID: PAT_MRT4530_94790C.1
cgctgaggcgaaccaggcaaccaagcggctgctgcaatgctctactgcgaggggaggaagtttggttctggcagcgggttatatacgggtacgcccagcctcctaggcgtgggatttaaaggaaggcaagataggggaagaacggcaacggaccccggaatgcggcgtctgttcataatccatgttttcaagctccgccgtgcgagaagacatctttgcagtaacctccctatggtggaaagcgcccaccacaaccaaaccagccattgatggggatggagggggacgcggacggacggacggacggaggaggctggcgccatctcggcgaccacaggctccgaggatgggacgagctcctgcggctgcggc

SEQ ID NO: 96721 - DNA, 324 bp, Oryza sativa
  unsure (1)..(324): unsure at all n locations
  Clone ID: PAT_MRT4530_94791C.1
aagtcctcctcgagctggccaaatttggcagcnanaaatagcctagccaattgtgggcctcactccgacaggcacccctcacccctttctctctccgctaccggcgtcgtcgaganantncgccatacaccgctgctgccgaggtcgtcattgccgggcgccgcgtcgtcggtccgtcaccaccgtcgtcggcgccgttgccagctaccgtcgtcggctccgtcgctagccaccgtcgccaccgtcgtcggctccgtcgccagatccgctatagctgccgaggtcgccgtccgctaccgtcgtattcgaggtcgtngttgaccg

SEQ ID NO: 96722 - DNA, 325 bp, Oryza sativa
  Clone ID: PAT_MRT4530_94792C.1
ccggggccatcccagccgtccggacactgcagttagcaggatcatataggtttacgagttccctagagtgtgagagcgtacatctttggggagtggttcccttagcaagcgaagatgctatcagccttatgtcggggctttgctcatgggacccacgaagaaggccaacagcagtggaggttttgcagcatcccttctttcagcgatgctgctatgttcctccttcactttgcttcaaatccagcggatatgcatcaacgccaccatcatcgggtggctaaacgagctgtggatcaaaccaacattaggagatacttcatgggga

SEQ ID NO: 96723 - DNA, 507 bp, Oryza sativa
  Clone ID: PAT_MRT4530_94793C.1
tttctattggttatgacttactgactcacactgccaaacccttaattgtggggctgactgctattttctatatcatgtgggggccttattaaaaaatatacaagctgtcaaccaacaactaaagcaaaaccacaaaaaaaataattctgaacaattgaatcgttaaatgagcaaattttcagaggttctcaaaaaaaaaaactcagatgtagacacttgggttacccaaaaccataaaatatatggactaagttacaaagatcttaagaagagtaatcaattgagtccaacaaacagcattgatcaagcatttttcattttaccaaacgaaataacaaatgcagagggatccatcacaaatcttattaaacacgtggtcacaattagcatagaagaacttgcaataatcaaatcatttaaatgcatccccaaattatcactaatcacccccttaaaagtcactaatttacaatttacaaatcgtccattttcacatcaccattacca

SEQ ID NO: 96724 - DNA, 498 bp, Oryza sativa
  unsure (1)..(498): unsure at all n locations
  Clone ID: PAT_MRT4530_94794C.1
aaatatgcctacagtaacctaatttagcttatggaaacatcaaattccccacaatacagaatacagcattacagatgtttattagaacaagatgtcgttcagcttccatcgttttccactacatttaactcagaaatcctcccagtgaactagcttccatcagtttactctgccattcagctgctccccaacgaacgtgtatttcagaccttgcaggatgcaatgaactcattaacaatgttcccactgctgtagtgctacccttgaatgttccactatatgcccaacttattattcagaaactggagaattgcagttgcatggtgcctccattttttttttcttagaccatggattaaccggtggatgttaactcttaaggggcgctacaatatttgcgaatccgcacaccaattttgcaatggaataaggggattaanacacagtttaaagcgcttttggggtctgcgataggtaggcttaccgggccttgaagaa

SEQ ID NO: 96725 - DNA, 626 bp, Oryza sativa
  Clone ID: PAT_MRT4530_94795C.1
ctggtacgcctggcagtacccggttcccggaattcccgggtcgacccacggcgtgccggctactccccgtgtccaagttgcaagtgcctgccggcaaaaggatcatccacagcaggatagtggggcttcacctatagttcacccgtgagggagtacgtgcaagttgaaggctggagggcagaaattatgtgctggatgggtggtgcacaatggctcacgctggctttgggtttcctgcaatggtgctttcttggcgaagctgtgccccctggggaaggcgttttgctggcctggaggaccattgcaaagcttgcgcgctaggatgcgctctgtggctggaaatgggaactttgagagattttgccttttgagctagtgctaatgttgtggcatggctgagaactgcatggtgtgttaagaattgggccccctgcagggatggatgctgatgtgtgtgtgctgtgaatgaggtgtgccttgctggtagggccagcttggatatgggaggtgttgggcatgatgcatgcagtgacctgtggtgttggaatgtgtgttggctgacatgatgcgttgatgcccaaggctgatgatgctgcaggttgggattggtggaagctgttgactcc

SEQ ID NO: 96726 - DNA, 331 bp, Oryza sativa
  Clone ID: PAT_MRT4530_94796C.1
taatatattactcccaccgggtagggatgaaaacagagcggatagtttccatccgctccggattaaaacagatacgcatacctttcggatcggatagctcggataggatacgaatacggatattttctcccggatacggatacggatatggtatcggggtttccgtcggatacggataataatttggatatccaaaaaatttgtttccgtattcgtgtccgaacatattcgattcttattcatattcgagataatccatatttgtttccgtatttgagctatccgtattcattttcgtggtatgtgtatcataaaactataaatttagcgt

SEQ ID NO: 96727 - DNA, 345 bp, Oryza sativa
  Clone ID: PAT_MRT4530_94797C.1
atggctagaaaactagccgttgaagtgctgtcagagggccccatcggcctggccggtcagaccggagttgagtgggcagtcagaccggcctcggctcggtcagaccgactacggctccgtcggctctgtttcggccatcccgagcagcatcatctcggcctccagggggccggtctgatcgggcaagtgccgccggtcagaccggccttatgcgccggtcagaccgcccgcttggggtcggtcagtccggccagggcaggccggtcagaccggccaagtggcccaagtggccggtctgaccgccccctggtcaggccgaacccatacggcgaaactagaaaataa

SEQ ID NO: 96728 - DNA, 271 bp, Oryza sativa
  Clone ID: PAT_MRT4530_94798C.1
gtaaaatgtgaacacgagtagaatcatctgggtgctgattggttacacaaaacaaacaggactgatagtgcccaccaccacttgctctactgcatggcctcttgtacaacaccactcaccggatgtattcaacttaggttcatccgctaaacacctacaaagtctgtcatgctcaatgtaccaccagccacctgcgtatggtaatgagtcgaacaaataaactacggaatgtgcataatgtaattgaattctaacttactacaatcaacaa

SEQ ID NO: 96729 - DNA, 1112 bp, Oryza sativa
  unsure (1)..(1112): unsure at all n locations
  Clone ID: PAT_MRT4530_94799C.1
aagaaacgactttcttttgatctgttcctccctctggttgacactcgacgcggagacggtggagtacccgccaaaacggcacccgtcagctgctcgcctcggcgacgcgacctggccgctcctcctgcgtgccagcgagcgaaagctttcgtgccggccaagcagcccgaacgcgcgcgttgcgtcagcgcttaccacccggatggtgagaggcgccgaaaagttgctcgccgaagcgtacttttggcacgaaggaaatccaccgtaggaagggttctcttctctcctctccggttgccgccacacgtgggccgtgagcccgtggctcgcccgcgcgcatgaccgcatgacgacgcgtggcccatctcggcgcgacgccccccacacccgcacgccacggtggcggattgtctcggtcggctgcctggtgtagcgctgccatgcagccagtcgacttagccaagccagcccagccgcccccacccagcgcaacgagcaggcaggccacgcacacgcactctctctcctcctcctcctcctctcctcttcttcacctctcctcccctcgcgcggcgcggaagccaaggggaagcaaaggaggcttcgagatttccgcggaacccccacgccaccaccatcctcctcctcctcctcctcttccccccatcctccgcctccacctattacccacatcctaggcgtccgccctcctcctccgcctcacctcccagtaccccatcctcccaccgccgcagccgcattcgaaggtgtgtatccatcgatccccgcctacccgccaacgactccccttcccgtctcgaggtgcctctggtccggggatcgatccttggttcctcgccgccgccgccgcttggtttcggtggggggtggagctttgtgttgctcggtgatctggaggcgtgattcgccgcgccggggccgtggattggttttgttgattggggggagttggggggtttcgatttgggagggagaattgaggtggtggtggnggngtntngnggggnnntggttttntntgntnttggnttggnttgggntnnntggtngngattggtnggtgnngtttttggtntttggggnnttttttt

SEQ ID NO: 96730 - DNA, 493 bp, Oryza sativa
  Clone ID: PAT_MRT4530_9479C.1
caagaggtagcttatctaaagtggatctggaagagtagctgtactatgaaagtaaaagtttttggctagcttctgctcattgatagattgaatactcgtgatatgcttgacagaaaattttgtaccccggaaggaagtgatttaacatgtgttttatgctcgacaggggaaagagagactcttcatcatcttttcttttcctgttcattcagtactgaatgttgggctcaatttggcattgtttggaatctctccctgtcttttgaaaatatgttgacacatgctaagaattcctatcaatcctcacacttcctggagaaggttctttatgtagcatggaatatttggaagcaacgcaatagtttcatttttttataatgttcaaccctctgtagcttcctggatgacattcttcaagaatgatctatcccttcttgtttatcatttaagattagatgagatatcagctttctgttcctggataaatcacttg

SEQ ID NO: 96731 - DNA, 306 bp, Oryza sativa
  Clone ID: PAT_MRT4530_947C.1
atgaagagcagcacgctcatggtgatcctggttctccaggccgtcctggtcatggggatttttgcagctgtggctaaggagaatgctgtgggagagagcaagggcaacactgagaccaacggtggcaagctcaagtgctgcagcaactgcaacttctccttctcggggctctacacctgcgaggacgtcgtcaagaagtgcgaccccgtctgcaagagctgcgccgtcgtcaagactcaccctgtgaagaagttcaagtgcaccgacaccttcctcggcatgtgcggccctccctgcaagcactga

SEQ ID NO: 96732 - DNA, 406 bp, Oryza sativa
  Clone ID: PAT_MRT4530_94800C.1
acctccaaggtccactctaggttcttttggtctaacaagaaaagggaaaattgggggcagcaggcaacctatttccaaaatggggacagatttttatttagagaaaaggggagggtttcccctttacaaactttttttgtatgttatgtttgaccactcccgtcagtaagggctcaactcaagcaacatatttggattatctttcatcggttttttttcttccttcagggcccacaccgaatctgcgctgtagggggggaccaggatccaaccccacttattcagggtgaaaatgccttagggggtaaccacagttttacctttttggcccccccagcagtcgctaaaacaaaagggggggttcccccctttggaattgttcggggggccccggcaatgcccgtta

SEQ ID NO: 96733 - DNA, 331 bp, Oryza sativa
  Clone ID: PAT_MRT4530_94801C.1
tttgtgttttttttttttttacctttttttttttttttttgcaagacagccgctttttttcctcttttctttttctcaaacggcatcaaatttatatcccaactcaggggcgccaaggggcctaatcagctggtagggggcctgccatttttcgaaagatggggggcctaatcaattggccttgggatcggcggcggaggccgagacccggccgttattgccggaaagctccaaggacttgccctttctggggagcgtggagcattggaaccctagctccttggggaaacaccctttgtacgaggtttgccaccttcaccgggcttctccc

SEQ ID NO: 96734 - DNA, 2010 bp, Oryza sativa
  Clone ID: PAT_MRT4530_94802C.1
aaagcatgtagttatgatttatatctcgtcccataactaaaaagaacgttcaaacgacaattttcttcatccactaataatactagcccagagggagcaactgaatagagcattaatgatcctggttacagtagacataccatagaggcttcattaaagatcctggctacttcatcaggtaatatttgcgcattagaagagatcactcgcgcacatagatgtcaaagcataaataaagagtctaaattctaacaatactccaagtcatagctctaatcatattattattacatcagcctgcagtgtaatacggaatcttggaactatcatgccctgcaataaattctgtcccgtatggatgcttgatacgatcgctacatgcgtgacaacgctcgtagtcctgattcctgatcattacataatcaattctcctgttgatctcatggcatccaccaaaacaagaaccctgaagattgtgtatagagacgacacacatgggctcgatatcatcagcacatccaacaatatttggatcaaggctcaactctacaaagcgttccctcctctttgccagaagatccggattcaacttgagctctgcaaagtatagtctcttcttagcctgatcatcatcctcagccctggcagtaaagttgacatgggcgtatgtggacccacagatctcatgaaaacaatttgataaaagaacagtacaaagctcaatcttaacaatgttctcctcaatattgttgtagtggttaattgctaaattggcaaagtgacaagcttgggaagaaactttcttgccagcgaactctgcctccatctcttctgcggtcaaatgttgctcgtgtgtatcggatgggacgcggggtcggaagatttgtttgatcttgttattctcgatgtcgatcatcctctgatagaacctggccatctgcgccttggacttgcggaaagcgggcttatcctcctctctgaagcagtgaacctcatcgctcatgtccaagctgtccgcgagaagctcctcccatgtcatgggcctctttctcaggcaaggatgaggtagcgtgcgagggatcctcctccatctcccaggcgtcctcttcctcctcgccggggcttcgcctgaccccgccgccgcaactgagctcgacccagctccatgtcccgctcccgccgtcgccgagatggagccagcccccgcccccgccactgagctcgagaaaggcccatctcccgctcgcgccgccgagatcgagccagtccccgccaccgccactgagctcgagcaagccccatctcccgctcctgccgccgccgagatcgagccagcaccccgcaccgccagagagatcgagccaactccagccatcacagagtccagccactcccgcgcggtgatcgggacggtggatccctgacgaacctggaacatggagtaggtcgccagtttctcttctatggtgggcctcctcatctccgcccgcgcctcgtcgctgccgccgaatcctcctcccccgtgcgcggattccggcgacctcgtccccagcgcgcggacggccggcggcgagctcctcccccgtgcgcggacgccggcgacctcgtcccccgcgcgcggacggccggcgacctcctcccccgcgcgtggacggctggcgacctcctccccggcgcgcggacgccggcgacctcctccccggcgcgcggacgccggcgacctcctcgcccgcgcacggacggccggcgacctcctccctctgtgcgcggacggccggagacctcctcccgcgcggacgccggcgacctcctccccagcgcgcggacggccggcgacctcctccctctgtgcgcggatgggcggcgagctcgcgggatggctagcgggctcctccccctcgcgtggacggccggcgagctcctcccccgtgcgccgtcactgtcaccgtcgccgccgccccgtctctagtgatggaggaaggtgaggggagtagaaaagatgaaagaaag

SEQ ID NO: 96735 - DNA, 598 bp, Oryza sativa
  Clone ID: PAT_MRT4530_94803C.1
ttacggacctttcggtcaagtagaaggatctcctttccaggttccaatgcgtaacaatgccagcattattggcttcttcggtcgaggagatctgtatgtcaatgcaatcggcgtctatatcaaccctgaacaagaaaagatcgaacaagaggctgggatcaccaagattgggccgtggggtggaaatggagggaatgctcaggacatcgacatcactatgcaaccccaacgtctggagagtataacaattagttgtggtgctgtcgtcgactcacttgcattcacatatgctgacaagaatgggcacaagcacgctgcaggtccgtggggcgggaatggaggcagaattcataagattgagcttggcccttccgaattcgtgacgaaagtatatggtacaattggtccatttggtaaattctccagtgttatcacgtcaatccactttaccaccaatgctgatagatatggaccttttggacaaggaaccggaactcgtttcgaggctccaatgcacagcgatggcagcatagttggcttctttggacgcacctcgtcgtatgttgacgcaattggtttctatgttgttcctgtttga

SEQ ID NO: 96736 - DNA, 1799 bp, Oryza sativa
  Clone ID: PAT_MRT4530_94804C.1
tcagcctgcagtgtaatacggaatcttggaactatcatgccctgcaataaattctgtcccgtatggatgcttgatacgatcgctacatgcgtgacaacgctcgtagtcctgattcctgatcattacataatcaattctcctgttgatctcatggcatccaccaaaacaagaaccctgaagattgtgtatagagacgacacacatgggctcgatatcatcagcacatccaacaatatttggatcaaggctcaactctacaaagcgttccctcctctttgccagaagatccggattcaacttgagctctgcaaagtatagtctcttcttagcctgatcatcatcctcagccctggcagtaaagttgacatgggcgtatgtggacccacagatctcatgaaaacaatttgataaaagaacagtacaaagctcaatcttaacaatgttctcctcaatattgttgtagtggttaattgctaaattggcaaagtgacaagcttgggaagaaactttcttgccagcgaactctgcctccatctcttctgcggtcaaatgttgctcgtgtgtatcggatgggacgcggggtcggaagatttgtttgatcttgttattctcgatgtcgatcatcctctgatagaacctggccatctgcgccttggacttgcggaaagcgggcttatcctcctctctgaagcagtgaacctcatcgctcatgtccaagctgtccgcgagaagctcctcccatgtcatgggcctctttctcaggcaaggatgaggtagcgtgcgagggatcctcctccatctcccaggcgtcctcttcctcctcgccggggcttcgcctgaccccgccgccgcaactgagctcgacccagctccatgtcccgctcccgccgtcgccgagatggagccagcccccgcccccgccactgagctcgagaaaggcccatctcccgctcgcgccgccgagatcgagccagtccccgccaccgccactgagctcgagcaagccccatctgccgctcccgccgccgagatcaagccagtccccgccaccgccactgagcttgaggaaggcccatctgccgctcccgccgccgagatcgagccagtccccgccaccgccactgagctcgagcaagccccatctcccgctcctgccgccgccgagatcgagccagcaccccgcaccgccagagagatcgagccaactccagccatcacagagtccagccactcccgcgcggtgatcgggacggtggatccctgacgaacctggaacatggagtaggtcgccagtttctcttctatggtgggcctcctcatctccgcccgcgcctcccccagcgcgcggacggccggcggcgagcttctaccccgtgcgcggacgccggcgacctcgtcccccgcgcgcggacagacggcgacctcctcccccgcgcgtggacggctggggaccttctccccggcgcgcggacgccggcgaccttcttcccggcgcgcggacgccggcgacctcctcgcccgcgcacggacggccggcgacctcctccctctgtgcgcggacggccggagaccttctcccgcgcggacgccggcgacctccttcccagcgcgcggacggccggcgacctcctccctctgtgcgcggatgggcggcgagctcgcgggatggctagcgggctcctccccctcgcgtggacggccggcgagctcctcccccgtgcgccgtcactgtcaccgtcgccgccgccccgtctctagtgatggaggaaggtgaggggagtagaaaagatgaaagaaag

SEQ ID NO: 96737 - DNA, 189 bp, Oryza sativa
  Clone ID: PAT_MRT4530_94805C.1
tttcgacgcgtgggacgtcaatcttcatggggagcttctgaagcatatgcaggatcaatggtcttagtaacaacaccagttcctgggtctcctgacatcaagtccatcgacagtccatcccggcggcagttggcgtgtcattcgccgacggtcgcggcgccatacgagcctgcccagattctgggccgc

SEQ ID NO: 96738 - DNA, 557 bp, Oryza sativa
  Clone ID: PAT_MRT4530_94806C.1
cccacaagaatcttatcgcctgcccgtctctcgcagtctcgcatttctcgtcgtttttctctcacgtttctctcccgttcatgcccaggcacgcatgtctgctgcagtctgaccgaatttttttcatagccactgaagagtgcagacggaggcgacgccaaggaggtgccgacgccggcgctggaggcagaggcggagggcgccggtgctgggcggaggcggcggaggcggcgcacatggcggcggcggcggcgcatagggcggcggcggtgcacagggcggcctgcggtagctccaccgtcgccgtcgggctgcgggagctccaccggcgtcgtctctgcagcacctgcacgggggatggggatggggataggatgcttatgcagagaaatgacagtagcaatagcaaatggatgttgtcacggagggcattttcgccttttcacgtgagtgctaaatttgcatgggaggtacaggaatcgcttctggatggagggagtacctggttctgtttaggatctagtgcgtactttgtcgcagtcaaatacgattggtga

SEQ ID NO: 96739 - DNA, 318 bp, Oryza sativa
  Clone ID: PAT_MRT4530_94807C.1
aaataggtgattctatttagatttatatgacatcaagctttaactgtcacgcatgatgatgcatgactctatttttaacagttgaaccattatactattacaattcagtaccagacaccaccaacagtgggaatgctcgttggagcaatgtaagagttaggatagataccacatatggatggcaagtttaaggacagcaaagcttgagcttgagcttgagtctgatcaaagtagacaacaccgacctgctagagatgtgaagcggaccggacagcccgggccaaggtccaactacaagctttttaactgtaacaactt

SEQ ID NO: 96740 - DNA, 356 bp, Oryza sativa
  Clone ID: PAT_MRT4530_94808C.1
cccccaaacatttcctacaattttataagaagggattttttcccaccatggatcgattcccccattataaataactgaagagcagcctgccagatgattaaaattacatgtccatccccccaaaacacaggtaattaatgggtcgtttttgagagaagaagaagaagaagaagaagtttaaatgtcgaaaacctttttgccggggaacttgacctcaagggggttgacttttttgccgatgctggggaagttttggccaaccccctgcctgccggggttgaccttttccgggaagaccccgcccttggggggggggtactgcacccccccattggggaagacccggaaaaactggg

SEQ ID NO: 96741 - DNA, 338 bp, Oryza sativa
  Clone ID: PAT_MRT4530_94809C.1
catgttaaactacagttactttgagacatacatatgagctaatgagggggggatgaatctgcagagcctggaaattatcaaccaaagctttaatattggcgacgtgaagccagcaaacatggaggagctaactgaggagatcacatgtgcggagttccacccagcttattgtaatacattagactatagtagcttggtggtctagagaaagcgcgactatacacaaaggctagcattgttgtggaggcctgcgaccgggagctgaggagcatgaaccacctggatcgagatcctttttttacagagataattgcatcggtttcagatttaaaatttgc

SEQ ID NO: 96742 - DNA, 561 bp, Oryza sativa
  Clone ID: PAT_MRT4530_9480C.1
cccacgcgtccggtgggggaaagggaacaacagcttcgtcgtcgccgaccccttcgtcttctcccagaccctgctccccgcccacttcaagcacaacaacttctccagcttcgtccgccagctcaacacctatgtcagtctcgtcactcccagttctatttcatcgtctcatcatactccccccctctctgcacttcacatcatgctgccatggattctcagtggtacccaactcaaagtgagttctgaggggcttcggccatggcccatggatctgagctacatggttcttgagttcgtgtgtgcgtgtgttttgggagattctttggaagatgagataaaaaattgttgtggtggttggcatgttgattttgtagacttggagagacaggaggtgagaggtgaggacaacagagtttgggacccatcatttattggtgtagccttaaattgtacatatgcgctgttgtaaattcagctagctgtacatcttggtgtactaaaatctggtggacaaagccaagaatagaaatcattccatgtctgatgttcttttttccc

SEQ ID NO: 96743 - DNA, 540 bp, Oryza sativa
  Clone ID: PAT_MRT4530_94810C.1
atgaggggcggcaggatgaggctggtcggggcggcgatgctggcgctgctctacatggtcgcgtcctttcaaggtgcctctggggccgccgccggcggctctccctccagcggtggggggaggagctccggcggaagtagttccagtggctcgagctctggcggtagcagcacaagaagccctgtaggatctgcgagcccaagtagtggaaggaacccagcaacaactgggagccccgggggtgtaaggagccctgcaaccgcaagagctgggagccccgggggtggaaccggaaccacccttgcaggagcagggagccccggcggcggaaggagccctgtaggaggtggaacgatccctgcaggggcagggaatcaaggcagcggggccgattccaggcctcccattgggccacgtggcaccgcgcccctagctccatccgggttctcggctggagaagtgagccacgtattcgtacccttcccacagccatccgatgatatatcgacggtgacaaaggtccagcggatctcaatgtaa

SEQ ID NO: 96744 - DNA, 269 bp, Oryza sativa
  Clone ID: PAT_MRT4530_94811C.1
tttttgttttttttttttttttttttttttttttttttttttttttttttttttatggaaaacatgaatgatggattaaaaagggaaagaccttattttggtccaaaataaatttggagttccgtcgaactgggatttaggagcttaggagaaaacccaggtgaattttacatatacattcaaaagcaaatttgggagttttgtaaccaactgaacccggttttttagattttatggaccccagaaatttattataaaagccgattttc

SEQ ID NO: 96745 - DNA, 442 bp, Oryza sativa
  Clone ID: PAT_MRT4530_94812C.1
gcacgaggacatatgctgaataccttccaagacaactcatactggcaaaagagaagaaaggagagggaagaagatgtgcataccacaaggattacaaaggcagcaaggtatatttctttgtgctggtactctggttccttgcaaattcatatgtttagcattaaaataaagagaaactatcatgatcatgctttagttcgttcatgagactatcataatacatgacttgtgtatacaaagagggttgctaatgctaaatgtggcgtttcatctatcacccttttttgtttgtttgtttgacttctatagtgtgcaaattggttaggaactttcacaaaggcttcttatactgttggattgtttgatggatggatggatgggcaaagagttgagatgctgtgtggagagactttgagaatatcttgtggtccatttaaaaata

SEQ ID NO: 96746 - DNA, 2490 bp, Oryza sativa
  Clone ID: PAT_MRT4530_94813C.1
atgagctcgtcgtcggcggccagcatcgggccgccgcagccgccgccgccccccgcgccgcccgaggaagagaagaagtgcctcaactcggagctatggcacgcctgcgccggcccgctcgtctgcctccccaccgtcggcacgcgcgtcgtctacttcccgcaaggccacagcgagcaggtggcggcgtcgacgaacaaggaggtggagggtcacatcccgaactaccccaacctgccggcgcagctgatctgccagctccacgatgtcacaatgcatgcggatgtggagactgacgaggtgtacgcgcagatgacgctccagccactgaacccagtaaggcgcctggggtttttgcatgatgtttgcagtgctgaggttttgatgcaggagcagaacgatgcgtaccttcccgcggagatggggataatgagcaagcagccgacgaattacttctgcaagacattgacggcgagcgacaccagcacgcacggggggttctccgtgccccgccgtgctgctgagcgcgtcttccctcctctggatttcacacagcagcctccagcccaggagctaattgcacgggatattcatgacatcgagtggaagttcaggcacatctttcgaggccaacccaaacgacacctgctaaccactggctggagcgtttttgtcagtgctaagagacttgttgctggagattctgtgcttttcatatggaacgagaaaaaccagcttttacttggaataagacgtgccagtcggccacagactgtgatgccttcctctgttctttcaagcgatagcatgcacataggtctccttgcagcagcagctcatgctgctgctacaaacagccgtttcactattttctacaacccccggtatatggggactataactgaagttagtgatgcagacccagtccgttggcctagttcctattggagatctgtgaaggttggttgggatgaatcaactgcaggggaaaggccaccaagagtttctttatgggaaattgaaccattgacaacctttccaatgtatccatctctgttcccactgagagttaagcatccttggtattcaggagttgcttccctgcatgatgacagcaatgctttaatgtggctgagaggagttgctggtgagggaggttttcagtctctgaactttcagtcacctggtattggctcctggggacaacagaggctccatccatccttactgagcagcgatcacgatcagtaccaagcagtagttgctgctgctgctgcttcccaatctggtggttacttaaaacagcaattcttgcaccttcagcaacctatgcagtcccctcaagaacactgcaacctcaacccattattgcagcaacaaattctgcagcaagcaagccagcaacagataattaatcctgatgcccaaaatatccaaacgatgttgagcccaagtgctatacaacagcaactccagcaactacagcaaatgcagcaagttcagaatgatcagaagcagaagattcaaccagatcaaagctaccaagttcctacaagtgcagttctcccaagtccaacatcattaccgagtcatttgcgagaaaaatttggcttctctgatcctaatgcgaattcttcaagcttcatcacctctagcagtagtgataacatgttggattcgagcttccttcagggaagttcgaaagctgtggacttatctcgatttaatcagcctgtagctagtgagcagcagcagcaacaggcatggaagcagaagtttatgggttcacagtcagtgtcttttgggggctcggttttgcataactcacccacaagcaaagatggttctgttgaaaacaaaattggtcgtgatgtgcaaaaccagtccctttttagtccacaagttgactcttcatccctcctgtacaacatggttcctaatctgacttcgaatgtttcggatggcaacttatcaacgatcccttctggatcaacttatctgcagaatgcaatgtatggttgcttggacgactcttctggtttattgcaaaatacaggagagaacgatccagcaaccagaacatttgtgaaggtttacaagtcaggttcggttgggaggtcgttggacatcacccggttctctaattatgctgaacttcgagaagaactgggtcagatgttcggcattaagggtcaattggacgaccctgatagatcaggctggcagcttgtattcgtcgacagggagaatgatgtgcttctccttggagacgacccttgggaattcattaacatctatatgaatgtgaggaatgctaaaaagtcttacattatgaaacggagggagtacaatactttggtttcctggtttccacaactaatagcttatcgaggaaagactgttcttccttcaataatatgtgttggtcagtcactacatgttgatgctcagttacccaagacccttcgtgagagtaaacatcagacatga

SEQ ID NO: 96747 - DNA, 382 bp, Oryza sativa
  Clone ID: PAT_MRT4530_94814C.1
cccccccaaaaccaacaggggaatgcttaataaatacataacataaccggggttgacagctttttttaaaaaaaaaccttttttgggggggaaccaaaccacaccccaggtttttgggtgttaatttttaaataactggttggaagcagtttttttttattttttcccctttgcaaagatcaattttttttaaactttttttgggggctttggctttatgacattttttttttaaacctccggtttggaaattaggtaggccttgggggtttttaaaattccggtgagggacttcttaaccttggggatttcgccctttacctccactccggggaggagtttttacgtggacttcacttttaaaaaccttccgccgtttggc

SEQ ID NO: 96748 - DNA, 2616 bp, Oryza sativa
  Clone ID: PAT_MRT4530_94815C.1
ccccaccatggtggcgatctccgagctcgggtgagcggaagagaaagaatgcggccgatttgaggagggggatggggttttcgggtggatttgtgaggggatagattaagagtttgtgcttctctggtttggtcggaggaggaggagatgagctcgtcgtcggcggccagcatcgggccgccgcagccgccgccgccccccgcgccgcccgaggaaggtgggtggctagagaagaagtgcctcaactcggagctatggcacgcctgcgccggcccgctcgtctgcctccccaccgtcggcacgcgcgtcgtctacttcccgcaaggccacagcgagcaggtggcggcgtcgacgaacaaggaggtggagggtcacatcccgaactaccccaacctgccggcgcagctgatctgccagctccacgatgtcacaatgcatgcggatgtggagactgacgaggtgtacgcgcagatgacgctccagccactgaacccacaggagcagaacgatgcgtaccttcccgcggagatggggataatgagcaagcagccgacgaattacttctgcaagacattgacggcgagcgacaccagcacgcacggggggttctccgtgccccgccgtgctgctgagcgcgtcttccctcctttggatttcacacagcagcctccagcccaggagctaattgcacgggatattcatgacatcgagtggaagttcaggcacatctttcgaggccaacccaaacgacacctgctaaccactggctggagcgtttttgtcagtgctaagagacttgttgctggagattctgtgcttttcatatggaacgagaaaaaccagcttttacttggaataagacgtgccagtcggccacagactgtgatgccttcctctgttctttcaagcgatagcatgcacataggtctccttgcagcagcagctcatgctgctgctacaaacagccgtttcactattttctacaacccccgggcaagtccatcagaatttgtcataccactgtcaaaatacatcaaggctgtttttcacacccggatatcggttgggatgcggttcaggatgttgtttgagactgaggaatcaagcgttcgcaggtatatggggactataactgaagttagtgatgcagacccagtccgttggcctagttcctattggagatctgtgaaggttggttgggatgaatcaactgcaggggaaagaccaccaagagtttctttatgggaaattgaaccattgacaacctttccaatgtatccatctctgttcccactgagagttaagcatccttggtattcaggagttgcttccctgcatgatgacagcaatgctttaatgtggctgagaggagttgctggtgagggaggttttcagtctctgaactttcagtcacctggtattggctcctggggacaacagaggctccatccatccttactgagcagcgatcacgatcagtaccaagcagtagttgctgctgctgctgcttcccaatctggtggttacttaaaacagcaattcttgcaccttcagcaacctatgcagtcccctcaagaacactgcaacctcaacccattattgcagcaacaaattctgcagcaagcaagccagcaacagataattaatcctgatgcccaaaatatccaaacgatgttgagcccaagtgctatacaacagcaactccagcaactacagcaaatgcagcaagttcagaatgatcagaagcagaagattcaaccagatcaaagctaccaagttcctacaagtgcagttctcccaagtccaacatcattaccgagtcatttgcgagaaaaatttggcttctctgatcctaatgcgaattcttcaagcttcatcacctctagcagtagtgataacatgttggattcgagcttccttcagggaagttcgaaagctgtggacttatctcgatttaatcagcctgtagctagtgagcagcagcagcagcagcaacaggcatggaagcagaagtttatgggttcacagtcagtgtcttttgggggctcggttttgcataactcacccacaagcaaagatggttctgttgaaaacaaaattggtcgtgatgtgcaaaaccagtccctttttagtccacaagttgactcttcatccctcctgtacaacatggttcctaatctgacttcgaatgtttcggatggcaacttatcaacgatcccttctggatcaacttatctgcagaatgcaatgtatggttgcttggacgactcttctggtttattgcaaaatacaggagagaacgatccagcaaccagaacatttgtgaaggtttacaagtcaggttcggttgggaggtcgttggacataacccggttctctaattatgctgaacttcgagaagaactgggtcagatgttcggcattaagggtcaattggacgaccctgatagatcaggctggcagcttgtattcgtcgacagggagaatgatgtgcttctccttggagacgacccttgggagtcctttgtgaatagtgtatggtacatcaagatactttcacctgaggatgtgcataagatgggaaagcaaggaaatgatccacggtatctgtcctga

SEQ ID NO: 96749 - DNA, 3271 bp, Oryza sativa
  unsure (1)..(3271): unsure at all n locations
  Clone ID: PAT_MRT4530_94816C.1
atgagctcgtcgtcggcggccagcatcgggccgccgcagccgccgccgccccccgcgccgcccgaggaagagaagaagtgcctcaactcggagctatggcacgcctgcgccggcccgctcgtctgcctccccaccgtcggcacgcgcgtcgtctacttcccgcaaggccacagcgagcaggtggcggcgtcgacgaacaaggaggtggagggtcacatcccgaactaccccaacctgccggcgcagctgatctgccagctccacgatgtcacaatgcatgcggatgtggagactgacgaggtgtacgcgcagatgacgctccagccactgaacccagtaaggcgcctggggtttttgcatgatgtttgcagtgctgaggttttgatgcaggagcagaacgatgcgtaccttcccgcggagatggggataatgagcaagcagccgacgaattacttctgcaagacattgacggcgagcgacaccagcacgcacggggggttctccgtgccccgccgtgctgctgagcgcgtcttccctcctttggatttcacacagcagcctccagcccaggagctaattgcacgggatattcatgacatcgagtggaagttcaggcacatctttcgaggccaacccaaacgacacctgctaaccactggctggagcgtttttgtcagtgctaagagacttgttgctggagattctgtgcttttcatatggaacgagaaaaaccagcttttacttggaataagacgtgccagtcggccacagactgtgatgccttcctctgttctttcaagcgatagcatgcacataggtctccttgcagcagcagctcatgctgctgctacaaacagccgtttcactattttctacaacccccggacatcaccccattatttatgggaattttataattgggcctctataaaaatccataatatactaatgcgcccaatgcacactttaatgaaacacaggtatatggggactataactgaagttagtgatgcagacccagtccgttggcctagttcctattggagatctgtgaaggttggttgggatgaatcaactgcaggggaaaggccaccaagagtttctttatgggaaattgaaccattgacaacctttccaatgtatccatctctgttcccactgagagttaagcatccttggtattcaggagttgcttccctgcatgatgacagcaatgctttaatctggctgagaggagttgctggtgagggaggttttcagtctctgaactttcagtcacctggtattggctcctggggacaacagaggctccatccatccttactgagcagcgatcacgatcagtaccaagcagtagttgctgctgctgctgcttcccaatctggtggttacttaaaacagcaattcttgcaccttcagcaacctatgcagtcccctcaagaacactgcaacctcaacccattattgcagcaacaaattctgcagcaagcaagccagcaacagataattaatcctgatgcccaaaatatccaaacgatgttgagcccaagtgctatacaacagcaactccagcaactacagcaaatgcagcaagttcagaatgatcagaagcagaagattcaaccagatcaaagctaccaagttcctacaagtgcagttctcccaagtccaacatcattaccgagtcatttgcgagaaaaatttggcttctctgatcctaatgcgaattcttcaagcttcatcacctctagcagtagtgataacatgttggattcgagcttccttcagggaagttcgaaagctgtggacttatctcgatttaatcagcctgtagctagtgagcagcagcagcaacaggcatggaagcagaagtttatgggttcacagtcagtgtcttttgggggctcggttttgcataactcacccacaagcaaagatggttctgttgaaaacaaaattggtcgtgatgtgcaaaaccagtccctttttagtccacaagttgactcttcatccctcctgtacaacatggttcctaatctgacttcgaatgtttcggatggcaacttatcaacgatcccttctggatcaacttatctgcagaatgcaatgtatggttgcttggacgactcttctggtttattgcaaaatacaggagagaacgatccagcaaccagaacatttgtgaaggtttacaagtcaggttcggttgggaggtcgttggacataacccggttctctaattatgctgaacttcgagaagaactgggtcagatgttcggcattaagggtcaattggacgaccctgatagatcaggctggcagcttgtattcgtcgacagggagaatgatgtgcttctccttggagacgacccttgggaattcattaacatctatatgaatgtgagcaatgctaaaaagtcttacattatgaaacggagggagtacaatactttggtttcctggtttccacaactaatagcttatcgaggaaagactgttcttccttcaataatatgtgttggtcagtcactatatgttgatgctcagttacccaagacccttcgtctgggtcaaatgttcggcattaagggtcaattggacgaccctgatagatcaggctggcagcttgtattcgtcgacagggaaaatgatgtgcttctccttggagacgacccttgggagtcctttgtgaatagtgtatggtacatcaagatactttcacctgaggatgtgcataagatgggaaagcaaggaaatgatccacggtatctgtcctgaagtgagagaacatggtgccatttctgggcttccaggaggattctgcagtgcatggtggcactcttgctctcgacaatgcacgtcgtcagaagtcccaaatttgtatcttgcatgtacgccgtacatgtttccagaactctctgttacctattcggtgcaggccaccggaaccacgaaacctgatattttgtaggttccacttaggaatcagtatcggtttaactcttatcctagatgatttgtaactcgcacggcagtccactgttttcatgtttcatcgagtcttcctagacattaaacttagttgatattgtatcaggatttatgtgtattgagattcctctacatgctttcaaccaaaaaaaactgcaataatcgaagcgcacgaggattgtttccaaaaaaaaaaaaaaaaaaaaattttnaccgattgtccggttatgtcagtttcgagaggagctgtcaaaaaaaaaaaaaannaaaaaaaaaaaaa

SEQ ID NO: 96750 - DNA, 516 bp, Oryza sativa
  Clone ID: PAT_MRT4530_94817C.1
gagagcggcagcaggatgatcaccctgaagagcaacgagggcaaggcgttcgttgtgacggaggtgtcggcgaggcagtccacgaccatcgggcacatgatcgacgacgactgcaccagggaagccgtcccgctccccaacgtcgactctaagaccctcgagaaggtgatcgagtacttcgacgagcacgccaacacgcgagagcgagcgatggcggccgcggcggcggccgcggcggaggaggaggaggagaaggagagcggcagcagcaggatgatcaccctgaagagcaacgacgagaagctggtcgaggtggacaaggcgtccctcatcgacgtcatcatggccgccaactacctcaacatccaggggctcctcgacatcacctgccagcgcgtcgccgacacgatcgggagcgccaccgccgagaagatccgcgaggcgttcgacatcgaggacgacctcaccgaggcggagaagaaggagatccgcgaggagaacgcctgggccttcgac

SEQ ID NO: 96751 - DNA, 594 bp, Oryza sativa
  Clone ID: PAT_MRT4530_94818C.1
atggcgcagaaggcagttcttggcatgtcggatgtccacccaagctctactgttaccactacaattaccatcgatgccctctatgacaaatgggacccatatgtcaacctctactacacttcttccaccccattccccccatacatctccctttttcggttcttcctcccctctacctcggatgcggtgcgacaactcgcgggaggcgggccacgcgaggcgacgacggacagcggtggtgactcgtgggcacgcaaggcaacggcgggcatgggaggtgggccaggggaaagcagcgagcggcgagcggagaaggcgccgagccggtgggctgcactccagaggacagtggcaaggcggcagaaatcggcgctggaggccgacggcgaggcttgccgttgtgccgccctgtcgtcgcccttttccctgggtttttcctctgcacagccacgtgcggatctcgtggcggagaaaattccgctagaggccggaggcgacgctcgtcgtcgtgacaacggcgagccagaggccgaggcgacgctcatagtcgtgttgccctaccgacgcgccctcttccctcctcgcaacctggca

SEQ ID NO: 96752 - DNA, 234 bp, Oryza sativa
  Clone ID: PAT_MRT4530_94819C.1
atggaggagaggtcgcgatgggagtccgaatgtgggcgggagatgtgggcgttgagatatggcgtgaggagagagaatcgctatatttggccgaaatctactcgctttggcgcatcgtccatatttggcggactcaatgccgtatctgttggaggtccattttcatctcgcatatgccatatatcggatggaggaccggatgaaggatctcctggggatgctctaagaaggtag

SEQ ID NO: 96753 - DNA, 609 bp, Oryza sativa
  Clone ID: PAT_MRT4530_9481C.1
atggcgggcggagacgccgaggaggaggaggaggaggaggaggagacctacacgacggacgacgcgctcacgcgcgccggcttcggcaggttccaggccctggtgctcgcctacgcctgcgtggggtgggtcgcggaggccatgaaggtgatgctgctgtcgttcgtgggcccgtccgtgaaggctgaatggggggtgtccggcgcggcggaggggctcgtcagcagcgtcgtcttcgccgggatgctcatcggcgcctgcctcggaggcctcatctcggacagatacggcagaagtttcctgattgccacgcttcagtccaagtacatatatttcaatttcgggatcggttttctttccacggcagttgtcactggtatatttggtttgctcagtgccttctcccccaactacgcatccttgctcgtcctccgctttgttgttggtttgggattgggtgctggccatgtgctgtccacttggttcatagagtttgttcctgctgcaaagagaggaggctgtcatgccagtacttgggtggaggtggctgcttgcattgtcttcggccccatgttttatcctgttcattttcttccccgtaacacctga

SEQ ID NO: 96754 - DNA, 1218 bp, Oryza sativa
  Clone ID: PAT_MRT4530_94820C.1
atggaggagaagccaattgcaaaggggaaggtggccgtggaggaggaggagtatgaggaccgagacgacgacgatggtgcccagctggggaatggtggagtgatcttggtactgtttgagacgcccactggatttgcacttttcagctatgatggaatcaaactcctccgcccacatgccctcatgcatcctgtttggctgaaagactttcaagctttcgaggacaaggccagcgcccttagccttgatactggtgttagcgaacagcttgcaggcatgatccggaggtttatctgtcctggccagacactagcagttggaaagcaagaatatgtaactatcattcaaagtaacttgggaataaagtgcctatggaatgctgaagtgatggagttgatgtggggcctgaataatctaaaggaacatttagtacctgatggaaaatcagagctgagtaaagaggattgcctcccgatgtgtgaagggatgaaatttaccctgaataagtatggcttcggtgatctcaaaccagagatggttactagaagtatcattgaggcgacgggcctcttgtacgagactgactatcatgtgaggaaacatggtgagagcatgcgctatgctggtaagcacctgaagaagatatctggtatcaacgctgaggattgggacctgctgaaacttgcaactgctatcatgatgttatgttaccctaatggtgaatacaagttggttgggaaccttcccgagctttttggagatgactattcaaagttggtggatgatgcgcctaaatataaaggtatattccggaagttgtcttgcttgagggcttatgcagaaatggtgcggtcccgtagaattaggtctaaggcggctcgtcgtttggactctttagtcacggcagctgaacgcatctacgacgagctaggctcaacaagcgcagccaggagtgatcaaacaagagtaactctccactgttcttactatgctcggctgcacctgcatgccctggtgtttgatgcagacattaagagtgtttggtaagtatgtttactatgtcacccaactagtgatttgatcactgtactcttgtgtattctcaattactggcatttcagactgagatgaatcatcagactatcttgcattgctctgtccctgtggtttacctttcttcctttgtactacctctgtgcctaaaaaaaaaaaaaaaaa

SEQ ID NO: 96755 - DNA, 298 bp, Oryza sativa
  unsure (1)..(298): unsure at all n locations
  Clone ID: PAT_MRT4530_94821C.1
acaacacaacaccgattggctctgcggcgatataatgtcagcagcaatcaaagaccggcggcggctgggcagaaacatgcacgaggccggcaacacaaagggcgcaaacggacgccaccatcaattttgtgcttcctaaaatcctatggacaanntcagaacatngcagatacaccccaagatcgaaaaagggggaaaaaaaaaaaaggggggcggccgtcttcgccgccggaccgccngtgggtcgaccccgngagaattcgcggacccggttaccctgcnnaggcgtaccagcctt

SEQ ID NO: 96756 - DNA, 1431 bp, Oryza sativa
  Clone ID: PAT_MRT4530_94822C.1
atgaggacaaagacgtttgtgttgttcccgtctcttggcgtcggccacctcaaccccatggtggagatggccaagcacctgcgccgccgcggcctcgccgtcgtcgtcgcggtgatcgacccgcccgacaacgacgccacctcggccgacgcgacggcgcgcctcgccgcggccaacccgtccatcacgttccgcctcctgccggcgccgcccagcccggacgccgccgcgcacccggccaggcgcgccctcgacgcgctccgcctggccaaccccgtgctccgggagttcctccgctcgctgcccgacgccgccgacgccctcctgctcgacgcgttctgcgtcgacgcgctcgacgtcgcggccgagctcgccatccccgcctacttcttcttcccctccggtgccagcgccctcgccgccttgctccacctcccgtattactaccccgacgtgccgtcgttcagggagatgggcatggcgctcgtccgcctccccggcatgccgccgctccgcgccgtcgacatggtggcgacggtgcaggacaaggagagcgacgcgaccaaggtccggctgtaccagttcaagcggatggcggaggcgaagggcgtgctcgtgaacagcttcgatcggctggagcccaaggccctgaacgcgctcgccgccggcgtctgcgttcccgacaagcccacgccgagggtctactgcatcgggccactggtcgacgccgccgccggcaagaacggcgagagacacccgtgcctcgcgtggctggacgcgcagccgcgccagagtgtcgtgttcctctgcttcggcagcaagggcgcgttcccggcggcgcagctgaaggacatagctcgtgggctggagaactccggccaccgtttcctgtgggcagtgaggagcccgccggaggagcagagcacatcgccggagcctgacctggagcggctgctgccggcggggttcttggagaggacgaagcatcgcggcatggtggtcaagaactgggcgccacaggcggaggtggtgcggcacgaggcggccggcgcgttcgtgacgcactgcgggtggaactcgacgctggaggcgatcatgtcggcgctgccgatgatttgctggccgctttacgcggagcaggcgatgaacagggtgctcatggtggaggagatgaaggtcgccgtggcgctcgacggcggcgaggtgggtggcgcgttggtggcggtggcggcggaggaggtggaggcgaaggtgaggctggtgatggagaccgaggaagggaggaagctcagggagagggtggtggagacgagagacatggcgctggatgccatcaacggaggtgggtcttctgagattgcatttgatgagttcatgagagatttggagaagatgaacagcttggagaacggaggaggacgcagctgctga

SEQ ID NO: 96757 - DNA, 323 bp, Oryza sativa
  Clone ID: PAT_MRT4530_94823C.1
tcgcgaacccgaggacggacacctgggggaaaaaaaacatatacttttttattgattgcctgaatgaacatggatggctagcaaggactgattcttcgcggcggagctcatggcggccatggtggccatctccggcgcgcaaatgagcgagtcggagatgatgttcagggacaggcagtgccagcgggaggtgcatgacaacccgttagacgccgtgccgcaggatgctaaccggcagcttaccggccggtaaaggttccagccgatgtttcaccgtacgggcgcgctcggactgcggatgcaatgctgtcaacagctacaag

SEQ ID NO: 96758 - DNA, 625 bp, Oryza sativa
  unsure (1)..(625): unsure at all n locations
  Clone ID: PAT_MRT4530_94824C.1
cggacgcgtgggatcacgagacagaaaagggaaccttgcacggacagcctaggagccgggctcgccgaggacatgtcgctggccatgacgggcagcaccacgagctggtctcatatcacgccggacgactacgtcaacctgcacaacagcacacggggcgcggacggagcatgcccgggaagctgagaccgcaaggccatcaggttcgagcaaagatacacgggcaagcgcgccggagactgcaggctgcagcactccggctggccgaactgcgagatcatcttctggggctcggcagggcgcgcctagagcgccacctacaccgtggcgtcgagggcgggcgaaaaaaagatctaccacgtacgacaccgacacgagcgacccgngcaaggtgtgcggccactacacccaggagctgtggctcaagtcagtgcacatgctctgcacccgtatcgatgtgcacagcgaatccgagcgtgctcatcacctgctagtacgaccccccgaacgacttccacgtcgagcgcccgatcctgacccttaacaccgaggacaagtagacgaccactcactcttacacagcccagatgaactgcgtgctatgtcgctgccgcaagacatttca

SEQ ID NO: 96759 - DNA, 249 bp, Oryza sativa
  unsure (1)..(249): unsure at all n locations
  Clone ID: PAT_MRT4530_94825C.1
ctaccattactgggtacctgggcgctccactttggacgggcattcgatgtttggttggatctttgangtcacaagccttgtgcatgaagaccatttgagcctttatgtgaagcttctggtgcacctttctcgtcgggtgacactactcgtaaactcgagcgtggacaaaaacgggactctggtccngcatacagaggaagaattacatctctccgggacatggaggataccctcaaacggagatgngga

SEQ ID NO: 96760 - DNA, 661 bp, Oryza sativa
  Clone ID: PAT_MRT4530_94826C.1
ttggctttcatctaacgttaaagaagaaacctggggaatatcacttatttggctttcatctaacgttaaagaagaagcttcataagggccaaaaagaccatttactaccaaatgaaaatatttagtattcgagtaccattccaaaatatttttagtccgagctcgttgataccatttaatttcctcttccttatcaaataggataacctcttcctcaaataaagcctataataagccaaataagttgattatgtttttttatcaagaaaatcaaaacttttttaccaacaaaattaagttttttctcaccaaaccttctcttttttataaataccgctagtctgtttgttccaacctcttaaatattgtcttactttacgaatcttagtatgccaacactctacatgagtgtcagttgaatccgtagggacaagcggttagagtggaatatcactactattattagtaataatagtctacagtaaaaaaatcattgacggtccaggacgtgcggcgagaggagaccgagtgcgagctggcgaaggatccatccgaaggagtccgacccggagcaggatttcagatggccggtgcggctgcagtttcggagaaaagggaaattgaggaattgagtcctatttataggagttatatagagtag

SEQ ID NO: 96761 - DNA, 1588 bp, Oryza sativa
  Clone ID: PAT_MRT4530_94827C.1
ctaaatggcctcgcacacccctaaagggtctaatgcgaggcagtggcagtggaactgctgctcagctcctcctactactccaccactgaccactccactccacagctccactccaccttctagaacaatccagaggctctcccactccgcatggtcttcccatagcaaccccaagaccatcgcacaagcgcaaccgagccgcgccggcaacaatggcggtgggcaacggcctgatcctgtaccacatcctcgggctggcctcctgcatcgcgctggtctacttctccctcggcgaggtggacctccgcgacgccctgccatccctcccgttctcgggcggcgcctcgcgcgcggcggcggcgtccctgcccttcgtggagcggcgcggcaagcgcctcttcctggacggccggcccttctacatcaacgggtggaactcgtactggctcatggacctcgccgtggagccgaacacccgcccccgcgtgtccagcatgttccgcaccgccgtctccatgggcctcaccgtgtgccgcacctgggccttcaacgacggctcctacaacgccctccagctctcccccggccacttcgacgagcgcgtcttcaaggcgctggaccgggtggtggcggaggcgtcggagcacggcgtgcggctgatcctgagcctggcgaacaacctggacgcgtacggcgggaagcggcagtacgtgcggtgggcgtgggaggagggcgtcggcctcaccgcctccaacgattccttcttcttcgaccccgccatccgcgactacttcaaagtctacctcaagacgttgctgatgaggaagaatcacttgacggggttggagtacagggacgaccctaccatcctcgcgtgggagctcatgaacgagcccagatgcacctccgatccatctggtgacactctgcagcgttggatggaggagatgtctgcgtacgtgaaatcgatcgacaagaagcacctcctcaccgtcggcaccgaggggttctacggcccgacgagttctcaagaaaagctgaacatcaatccgggagaatggttccccaacaactacggcgcggatttcatccgcaactccaaaatacaagacatcgactttgcttccgtccatgtttacccagacaattggttgcagcacgccagtctggacgagaagctcaagttcatgacgcggtggatcaccgcccacgtggaggacggcgacggggagctggagaagcccgtgctggtgacggagttcgggctgtcgcaccaggtggagggcttcgaagacgcgcaccgggacgtcctgtacagggcggtgtacgacatcgtccacggctcggccaggcggggcggcgccgccggcggcgcactcgtgtggcagctcgccgccgagggcatggaggagtaccacgacggcttctccatcgtacccagcgagaggccgtccatgatgcggctgatcaaggagcagtcgtgccggctcgccgcggtgaggtacggcgaggagggggccaggaaggtcctcaagacggtgtgcgcctgatcgttctgatcgtttcttttttttaaaaaaaaaaaaaa

SEQ ID NO: 96762 - DNA, 1982 bp, Oryza sativa
  Clone ID: PAT_MRT4530_94828C.1
atggtgtacgcggagaataaggagatgcctgcgcccctcactatcggcattcgcttgcgtggggtgctccccatacctggctgcagcgcgcgcggcacgagcattctggtggcggaggtggagatcatggtgagcatagaggagaggtttgtgcgggaggttaatttctgggtgatgcagcctgactacaggcccagcaattcctcctgtgaaatgcgcgtttctcttttagccttcaggctctgccgctcccactttccgtccgcgctcgggctccttcacctgctcgatgccgacggcggcgccgacgccagaggaccccatcaccccactcgtccccacaccgccacctcccccggcaaccgggccctccaacccccgggcctcgccatcgacatcgaggccgacagcaacaacgtcctctccttcgccgtcaccgcccgcgacgccggccccaagaacagcgtgttccagttcggggtggacacgggcgacatgaacgaggcagttgggcgcgcggaacgctggcgcgtccggttgacggctgtgctggcgcgggtcgagccggggttcgcgcctgcggaattcatgatgattgacccggtgccggaggagttggagattccgaaagcggacgagatcggcatgggcgtgtgcgtgtacgcggggctccccgcgcctggtggttgtgatgactggggcgacgcgattccggaggcccggatggagatcaaggtgaccggagagaagaggttcgtgcaggaggttaatttcggggtgacattactgacatcagatagtgatagcgacggcagattgattgatatgcttgcttgcgcggcggtggaagctgacggctcggtctcgcgtgcgcggaaaaggccgcgcattggcgtgagcgcggagcccgcgcggccgacggcgccaatgctgggatctgaacctccgtggttggtgctccggctggtgggtcccttcctcgacgccgagtcgctcgcggcggcctcctgcgtctccaccgcctgccgcgaggccttcaccgccgaggacctctggtccaagctcttgcgctcccagtacccatccgctctcggcctccttcccatgcagggcaatggcgacgacgccagcggccggagctcgtcgccgtaccgccgcctgttcgcgctgttccggtccgcctccgcccgccgccgcgcgctcccgccaccgcgcctcgccctcgacgatgtcaccttcgccatcgacatcttcgcggccagcggcgagaacaccctctcgttcgtcgtcgccgcccgcgacgccatcgccaagaccggccgtttccagttcgaggtcgacctgaccggccggaacgcggcggtcgggcggggggagttctggagcgtccggtggacggctttgcgggcggggctgatcgggtttgcccccttggcggtcgagatgatggacgcgaaggccccggcggcgagggcgcgcgcgctgttcggtggcgcgacgggggagacctgggccacggggtgtctcccggcgcctggctgcggcggcgcgacggtggaggcggaggtggtgttcgaagtgtccagcgaggagaggctgttggagaaggtgaggttcggtgtgatggcgcagtgtaggtacgtgagcatcgacgatgggctcagatacttgcaacacttcctcctgtaacgcacgcccttcttcttctccttccgatcgtcagacatgacgtggctacttcaaattgtaaatcgtgttaaatagtactactagctatctattttcttcttgggatcaatgttgaagttcccaaaaaaaaaaaaaaaaaagggcggccgcgcgcgctcatgaccggcttgaactagctgcacgcactagctacccgcatgaccccgcgcgctagctttgtacccagtaatcactagtatgtatgaactcacgtcgatcgcttgcaatgtgcataaaaaaaaaaaaaaaaaaaa

SEQ ID NO: 96763 - DNA, 731 bp, Oryza sativa
  unsure (1)..(731): unsure at all n locations
  Clone ID: PAT_MRT4530_9482C.1
atgagctcctctgatcttggcagtcaacagttcaacaccatccagccatccaccttccccctgagtgtagcgtgcgcggccatggcgggcggagacgccgaggaggaggaggaggaggaggaggagacctacacgacggacgacgcgctcacgcgcgccggcttcggcaggttccaggccctggtgctcgcctacgcctgcgtggggtgggtcgcggaggccatggaggtgatgctgctgtcgttcgtgggcccgtccgtgaaggctgaatggggggtgtccggcgcggcggaggggctcgtcagcagcgtcgtcttcgccgggatgctcatcggcgcctgcctcggaggcctcatctcggacagatacggcagaagcctcatctcggacagatacggcagaaggatcggttttctttccacggcagttgtcactgggtatatttggtttgcccagtgccttctcccccaactacgcatccttgctcgtcctccgctttgttgttggtttgggattgggtgctggccatgtgctgtccacttgggttcatagaagtttgttccctgctgcaaagaagaggtacctggatggtcgtttttccaattgctcttggactgtggggnaacaaatctttggaaagctctgcttgcctggggctgtcatgccagtacttgggtggaggtggctgcttgcattgtcttcggccccatgttttatcctgttcattttct

SEQ ID NO: 96764 - DNA, 1397 bp, Oryza sativa
  unsure (1)..(1397): unsure at all n locations
  Clone ID: PAT_MRT4530_94830C.1
ngagcgntntncntntcntnaggctgcaggaattcggcacccggctcaagtcagcggttagggttccgagatctccgcctcgcacggcagccatggcggcaagcacttttagcacagtcaaggtgagcaatgtgtcactgaaagcatcactgcgagatgtaaaggaattcttttccttttctggtgacattgtgcatgttgaaatgcaaagcagtgatgagctgtctcaagttgcctacattacttttaaagacaatcaaggatctgagacggctatgcttcttacgggtgccacaatagttgatatggctgtcattgtcacgccagctaccgattatgagctaccagcttctgttttagctgctctagagcccaaggatagtaagccttctgcccttcaaaaggcagaggacattgttgggaccatgctggccaagggattcattttaggtagggatgcactggacagagcaaaagccttggatgagaagcatcaactcacatcaactgcaactgctagagtatcttcctttgacaagaaaatgggtttaagcgagaagatcagtgttggcacttcggctgtaaatgataaagtgaaggaaatggatcagaaataccaagtctctgagaagacaaggtcagcactggcagctgctgaacagagtgtctctactgctggatctgccatcatgaagaacaggtatgtccttactggagcagcatgggtaactggtgctttcaataaggttgccaatgctgcaaatgatgttggcacaaaagcaaaggaaaaaatagcatctgagcaggagcacaagactgtagagcttgagtctgcagaacctaacagctcagaaggccatggaacacaaaaggatgtggatggtgaattcgccaagatacaggtctctgaatcccctgaagatattcccatctctacgactgcaaccgtccccattactgatgaggattccagtcaggcgtctccacctgccgcctctcccaaaaagccagaacctgcgcaggggttgatactatgattccattgatacatgagtgtaaatagacacgaaatggtcgctgaattcaggctgtagtgttgttgtgatccttcaaactaaacctctttgaagtttggatttgggacctggaataggttgcagtttgtagcatctatttttctcaattgaacatcattttcttgcattagcgaccttcttaataggcaccaaccattgatataccattttgacatgggatattgatgtggatttggtggaatatatgagaaattatgtttgagtacttcaccgtaactcgacattagtattccctctgaggtttattttgaattggttatgacgtccaaaaaaaaaaaaaaaaaaaaaaaaaaaaaaaaa

SEQ ID NO: 96765 - DNA, 2934 bp, Oryza sativa
  Clone ID: PAT_MRT4530_94831C.1
atgcgaccaagggcaaaaagaaaaagaaaaagaaaaagaagagagagagagagagagaggggcttcgcgcgcgtggagctgcggtgccctagggccctcgacccccgcccgagctggaccctcggcgacgtcctcaccgagcttgacgcgcttgaggccactcgccgcaccgcgcagcccacgcccctcaagcagccgccggagtgggctagcagtggcagcgtgagggagaaggcctttgtgatgcgggttgaagaggaagatgacacggatgaggacgattacgacagtgatggggagtcccgggctcttgtggccaaggccactggagcaaggttgttgtgcaccgatattgaatccggggatgctgaagaatcgaaggatgtgatggatgggacgtttgcaccatatcacctgatggtgtaacggagcctagaaaagagcattctgcttgagctggaacgtgagcatcatctgaaagatcaaggggaagtcagaagtaaactatctgcattggaggtatgccaccaaagtgaaatccagcgaacagtttctgcatttgctcgactacagaaatacgcagaattaagaaaagagataaagagatggctagttgtccacgtatagcgatatattacagaagtactctataaacatttgtatatggtccaaagggaccagctacgaaaatcgcaaattgtggaacgtagaataagagatcatgtatgggggaaaaatcaagctttccatgttttgaatttatggctggagcctgtaggttactaggtttcatctcgtttgggaggtagaatttccgtaggaatctctttctttggtatacaatttggtcaaatttattcttcccaaacaggaaaggaagcagcagaagctcagaaagcagcagctgaggtttccaaatccagccaaaattctcagaacaacgttgcaggaacaatgagggcaaacaagagtgaaattaaatctgaattaccagggatcaaagtctttgctgatcattctgcactggaagcagaattgcggaggcgtgcattacttgatcaagtgccagcgaacattcattccagcaaggagttcagcagatatgaccgacaaattgcaaaatctattggtaaacttatgccgactactgacagtgtaaaagcaagggctggtgagcttattaaagctttggatggacaggattgcccacgtccaattgcttgccgtatatttgcaaacaagattatttcaatcgtcaagagtagaaatacaaaggacaaaacatttggaaatttggcctttgcttgtggatatgtcatgcttctagtcaccagccaggtaccagatgcaatggattatcttctagctgagttccacagagtttgcatgtacacagttccaaagcatctgcatgctttaaacgcacaagtacggaatagagattattacagactgattggctaccaggaagaaaatggacaactcgagagcactgaaagttatttgacatatgttgccgcatacgtcaagctgtatgctgcaatgattcagaccgaaattaggggcgtgcggcatccacatggcttagctgaggggtggaaatggcttgccatgttccttaatactctcccggccaccacagcaactgcttgtgcccttcatgctttcctcaaggttgctggttttgcacttcacaagaaatacggatcacagttcatgaaacttctagatgtaatattgcggtgcttcttacccgctttgaaggaacaaggctcacgaattcaggctgaggctgcaagtaatctacagaattatctgactgacaaggtttaccttgaggaaccagaaggccagtaccttgcgcaacagcttctatctaaagagttgttcaccaagacatttcatactgtccaaatggagcaacctgcacggttatatgatggcagagaaggccagaatcgccctgaagaaatgtcttggattgcgcccccaagaaaggctaacgtcgtcgctataccttgtgctgccaccgccaccgcctatttctccatcgccgctagccgccgagcaccttcaatgtcgatgtctcgagagaagacacagtgtgccgcggtggccgacggacgagcgcacgacaccgctgtgcgtaccgagctggcacaagaatggcccatttaccaggctgggccaggccaggccgcccgtcgtgccaagattctagacccattatgggacgtgccggcccaagtaccaactgtaggcttgatacatgatgacggcgcggccgcgccaccgtcacctctcggcctcgcgcgccgcgtatccggcgccggcgccgccaccccggccgcggcgtggtcctcttcctgccgctccaggcgcctccgccctcgtctccttccttcaaagaggtggagtggagtggtgaggatgggagcggccgtgggaggggagcaggagggcgaggacgaggaggtgaagctggccaaggagatggccgccgcccggaggcgatgggagactctgattagggagcagaagatcaagactcttacacccagggaagctggctatacattcaagctcactgacaaggtcctccttgatgttaggccctcgaatgagcgtcaaaaggcctgggtgaaaggctctacctggattcctgtatttgatgtggatacatcgtttgatttgggtggcgccggcaagaaattcaccaactatgtgatgggtggctggtggagtggcagctcaacaatgacagttaacaagaactttgtacaacaagttgaggagaagttttctaaagatacagatatcatagtagtttgccagaagggactgagatcattggccgcttgtgagcaactctatggtgctggtttccaaaatttattctgggtacaaggaggactggaagcagctgaagaggag

SEQ ID NO: 96766 - DNA, 2227 bp, Oryza sativa
  Clone ID: PAT_MRT4530_94832C.1
tcggcgtccggtctcgccgtcgcctcgcaccggcggcgagaatggcgaagaagaacaaggagcccgcgtccgacgacgccgcggccatccgcaccctcttctccgcagacaaccccttccgccgcaagccctccgacgaccagcccgctccaccggcgcccaccgccgcggcgccccgaggcaagcaccccgaacccgaggtcgctgagccgtccgcgaagtcgcgcagggatgagccccggcgcaagaggaagcgggacgaggtcgaggccggccacgagcggcggaggctcggcggcgcacccgcgcctcctcttccggtcgtcggggagaagaggaaggtgcccgaagaggtggctgcggcggcgggggcagggcaagaggaggaggaggcgttcgacgacgagagcaagctgctgaggacggtcttcgtggggaacctgccgctcaagaccaagaggaaggcgctcaccaaggagtttgcggcgttcggcgagatcgagtccgtcaggatacgctccgtgccactcaccgacaccaagattccaaggaaaggagccgtcataaaaggaaaaatcaatgattctgtcgacaatgtacatgcctatattgtgttcaaagatgagcagggtgcacgtgctgctttatctcataatatggccctgtttgatggcaatcatgtccgtgtcgatatggcatgtccacctcgtaagaaacttaaaggcgaaggacctctttatgacagaaagcggacagtttttgttggtaatcttccgtttgatataaaggatgaagaggtgtaccaaaagttctgtggttccagtggttcagaaggtgatgttgaagctatacgtgttgttcgagatccagatacaagtctaggaaagggtatcgcctatgttttgttcaagacaagggaggctgcaaacactgtcgtaagaaaacaggatttcaagattagagatcgccttctgaggcttgcacatgcaaaatcagctgatgcaacaccaaagaagacgacggatgctggcaaaacaaagggtggatcgaaacacaagacagctttaacaccaagcagcaaatcccatgaaggcagtgacaagaccaaacggaaggcgtcaactttgtcataccaaggccttagggcaagcaaatctggtgtggtgaagaaggcgaaggtgagccagcgtccaagttaccaggggaagcagcaaggcaggactagtgagacaggacatgatgctagttctcaaaaagccaagcgccctgctgttgcagcaaggaaggcaaagcaactagccaagaaacgcaagttggatgctcaaactcctgaaaatacacatcggagcaaaaaagcaaagaagtaaccatccttaacttgaagattgtcatcctgtctttgtacaagggggttgagtcagattttggacaaaatgagctcctgacattgttaaaccccatgcaagagtgatcttgaaatgcaaggctgatacaaattcgtagtactgtattacttaaattaaagtttgcgctcatgtatactgacattaatgttgttttttccctgtaacatcgtgcactgatatcattcattctgcttttgattgaaatatttgcattttagctttggttgctgcatatgtgccaaccttgtccagttgtcccctgtgagagcatcaatatgcttggacatgagctttattgcggctttggctgatgcggcggtgagcacgtgcagcttccagaagacctcctcggcggcgtgggtgctgttggcgtcgacggcgacggcgccgatgagggcgcggagggcgccgcaaacgacgggtggggcggtcggtttggtcccggcggcgacgcgcacgatcgaggggatgccgacgcgggccgcggccgcgacgcaggcggcctccccggacgcgtcgcgggcgcggcgggagacggcggaggcggaggcgtcgtggtcggccgcgagggcgcggagcgcggcggcggactgcgaggcggcgaggccgaggacggcgagcgcgcgtccgttctcgcgggagtaggaggcgtgcgtcatggcgcggcgcaggaggtccggggcatggaagcggtaggcgatctggttctggagcgtggcgagcgcggcgtcgaagggggatgaggaggacggcaaggcgtgcgagcgagaagaggggattgcgacgaggatgacgacgaggaggctgaggacgtgagccat

SEQ ID NO: 96767 - DNA, 478 bp, Oryza sativa
  Clone ID: PAT_MRT4530_94833C.1
gcattttaatgggggttacacagttattaactgttgtgtttattgagagatgataatatatgcatgtaaaacaatgcatggtatggtagggcaagagttgaataatggtgttaataattgttggtgcatttgaatgtgatatctgggttgactaaccagatacatggaaataaatcaggttatcgagtgaaaaagctaaacaggcattcaggtcatcattatgcaaaaaaaggaaaaaaagaaaaaatatatatagctattggtttgagtctatacttccaagtaagtaataagtagtgatctgagtcgcccattcatgctggttgtgaccaaacaatgcttctcagttcatttgtctttttgttgtacccctatttcacttgccaagatcgtttaaactaactttgaattgaggacaactgtgtgaccttgcccgggtcggtgaaaaatggtcatattagagaaaaaaaaaaaaaaa

SEQ ID NO: 96768 - DNA, 2646 bp, Oryza sativa
  Clone ID: PAT_MRT4530_94834C.1
ggtggtggtggtggtggtggtggtagtgagggcgtgatggacgacgacaaggcgagcaaggggaggccgctcaaatccccccgcaaggacctggacccgctggctgcggccacgcccgatcccgaatgcggcgagacggctccgccggaggtgagcaagcctaaggagaaggcggcggcgccgaccagcaacaccgaggaagggttatgcccccacttagaacgtttcgaggaagacatggcaatgttcgtatcaaggctcatggcctccaagttcaccccgagttgtcagcgtctcatgtgcgatagcaaggtggacaagagcagtatcatggtgtgcatcgactgcagcttgcctttttgcattggggacgggaccatgaacaagccgcagggacacgcccaggaacacgcccaattctacgctcatctggagaagcattgtgttgctgcgttgttcagtaaaccggatactctgtactgcttcatttgtgaacgttgtctgaacttggagatgagtgacatggaggcagaaagtgacagcagcagcgaccaagtgggatgcgaacactttgtattggatgaggaagaaatcactctgatcgtgtcagagatcttcgcctccaagaacgttccggcgtgccaacatcccgggtgtacgatcactgggaatacccatatcatggtttgcacaggatgcaacaagcatttctgcactagagctgaggccatgaaaaaaccgtatggacatgcccgtctgcatgcccagaagtgtgaacaccattgggttggtttgtggtacagtaatccatatatggggtactgcttcaaatgtgaattcgaattgatcctaggtgcaccgaatgctgagagggggatggtgtttggcaaggaggcatttgatcaagaatctggattagcaaagaggcatggctgtgttatcagagggattccgaatcttgggaacacttgctacgtgaatgcgttattgcagtgcctctttgtgcttgaaaaactgcgggcaaggatgttagcatcagatgctccttctgggttcgtgggtagcgcactaaaagagctctttcaggaggtaaacagtgttaataatgcacaacgcccactgaacccgacgaagttcttggatcgtgttcgtgttttgaatgcacaatttgtaggcagtgatatgcaagatagccatgaattgctttgctttgtactcaatgaattggataaggaggagaagtcaatggtgcctccagtatctcctacagttgttgattccatttttcgtgttcaactgtctgctaccatttcctgcagccattgctcatataattcagtttcccatgaagtaatgtatgagctctcagttccactgccatcaaggaacataagttgcatgtctcgagagaagattggtatcaaactattcccaaaggttgacatgagtaacaccgaaattgttcatgcaattgctgaaggacgtgattctcatatcactggtttagatctgggagatgtggacaaagaaaaaccatctgagcctttggaagttgattctgttgaagtggaacagcactcgcaaagcaaggatggtgtacatgttccttcccaaattcagaaggatgaggtcccaggggagattattcaggcgccaactaaggctgatgatttagggaaaaattacaatgctggtcttgagtatacgcccagtgagccagaagttagtatagaagccaagaaaaacgtttgctctgtagaaggttctgcagaagacaaggggaaagctcagtttagcaatatggcttatggcaaggcgaaggataacaactctcttgcatcgattgaggagtgcctagaactgcattttgaagctgagatggtggaatggaaatgtgagaactgttctgaaattgctcgccgtaggagcaccactagtggtaaagatagtgaacagatgatggcaagcaccagtgagaataaaatagttgatggagatcaaactgagcagtcggacaagatagcatgccaaagcgagcaatctagcaatttggacagtggtgaacaagacttggcctctgataacacagccaacaaaaaaaatgaatgccatgaaggtgttcaagaagttgtacctagctgccttgcagctgaggaactggccaaccagttgagtggccagggtcaaaatgccagctctctagatcaagtaaagctagatcatagtgcagaccaagtgggtccaaaccaaaaggagcgggaggataggtatcaaggtgggattcaaactcgttttattaacaagctgccacctgtgtttgccattcatctgaaaagatcccagctgactggtaaagttagaggacacgtgagctttgaggagatccttgatgtaggacagttcatggaccccagttctgaggacaaagacaattccagctatcaccttgtaggtgtcattgaacacattggccccagcaccagatcagggcacatggttgcttacgtgagaccgaatcaagagcaacctcacggtggcccttctccatggtattgtgcaagtgatacaaacatcagacaagtatctctagaagaagttctcaagtgcgaggcctcccttttcttctacgagaggattggaggctaa

SEQ ID NO: 96769 - DNA, 387 bp, Oryza sativa
  Clone ID: PAT_MRT4530_94835C.1
atggcgcgccttgctgctccggccatcgccctcgtcatggtcgcctactgcgccgcgctttgggcggccgagctcgtcggctcgactgcaagcatcttcctccccgactccggcgccgttgctctcctcctcaccgtcgccgtcctcttctttctcgccgtcgcacttctccagctccaggtggcggcaaccggcggcgatgatgatgacgcgcctagctcggtccgtgtgcagtgcagccgcaaccaccgtggaaacgtcgctgtgaggaggctcgccgtcgttatatatcttcacggctacggccggagcttacattattgccgtgctgtccatggccgtgtgcccgtgtacgtcttcttccttcaccacgaggttcatgcttga

SEQ ID NO: 96770 - DNA, 831 bp, Oryza sativa
  Clone ID: PAT_MRT4530_94836C.1
atggcgaccagccgccgcccaagcccccactccggcggcggcggtggttgtggacaaggacaagccggtgttcagcacgacgccggactccgagtctccgactacaatagagtatggacctctgaccggctcacaaacaggggatggcagaacaacgggcagcgccccctctataggggagaggatgaaacggcgtttcacctcgttgcggaatgtcgatattccaaaaggatttggagactggtagcggactgggttcagctcaatctctggcattgggagatgacccagacaatcaaagattggtgggaaatgctagccgcttcggcgggcatccccaagaaggggttacgcaccctgatcctccacattgtttgggaaatatggaataatcctccttgtccaatctcgagggggcagccgggagccggcggcaggcaaccggcagcggctgcaccagcacctcgtggcctactggctactgccgtcgcgcggagcagcggaaaacgggaagccgtgagccgcggagtcggcgccgatgcgtggcctctggacctggggattgcacgcgatttcggcgccgtgaggaggaggagatcagaagacgtgggcggcaggcggtggcaatcgcggcatggcgcgtgcgccggtgcgcgttctggtggcgcatctgttcgccttcgggcctacggccttccgtattgggctaggcctgagcctgaggacccggccctgctgcatgttaatgatttgttcatgtatgtagattattctaaaaaatgtaagaattttgagcttgtaacaaaccaaccaaccaaccattttctgtaa

SEQ ID NO: 96771 - DNA, 874 bp, Oryza sativa
  unsure (1)..(874): unsure at all n locations
  Clone ID: PAT_MRT4530_94837C.1
tcacccgctcgcctctcgcctcgcgctccngtccacctgttccnctcctcggcatcgactccgctccngccaccggancagcgcacgtgcctcctccctccacgtcgctccacgcagncttcagcctccctcgagagggctccncncagcctcctcccggcgcagcctccngcccntcgcagccagactccccctcgcgcgctcagcctagctcccgctcccgctccccgaagcacccctcagccgcaggctcgcagcgcgggccacccccgcgctgcgccttccttccctccccccccctcagtcccggctcccctcctcgcagctcgccctctcccgcgcgnggcgntttcggctccccccccgctcccanncaagtccgccccgttccaacacgccaactctccagccccccaagnccccacgcaccttntatagtctctccgcggntcaaaaacgccggcccgcccccgcgagaacttcagcccctgcggaanggctccccctccccctccaccctggggccaaaaaggcgggctcgcgcgcctcgcaaccccaagagcccggccccctttcaacgntcggttttggggggtcccctcccgcgagttctcgccacaantanagtttatttcntcggggccatttctccccttttcaagcccgnctttcgtgggccccttttccctcccccacacacgcaagcacccccacactacaaatctgcgttctcgcgtcgcaaaaattcgcaattcccaatttaatcgttcggtgtcccccaccgcggcgcccaagcaccggaatacccccacatcccccaaacccacccaagctcctgctcacaaaagagtntcaaccctaaccanaacctcca

SEQ ID NO: 96772 - DNA, 309 bp, Oryza sativa
  Clone ID: PAT_MRT4530_94838C.1
atgaccctcatcggtgataaggtttggctgcggcccgttaaaggtggagttgataatgatacttttaaaacaatgctgcgtgatattgaggacccaggttacaacaagagagactatgggaagtttatcaggatggtgggtaatttcgagacacctctgtatgccggatgtgtagtgaaacacacgaaattatctgcgatcttggatctgataaagtttaagacaagtaatgaacggaaagataaaagtttcacacaactgcttcgattgttaaaggacttgcttcccgtggagaacacgttgctctag

SEQ ID NO: 96773 - DNA, 343 bp, Oryza sativa
  unsure (1)..(343): unsure at all n locations
  Clone ID: PAT_MRT4530_94839C.1
tttttgtttttttttttttttttttttttttttttttttttttttttttttttttttttttttttttttggggctcttaaaggagcaaatatttttcaaacttgatgaaagggggacccaagccattatttatagggggggggccttttacaaactttaaaacccggataaaaaggaacccctcaaaagtcaaaaggtggctggggtttgggggcccaaaggaaccccccggcctttaccccccccaanatactcccccccaaaatttcaactttggaaaggctttggggggtgctcaaaaaccaaaaattttgggggggacctttttaacaatgccgggctg

SEQ ID NO: 96774 - DNA, 261 bp, Oryza sativa
  Clone ID: PAT_MRT4530_9483C.1
atggacattgcatcggatggtcaacacggggtttccccttctggagagcccattcacgaaggtcctgagaaacccattgagcccccaggcccgccctcgcacaatctccacgccgctgtgacagagaatgaaggcatcgccggcgacgtacatgacaaagtcaccagctctaaggacgatccttctcatactcgtccggtagaagaggatggaagctccggtcgtggtctatctgcttcatccaagaaggagctcccgtga

SEQ ID NO: 96775 - DNA, 579 bp, Oryza sativa
  Clone ID: PAT_MRT4530_94840C.1
tcagtttccttcccgtccccaccaccgcggcgccacccgtatgacctcacccgccgtcgtgtcaccgccctcggactcgacccttttctgagctgtctctcgcctccctctccctctccctcctctaggagagagttctctccttacttcctcctctcccctccaccatggctcgatccgtggcgtcctcctcctccatctccaccatgccgtcctcctccgcggcggcggcggccgccgccctaggtgacgtctccccgcgcccctccccgccctcctcgccgcttccgagcacgctctcattcgcttcctctcgtggctttcagaggccgtgcaggtcctcgtcacctccctcgccgacgaatcacccgtcgcccgggacgccgcgctcgccgccctccgcgagatcgcgccgatgtaaggggatcgcttccgccgcttccattcttccgcgtgaagcttaattttaatccgggtaaattcgttgcgtgttgcgttgtggttgcaggaacccgctgctcgtcctcgactgctgcgccaccgtctccagaggcggtcgtcgggtacgctcgtgcgcat

SEQ ID NO: 96776 - DNA, 212 bp, Oryza sativa
  Clone ID: PAT_MRT4530_94841C.1
taatagaggccacccgcgccaccgagcgggggcttttggacacaaagggctctagccccccgagccacaagcgcggcaccaacgacggcacagacaagggggagggcaagaagaaaggccccaaggacgggccggcgctcaaggaggccgcgactagcacacaggacgcatcacaagcgacgccccggacaagggccgctgcaaggaccgca

SEQ ID NO: 96777 - DNA, 231 bp, Oryza sativa
  Clone ID: PAT_MRT4530_94842C.1
atggcagtgcggagacgatgcggtgcggccgcgaggcagcatgccgacgaggcgcgcggccggcgacgagacaacacgatgatgagggggaccagcgacgaggcgagcgggagggagaccgacgccgtgtcgtgttgtggtgaggaggccacacaacgacgcagccgagcgagcgaggggagtggacgggaggttggctacggcgcgggtggcgcacaacgacgcggatga

SEQ ID NO: 96778 - DNA, 320 bp, Oryza sativa
  Clone ID: PAT_MRT4530_94843C.1
ggaaggaagcctcaaaggagggagggccgccgaacaatgtggttgaggacaatccaaggaaaagggtggagactaagagggagctggacaaaagataagtggtagaggggggaatcctacagctagaagaacatcaaccgtgtcaacagggaaggctgcaagaatagtagccattcaagccaaagaaaaccgtaggcactaacataaaagacctgacctaatccatcaatcaaggagcatgctaaaaggagatctagagagagggagaggcactgtcaaatcctaattgatggatcagagccaagcatgttatggccagg

SEQ ID NO: 96779 - DNA, 237 bp, Oryza sativa
  Clone ID: PAT_MRT4530_94844C.1
gtaggcttctcctccccctctttaccttatcctcctcggttcggatccgtggatccgctaaggatcagcgtgatgagatggcggcgccggatgtcgagtaccgctcgcttctcggcgacctctcctgtgccatcgactacctctacctcgaggccgacttctacacctacgagcacattctcgactacaagatcatcaccgactgggagacggaaaggccacgtgggtttggctaaa

SEQ ID NO: 96780 - DNA, 987 bp, Oryza sativa
  Clone ID: PAT_MRT4530_94845C.1
atgggtttctggcgccggtgcacaccgtcgacatcggcctgtgcaggcgtctgtgtcgtcgccctcctccttgtggctttggcttgctgcccgacgcgcgcacgcggcgctgccccggcggtgtacgtacttggcgactcgcaggcggacgtcgggaacaacaactacctgccagcgacgctgccgatgtacaaggccaactaccctcacaacggcgtcgactacccggggggcaagcccaccggcaggttcagcaacggctacaacttcgtcgactaccttgctgacagtctcggggtggccagccctcctccatacctctctataagcaacacctcggtatacctgaggggtgtcaacttttcttcaggaggatcaggggtgtctaatctcacaaacatgggtcagtgcatcagcttcgacgagcagatagatcagcactactccactgttcatgcaacactggtggagcagctcggcccgcgtcaggcctcgacccaccttgccgaatcgctcttcagcgtcgccatcggcggcaacgatataatcaatcgcgtcctgctgagccagctcgtgggcacccaagaccaattcatcagctcactggccaactccctgaaacgccagctgcagaggatgtatgacctcgggacgcgaaggcttttatttgtgggcgcggcgccactggggtgttgcctgatgctgcgggagcagagccccaccaaggaatgccacgcggaggccaattacctatcagctcggtacaacaacgccgtcaccatgctcctccgcgacatgagcgcgatgcacccgggcatgagctacgccttcttcgacacgtacaccgcgttgctgcagtacatccggcagccagaggcatatgaaaagcccacaaaagatcttgaaatttttctactgtcagattgctttagtgcacacccacttaaacctaacccacccttcctcttcctctcagcacagccatga

SEQ ID NO: 96781 - DNA, 1399 bp, Oryza sativa
  Clone ID: PAT_MRT4530_94846C.1
gcacgaggcatgtcctctatcagcccagcccgtctaaaaagcaacccaaccgtagtctctctctctcgcccgaatccccctccttcttctgtctcctgcagccgccgccgccgccgccgctagccacgcgcatcgctccgatcagccggaggtcgccgtcgctgggaccgccggtatccaatccccgccgctagatccgatccactccccgccgccggtagccgggtcggcggcagggatggcgtgttcgctgttgctgaccatcctccccgaggagcttgtggtggagatcctaatccgcctcaccgacctcgccgacctcgcccgcgccgcctccgcctgcaagcccctccgccgcctcatcacctcccgcgccttcctcgcccgcctccacgcgctccacgccaagcccctcctcggactcctcctgctggagagagaccgctgcggcttcctccccgccgctaccgccgtcgccgccgccgtcgcccgcgcgtccgacttcgccttctccttcctccccgaccacgccgccgggtggcgcctccgcgacgtccgccacggcctcgccctcctatcatcatcatcatcgtcatcatacctctcccccctcggcgaccgcggcttcttccccgacgtcgtcgtctgcgaccccatgcgccggcgacacgtgcgggttccccctatccccgacgacctcacggccggcgtccggcggatcgccgtcgagcacttcgactacctgctcgctcccgccggccgagacggctcgtcgttccgggtggtgtgcaggcccaagctgccgaagcagtgcgacgtcaccgtcttcgtcttctcctcaggcgccgcgttctggcgagccgccgtgctggacgcctgcgccgccaccgagaagttgttcctcccccaatccgtgcacggctacgtctactggcggacgcattcctccggcacattgctcatgctggacactcgcgacatggatttcttctttgttaacattcagaccaacaagtgtgtcattggggaggcagaggaagtaggcaggcttgcggtgttcaacaccattgttgatgttggtgtccacaaggtggagatcctctccaaggcaattaggggcggtgccgacgaaccgtggcggcacgacaggactatcccattgctccctggttacaaatggagggctgcaagaatggctgaggggtacttactcctacatgggattgtaggtaacaactcctggtctactcctggtattcagctacagcatttcacactggacctcaagacgcttaagcttgagagtctgtgtgactcgatatcccgaggaaggcatcatcatcctcaattcgacttgtacagaagcttcccgccaccattatcgctttcaagcatatga

SEQ ID NO: 96782 - DNA, 243 bp, Oryza sativa
  Clone ID: PAT_MRT4530_94847C.1
gggttggtcttgtcctctacaggccctcctccacgtccaactcggggtagaaactaaaggaaacccaaaacatgccttcctgagcaaggaaacctcgaaacctgacgaaacacagtcggactcggacctgccggtcagactggccacactccgccggtctgactggccctcaaccggcggtctgaccgcccaacacacggcagtcagaccggcccactcggaggaaaccggtagacttctaaa

SEQ ID NO: 96783 - DNA, 347 bp, Oryza sativa
  Clone ID: PAT_MRT4530_94848C.1
aatcacaatttgggttttctgttaatctgggggtccaaattacacacctcagtattcagaaaaaaaggggggggcacccattcaagggggacttgctgaacaggggaaaaagaccgaactgcaaatacccaacccgggtagcagatccagagggccaaaggggcacatgaaggcagatattccatagcaaaaaaaccgggggctatcctaactctaaatctctaaacatttatggcccggatttctaacacctggggggcctgcccaaaacaacaatttcctccgctaaagctttttcccttacaaagggtggctgggaagtaatttaagggtaggacaaaaaacac

SEQ ID NO: 96784 - DNA, 288 bp, Oryza sativa
  Clone ID: PAT_MRT4530_94849C.1
ctttccagggaaccgagaggaggtagagaatggcgccggtgctctggtggctgggagacgacgatgccggcggcggagtatgttcccgagtgcggcgcaacaagggagggtggtagaggaacggcacggcaaggcatcgacgctttggactgcggcgacggcggctcaaaccacggcgacgacagtggccgcctcctgctcgcgctccacgccgccggcctcgcgctccctcccttgccgtcgacaacctcgccggcggctgctccctgctatttttttgtgtgtgtg

SEQ ID NO: 96785 - DNA, 7017 bp, Oryza sativa
  Clone ID: PAT_MRT4530_9484C.1
atggcgaggagagccgagggagcaacctcggtggccggtagcgggagcgcgtgggtggcggtggtcgtcgcgcacaaccgacgtgagcgcacggccgagctgtgtcagaaaccacggtacacctcccgtctgcaacttcaagttgaagatatggagaagcagaacgtggacttcggcaagcttctgatggagattcaagagtccctggtgttgctgaatcgagcacaaggtgagactcaagcggccgtcgtcaagctggatcaagacacgaacaattggaggccacaagtggaggcagccgtgcaggaatcgcgggaggaagtcggcgaactccgtgtgcaactggatctggaaaggaaagcaccgttgctgcctacgccgccatcttcttctcaagttgctgcggcggaaggcggaagcaaatgggcgaatagccgtctgcaatctcatgaacaccggggaagggtactagggatggcaacaaccctaggcccaactccggtcaagggtacgtacgaatttccctccacatcgatgaaaaaatttgatcaatctgagtttggaaatggggaatgtgatggggatcaatttgggcgtcagtacaaccatagagttccaaagctagatttccctaaattcgatggtacagatccagtggattggaagatgaggatagccaccatttacttttctgggagggcctcatcttggttacgttcctctaaggctcatgttaggtacccgaattgggagcacttttgtattgctgtgtcaaataagtttgatagagatcttcatgagatgctcattagacaaatggataacattaaacaagtaggcccgggactacgtcgagaaatcagaaatgcagtacttcttcaacggccaaaggatttggaggcagcattggcaattgcttctttacaggaagaagtgattctagaatcagcttcaaatctgaagaagagtgacaatgggttgcaggttcggccacatccagctttcaagggtgctttacctctacctttgccaccaaaccgggtgttgaatagtggtagtttaactcgagcagatgaccgcaaggctagtatggaggagtctgataatcagggtctgatggcaatctcagttcaggcagtgcatggatctgaagctgtgggttatatgagaatagtatttgatcactcaattcctctgattcctggggcaatgccagtaaatgtcagaccttatcgatatactccagctcagaaggatgaaatcgagtcacaggttcaggagatgttgaacaaaggcattattcagcctagttccagtcctttctcttctcctgttcttttggttaagaagaaggatggaacttggagattttgtgtggattatcgacatctcaatgctataacggtgaaaaacaagtacccattgccaattattgatgaattgcttgatgaattatcaggagcaaggtggttcactaaattggatttaagggttggctgtcatcaaattcggatgcaggctatggatgaacataaaacagcatttaagactcaccatgggcattttgagtttagagtaatgccttttggccttacaagtgcaccagcaacttttcaaggctgcatgaatagtatactgtcgcccttattaaggaagtttgtgcttgtttttgtcaatgatatattgatctacaacagaaccttatctgaccacgttcagcatctgcaatctgtgtttcagatcttaacagaacatcacctgaaggttaagagaagtaaatgttcatttgcacaacaaaggttggcctatctaggtcatgttattagtccaaatggggtgtcaacagatgaagataagatattggtggtcaagaattggccaactcccaccaatgtgaaggaattgcgtggatttttgggattaactggttattaccgcaaatttgttcgatactatggtgtgttgagtaaacctttgacaaatctgttgaggaagggacaatcttacatttggactgcaactactgaacaagcttttcagtctcttaaacaagctttaatgacaaccccagtgctggcgatgccagattttaccgaaccatttgtggtggaaaccgatgcttcagataagggaattggtgccattttaatgcagaaacaacatcccattgcatttttgagtcgagccctaggtcctcgtcatcaaggattatcgacatatgaaaaggaaagtttggctattattctggcaattgatcattggcatccttaccttcaacactctgagtttttcattcatactgatcatcggagcttatgttttctggatgaccaacgtttgactactccttggcaacacaaggctttaacaaaactgcttggacttcgttacaagattatttataagaagggcagtgagaatggtgcaaccgatgctctatcacgatttccttctgtttcagagttaacagcgatatcttctatggttccagattggattcaggaaatcattgcaggatatgccaatgattctgatgctttgagtaaacttcaaaccttgtgcattagtgcaaatgttgtgcctgattttactctgaaggaatgtgttctttattttaagggcagaatgtggattggtactaattcttttgttcaacagaaaattttagcaaatcttcactcttcaccagttggggggcattctggcattactataacctatcagcgcgtaaaatccttatttgcttcgccccatttgcgcacaatagtggttcagtttgccaatgcctgttcaatctgtcagcgagctaagtctgaacatgtcaaatatccaggattattacagactttgccagttcctgagcatgcctggcaatttgtatcattgaatttcattgaagggttgcccaaatctgctactttcaattgtattttggtggttatcgataagttctctaaatatagtcattttgtgcctcttgctcatccctttactgccttcgatgtggctgaagcttatatgcagaacatccataagctacatggattgcctcaatcccttatttccaaccgtgacagaatctttacaagcactctttggactaccttgtttcgactggctggcactcaattgcgtatgagttcatcgtatcatccgatgggcaaacggaaaggatggttggctttggctgagtattggtacaacacatcctttcactcagccttgggaactactccttttgaagtgctatatggtcgcaaacccaaatattttggtttatctgttaatgctctctgtcagtcaccagagttgtcggattggctacaggaacgagataagatgcagaatttgattcgtgatcatttgttaagggctcaagctcgcatgaaggtcccagctgataaacaccgttctgaacgatcttttgtagttggtgattgggtttatctcaagttgcagccattcacacagcagtcggtggttactcgggctaattgcaaattggcatttcgcttttatggaccctatcagattctggatcgtattggagctgtggcttacaaattggccttacctgctaccagtttgatccacccagttatttatgtatctcaacttaagaaggccttagcacctactgaatttgttcaatcacagttgccaattttgcagtctaaagatgagggtctgacagctgttccttctcaagtgttggatcgccgttttgtgcggaaaggatccaagatggtggagcagttgcaagttcgatggtctggtaatgatccacaggtcatcacttgggaaaatggccaggaattgcgtcgacgttttccgcattctgaagcttggggacaagcttcgtctcaaggtggggggaatgtcacggtggcgacctcacctgacgacaatgcaggacaagcaacagaggctcagttgggaagtcggtccagcggcatcgccatcgacgaaacgaccgacatcgataacagcgaaaccatcaacccgggcatcaagtgcgactgctcctacgacaacacgaccgtctgccacatcaccaagctgagggtgtacgcgttggatgttgtcggtccgatacctgcagaactggagaatctcacctatctagctaacttgaatttacagcaaaattatttgacaggatctttaccggcatttattggagaaatgacggcattgcagtatcttttggtgggaatcaatgcgttaactggaattttaccaagggagcttggcaatctcaacaatctccttgcgttgggcattagcacaaataagtttgtcggtccacttcctgaagtactagaaaacatgaccaagcttgaggaactatatatcgatagttgtggtctaagcggggagctaccatcagccttgtctaaacttagaaaactgaagatcttatgggcatccgacaatgatttcactgggagaatacctgattatattgggagcttatcagatttgacagagttgaggattcaaggaaacaattttgatggtcccatccctacaagtttttctaatctcgtcaatttgacatctttgcgaataggcgatttagtgagtgggagttcttcattggcttttatgtcaaacatgacatccttgattgttctaacactgaggaattgcaggatatctgacaaccttgcttcagtggacttctcaaaatttgtaggactttattacttatttcttggaaacaacagcctctctgggagcttgccagacacaaagggtgctagccttaaagttctagatttctcctacaacgagctctctggaaagttcccttcttgtattttgtcatcaggtctaaattgcctacagcgaaatactccatgtttacctgcttctccagatgattcctcatttgcagttgactccggtggtactagacccattataggctcagataaatcttattacgaacccgacgacacgaatttaggagaggcatcatactatgtttcgaactcaacaagatggggtattagcaacacggggaaattcatggaagccgctaattttagcttcatagtatacacttcacgccagtttacaaacacgcttgatagtgtactattccagacagccagaacgtcatcctcttcattgagatactatggcattggactaaagaatggattttacaacgtcgagcttcaatttgcagagatcttctttccagacaacacgacatggacaagcttgggaacaaggattttcgacatatttattcagggagaactcagagaaaaggatttcgatataaagaaacaaacaaatggaaaatcttatactgttgttttgaggcagtatgttgttagagttacagaaaatttcatggagattcaccttttctgggctggaaaaggaacttgttgcattcctagacagggatcctacgggccattaatctcagcattaagtgtatctccttatggtggcaacaataaggttgatcctggtcctattaaaaacagtgctggtagacattgcgaaaatgtgtcacggcttaaagacaccttaagaaataggggtaagctatatgatggaagaatggtagctgtgaagcaattatctccaacatctcatcaagggaaacgggagttcatgacagaaatttcaactatatccaccgttcaacaccgaaacctcgtgaagttgtatggttgttgcattgagagcaaagcaccacttctggtctatgaattcctagaaaatgggagccttgatcaaactatctttgctactggcaagacaaatatgaacctagattggagaacccgcttcgacatatgcgtaggcatcgcaagaggcctagcatatctccatgaggagtccagcacaaggatagttcacagggacatcaaaaccagcaatgtcttgcttgatggtgatctcaatccaaaaatctctgactttgggctagctaggcattatgaggacaacatgactcaccttagcacaggagtagctggcacgcttggttatctagcacccgagtatgccatgatgggccacttgacagagaaggctgatgtcttcgcttatggtgttgtggcaatggagattattgcaggaaggccaaactttgatgagagcctcgaggatgataagaagtatctgcttggatgggcttggcggctacatgagcgaagtcagactcttgaaatgttggaccctaaacttgcaagatttgacgaggaagaggttgtgcgtgtcatcaacatcattctcctttgcaccgtgggcctgcctgagcaacgcccaccgatgtcaaaagtcgtctccatgcttactgaagataccgagatgagtgaggtggatatgagtatgtggcctagctatgtgcctcagtggcagaggaagagtggaagtgatagtttcttcacgtcatcgatgcagcaatcttcaggcaccgaatctagtgtgccatcaagctcaggaaacaacacaaaatcccaaggggaaaccttcccacttgttttgtcggctaattctatcagtgagtttgctgagggaaggtcacaacagttctacattgtttgcaacaattgcacctcagttaaatgggggaggagtaacacggtgaagccacgctcgctgcaagacttgcacacccacttggaggaggccgctgaggtgggtttccatgtcgatgggcgccatagcacacacctttgtcacgaagcaacaggaataggtgtcatttgccgtaacggccatggcaccggtggtggtgtgggagtcggagtcactgacgcactcaacggcttggacgggtgtggcatggaggataatgtggttgaggatggcgtagagccccgtcgcaacaacctcgttgctccatgcaaacccaccacacgcttggttcttgggttgtcgcttgctggtactactcctctagctcggttgcatggcgccgagtgggctctagctcaacctcctcctcccgtcgccaccgatgatgtcttgtgcactcgcacctag

SEQ ID NO: 96786 - DNA, 360 bp, Oryza sativa
  Clone ID: PAT_MRT4530_94850C.1
atgaaggggttcgacgccaccaatgggttcggcttcatcactcccgacaacggcggtgaggacctcttcgtccaccggtcctccctcaagttcgacagctatcggagcctcaatgacggtgatgtcatcgagttatccatcggatccggcgacgacggccgcactaaggccgtggacatcaccgcgctaggcggcggcgcgcacaccggtggatcccgtcccagctgcggccagatccctacggctgcaagccgccgtctctcgacgtcccctcgttgtctcctggcccttgatgtgttgctgcttcctgctccgcgtcgatcgccaccactcgtcatcccctcgtcgtctcccggctag

SEQ ID NO: 96787 - DNA, 345 bp, Oryza sativa
  Clone ID: PAT_MRT4530_94851C.1
atgacacacggatatgctttcgctgcggttgaccgaacacttcgcgacattaggagaacttctgcaaatgacactggttcaaatccgcatcacagactagaaatagctgaaacgcttgagaatcctgaagattggtttaatgctgaggaaattccaaccgtatcacttagtggttctgtatattattacgagattccgcaagcattacttgaaagaggaagtgcgccactaagactgattgcttttctagcacagatgaagttcgtaccagtgcatgctgtcgcagagctaagaatcaagtcactcaggaaagctaatccatggggaatagaaatccccgtctga

SEQ ID NO: 96788 - DNA, 359 bp, Oryza sativa
  Clone ID: PAT_MRT4530_94852C.1
cccacaaaaccaaggggtttattcaacttttaaacgagtacaaacgtacacaagcctataaagtataaactcgaaatttctaagtttttttttcctttcgctgaacgggagcggggctttttttatacacaagcagcacacggccacgagggagctggagcggaaaaagaaccacctaaatcacaacccctgaaccggaggcgtccgggagtccgtcctgggggttaaaatcgagccagggcttattcacgtaaaaaaaccacaccacaaactaggggggaggagcaggggtgagtaaaccatgtccaaacgactcaaatcattgggagtcgtccaaagattcatccgtgggctgccag

SEQ ID NO: 96789 - DNA, 1525 bp, Oryza sativa
  Clone ID: PAT_MRT4530_94853C.1
gaactagtggatccccgggctgcaggcgatgacgacgacgacggcgacggcagcaacggcatccccaccaccacccccatctccgtgttcctcccctccccgcgtctcaacccaccggaaatccattcaaaagcacccgcgctcccgcaccaatccaccgcacgccatggcgtcgcgagcggcggccgcgatggtgctcgccggtgcccttcctgtgtttcccggccgtcccctggtcgcagccggcgccaggtgctgcgacggcggcattcgcgggagggtctcctgctcctcccaccgtcgctcggaccatccctcctgcgcggctgaggagggaggagtggtggagctgctcaagggcgcggtcgcggcgctcgccgtcatcgcccagatttccgtgtcgctcccggcggacgcgatcctctactcgccggacacgaacgtgccgaggacgggggagctggcgctgaggagggccatccccgcgaacccaaacatgaagaccatacaggaatcgctggaggacatttcgtatttgctgaggataccgcagaggaagccgtatggctccatggaaggagacgtaaaaaaggccatgaagatagcaatggacaacaaggatgcgatcttggcaagtatacctgtagaactcaaggaaaagggctcgaagttatatacctccttgcttgaagagaagggtggtttgcaaactctcttgaaatatataaaggaaaatgatcctgacagactttcggttgcacttgcttcttctcttgatactgttgctgaattggagctgttacaggaggatgattatactccggcgatgatcggattacttaaagggggaaatttctttcaacaggctccaggtttatccttcctcttaccacaacaatatttggaatatccaaggctagcaggaagaggagttgttgaattctcagtggagaaaggtgatggttcaacattctttccaactgctggtggtgaaccaaaaagtgttgctacaattcaggtagtgattgatggatattctgccccactgactgctggaaactttgcgaaattggtgttggatggggcatatgatgggataaaactgaaatgtgcaagtcaggcaattattgcagacaacgagaatggaaagaaaggttacactgttccattagaggtcatgcctgctgggcagtttgaaccgttatacagaactccgctaagtattcaggatggagaattgccagtccttccgatgtctgtatatggtgccgttgctatggcccatagtgtggattctgatgaatactcgtcaccaagccaattcttcttctatctgtatgacaagagaaattctggtttaggaggaatatcttttgatgaagggcaattctcagtattcgggtataccacagatggaagagaagttctgtcgcagattaaaactggagatataattcgttctgccaagcttgtacaaggtagagagcgccttgtactgcctccagaagcgccggcagagagctga

SEQ ID NO: 96790 - DNA, 410 bp, Oryza sativa
  Clone ID: PAT_MRT4530_94854C.1
aattgtttgcaaattgtactagcatagctaaagcctgaaagactaaatgctcatatgcaattttgtggaattaatgtaaaggaacactactgttttaggacacccttctcacttatgttttgttcagactagtttggtcttggtctggttaatactgagaatacataaatgtatttttacatgttaatctaatcaacacgaagcacccttttttcgtctaacttttggctagtaaatctagggctgtcaactgcatacttgattagttctgttcatgatttttgtagtctgtacgattggggcaccatgtcgtgtgcctaggttctggttgtagattattcccctacgatctcattcttggctccagctctgtcttccatccttatctcttggtcccaatctcccgtgac

SEQ ID NO: 96791 - DNA, 242 bp, Oryza sativa
  Clone ID: PAT_MRT4530_94855C.1
gaactcacaggaatcaaccatataaaaaataaactcaaacggacgaaatatgtggcatgtggaattttctaaagctataccgaaaaacttctctcctcaaaaacacaatcttgcaagcggaatttggaggttttaatattgctgaactcggatgtaactttttctgtaaatgtccgtgcatatattatttgcctgattccgagtccagaaacaggaatggaggcgggtgagggggggcggtg

SEQ ID NO: 96792 - DNA, 1034 bp, Oryza sativa
  Clone ID: PAT_MRT4530_94856C.1
aatctcttcagtaatatctttacgaatagtattaagatcaccaaaaacatgactagttctagatcgcgagcggccccctttttttttttttttttaaagaaaattacacacgggagacaatatatagacattcatcttgaacactagtattacatgactgtgaatgccagacggtggcatcaacgaagtagaaatgggttctttccaaaaaaattacagtgcagaggacatcagccgccaagattcttcaaatctcctgccaccggagccagtcgttatttgcggcgcgctcatcccaagtcgacatctctgcatcacccctgcccttcatgttggccgccggcgacgagcgttgacgatggccgtgtcgaggatgacgatcagttgatattcggaacaatttcttaatatcagccgccgggccatggtcacagtatgatccacaaaaccttagaactttcatgcagtccttctctacttcatacaccaaccgcttcagggcagggcgttgacctccatcaacggcagcttccggaaatttggtccaactcttcaaagcgagggaacagtgggggcggccgccagcatgacctgcatggcgaggaagcggtcagggcagcggctgtcgtcggcaaggagcagtcggggcgctggttgcatccccactcatcccgtcgccggttcatgggtggacgcccatcctccctctagctggagaggggatcctctgtgacatcgccactgccggccgagtagttgacgaagcagaggcagagcgaaggacgacgccgacgctactagatccggcacccacgcgcctcggcatcaccggatccaccgcccgaacctcctcgtctccgagccgtcgctggatccgccttgccgccactcctcctcatccctgaactgccgctgccgctgccgaagccgcacgccgatacgggcacgactcgacggcggcggcgcggcggcgcggggggaggggaacggcagatccgtaaaaagtggagagaaaggggaaagtgcccggccgg

SEQ ID NO: 96793 - DNA, 490 bp, Oryza sativa
  Clone ID: PAT_MRT4530_94857C.1
tattggccactcctcttcaattctcacgcactctccgctccagtgacacacacacacacgaccgctcgctcgtttgccttgctgctgccttagcgagaaaccgggagttagcgagcgagccgtcgtcgccggcgatgaggcaacaacaagcgggaggagttggcgacggggtgagcccgggcaatgtccccgtgtgctactacgggcccgggggccgcgtgccgtcgtcgctggagcggcgggcgcgcgccgccgaggtgctcctgcgctgcgccgcctgcggcctcgccgtgctcgccgccgcgctgctcggcgccgaccgccagacccgcgtcttcttctccatccagaaggtcgcccggtacaccgacatgcagtccctcgtgctcttggtgatagcaaatgggatggctgcgtgttatagcctaatccagtgtgcaagatgcttggtgagcatagtgagaggtggtgtcctttctaagaggccctt

SEQ ID NO: 96794 - DNA, 261 bp, Oryza sativa
  Clone ID: PAT_MRT4530_94858C.1
atgacgagaagggctggccgcccctccccacccttctccctctccgcgctcgctgggtggctgacaagggagctccaggaggaaagaaggatagccaggagggagagaggagaaggaggtgccgacgcgccatggagattgagtggggtgccacattactgtcacgtaggacgaagactaagtcaaagcaacaaagtaggcgtcatgtcagccaaaaccgtcatccaaatcaccgagggacttcgtctgcaccggttttga

SEQ ID NO: 96795 - DNA, 2822 bp, Oryza sativa
  Clone ID: PAT_MRT4530_94859C.1
atgatcaaggtaagcagagatttcatccgaagtaattctaataaataccgctccccgagttattccttgtcacctagaagggaacaacgttggtattctatacagtccaactgtcggggttaatctcgtctcggagtcatttgcattcgcttacctgggcaataaagctataaccctagcaaacaaattcttcaagcacccgaatggaactatcattgaaggatttgggattgtgcaagacgtacctgtctgctttgaaatccaagattttgacattctaattgggcctccaattgagcaactcctcataaatacacctcgattggacagcctcaagataactttgggagggaacgaattctcagttccattctcacgggcaaggatcaccttgaccgacactctcccagagaacgagtttgcagaggaggttatggcagttccccctcacgagtctcccgagacccttctggaaaatgaagtccccaacttcatcaaacaagaaccggagcccggtgagactgacgaacttccaatcatggaactgccgcctcgacctccacttgagcttaaacctctacctgaaggcctatgctatgctttcttgcacaatgacaaagaagcccctatcatcataagttacaagctttctgaagaggagactcaacgtcttctgtctgtgttagaaaagcatcgcgctgttcttggctattccctctagggtctcagagggattaatcccgcactttgcactcatcgtatccctattaagcccgagagcactccctccaaggaacctcaacgacggctcaataatgcgatgcgtgaagtcataaagaaagaggttctgaaactcctgcatgctgcgattatttatcccgtttcatatagtgagtgggttagcccggtccaggttgtgccgaaaaagggaggaatgacggtcgttgcaaatgctcgaaatgaacttatcccgcaacgaacagtaaccggatggaggatgtgcatagattgcaggaagcttaacaaggcagaaaaaaaagatcattttccgctacccttcattgacgaaatgttggaacggctagcgaatcattctttttctctgtttcctggatgggtattccgggtatcgtcaaattcccatccatccggaggaccagaccaagactacgttcacatgtccgtacgacacctatgcttatcgtaggatgtccttcggactgcgcaatgctcccgcatcttttcaaagatgtatgatgtccattttttcaaacataatcgaggacattatggaagtattcatggacgacttttccgtctatggaaagaccttcggtcattgtctactaaatttggacaaagtctttcaacgatgccaagaaaaagacctgtttagatcttacttggtgggagcaaaggtgataatctacactgatcatgttactctgaaatacctgctcactaagaaagatgctaaagcacgtcccttgagatggattttgctgctccaagaatttaacttagaaattaaggataaaaagggagtagaaaattccgtagcagatcatttgtctaggctgcagattactggcacacaggaacaaccaataaatgatttctcgagagatgacatgctgatgacggtgcgcgactccatcccgtggtatgccaacatagtgaactacatggtatcaaagtacataccaccgggagaaaatcaaaggaagctgaaatatgtgagccgccatcatatatgggatgagccatacctatacggggtctgctctgatggactgttaagaagatgtgtgccaactgaagagggacttaagatcatagaatgatgccatgcctcgccttatggtggacattatggtgcattccacacccaggcaaagatttagcaatgtgatttcttctagctgacgatgtacaaagattcaaaggaactcgtcagaagatgcccaagctgccagaggcaaggaggaatcactgctcgcgatgcaatgcccctcacatacaacctacaagtcgagatatttgatgtttggggtattgactttatgggaccctttcccaagtcccgtaattgcgagtatattgtggtgatagtcgactatgtctcgatggtcataagtgacggaggttcgcactttatcgacaaaaccattcgagacctcctgggagacatcgcagccaaacacaacgtggccacaccttaccatccacagatcagcggtcaagcagaaacatcgaaccaacaaatcaagaacattctgtaaaagacggtcaacaaaatgggaacaggatggaaggagaaattgccagacgcactgtgggcataccagacagcatacaagacacccattggaatgtccccctatcagatcgtctaccggaagtcatgctgactccccgtagagcttgagcgtagagcatactgggccatcaggaattggaacatggattttgagggagtaggagaatggagaaaaatgcagttagcagaactagaagagtggagagaaaaagcatatcacaactccaagatctagaaagaaaggatgaagcgctgccatgatgaaaggataaaaattaagaaattcaagccaggaggcaaggtactgatgttcaactccagggttaagctgttcggccatggaaaatgacgaagcaaatgggaaggaccgttcaatgtcatcaacactgcttcgcacggagcaatcacacttcgtgatgactcaggtaacatatttatggtacatcgactgtatcaaagctcagaacaccttcttcctcctccagagaaaagctatacttca

SEQ ID NO: 96796 - DNA, 493 bp, Oryza sativa
  Clone ID: PAT_MRT4530_9485C.1
cttgagagtaaagttaacaggggattgagtttaaatacggacgcattcatgcctacgaattcatattattcgcgtccaaacgtgaatcaacagctaatccgtatactggggatccgtggcgactcactaatgacagacgctcccagatggtcgtagatcacggcactagcgcgaaacaacgattgccataagaggaccattggtacacaagcactcatgttgaccgtggtttttgccaactgacggcgtcatgaatcatcagactggcactttcatctggcagaactaacacatccaatatacgctcaccaacatgccgacagggtccacaggctatttgcgcctccaataatagtgggggcatgatatgattcaaccaaggaccgtcctgattattccaacaagttgagctgtcaagagggatccatcttatctagcaacatggaaagaccctgtggcagggctggcaaatctgacctggaatctgaaagac

SEQ ID NO: 96797 - DNA, 432 bp, Oryza sativa
  Clone ID: PAT_MRT4530_94860C.1
cccacgcgtccggttacctaattagcctacttagtgtatcatctgtacgtgacatgccacacttagctagccgactaccattcattgagaaactgatggctgctgcgcctaccttcttctccttctgctccgttaagccactgctccattcggcttcaccggtggccaggaatacttgccggaccagtcgcaaccgtggcttcttccgccctccaccggggatatatcccgggtgggagcctgcgtctcatgagctgttgcacgattttgacttgcaggaaagcctagtgaatgttcaagcgttattgcatcaacatccgaagagtagacgagccatgttgaccactgttgatcacctcaagcgcctctgcatcgatcattatttccaagacgagatcgacaatgtcatggatgcatgtgtggatctcgttc

SEQ ID NO: 96798 - DNA, 411 bp, Oryza sativa
  Clone ID: PAT_MRT4530_94861C.1
ccaccaaacatatcctacaattttataagaggggtttttttcccaccatcgatggatacccccataataaataactgaagggcaccctgccagatgataaaaataacttgtccatccccccaaaacacaagtaataaatgggccgtttttgagagaagaagaaaaaaaaaaaaatttttagatgtcaaaaccttttttgccgggaaacttgacctgaagggggctgacttttttgccaatcctggggaagttttggccgaccccttgcctgccgggtttaactttttccgggaagacccctccctgggggggggggtcctgcccctccccattggggaaaacccggaaaaactggtagtggatcttgtacttggggcggaccctggtcccaagggccaggcactgtttttt

SEQ ID NO: 96799 - DNA, 546 bp, Oryza sativa
  Clone ID: PAT_MRT4530_94862C.1
atggcggagaccatcgacgacaaggtcatctacttccaggcggtcaccggcatctccgaccacagcctctgcaccgagatcctcgctgcccacgactgggacctccagctcgtcgtctcctccatcaccgccaacccctcctcccttgacccggcccccatcgccgagggaggcggatttggtcacgccacacccgtctccgcctccgccttcgcagcagcagcccaggattgcgtggaaactgatgacgcttccattctatgtggtctctggtggggttgggctcatcgtcagttcgatctgtctcgttgcctgggttgccgaagccatagctggggaagcacggcgacgccaagcgcatcttcttctctagcgacagcgccagtggaggagtgggcagcactcggctatcagcggggttggccgcagcggaggaacaaaggaaggggggcctgtggaaggcatcgggaggaaagtggtgcaaggacgtgttgtgatcagagaagaccccattagagacaagctagcaaaggaggaggcccggat

SEQ ID NO: 96800 - DNA, 355 bp, Oryza sativa
  Clone ID: PAT_MRT4530_94863C.1
caaccaactttttttttgcttatgggggttttttttccatttacctttgtttttttttttttttttttttccctttcctgccgccccaaagggggggcttaaaataaatgggttggcacactgcctccctttttttcccaaggaccccatctttcaaccttttaaaaaccccgcgccctttttttcgcgggcccgccctttacccctcctccccccccgttaccccaaatataaaaggtcccccagcaaggaatcgccctgtctcccacggggtcattaggagcccccacaactgatgttcccgggggagggggccccaaaacatctctgcccaataatcactcgggatccccca

SEQ ID NO: 96801 - DNA, 338 bp, Oryza sativa
  Clone ID: PAT_MRT4530_94864C.1
tcgttgttcgtctagggcttagtgggttgagatggcggcgccggatgtcgagtaccgctggtctcgcggaggactcacctgggccaccgacgaccgcaaagggtagccatcttttacacctacggcaagatcctcgactccaagatcatcaacaacgggaagacggtgaggtcacgtgggtttggctttgtcaccttctcctccgagcagtcgatgcgcgacgccatccaaggcatgaacggcaaggagctcgacggtcgcaacattaccgtcaatgaggcccagtcccgccgctccggcggcggaagcggtggctacggcggcggcggtggcggcta

SEQ ID NO: 96802 - DNA, 1759 bp, Oryza sativa
  Clone ID: PAT_MRT4530_94865C.1
atgggagttgaagatcgtagttggatgtatagtggatggaatgataatggttgccattctgaagagtgggtgcgcaacacaaatgcttttgttgatcgtgcttttggcagagtacaaaatgcagaaaaatttggagtagagtgtccttgttcaagttgccgtaatagaattagaagaaagaaagaagtgatgagtatgcatctctgtcaaagaggattcatgcctgattacactagatggatcaagcatggagagcatcctgtgaggttgtttgaaccagaggagacttataacatagctgaccccctaggtgacatgctaggcaattttggtgatgcaatggatacagatttttcagaggacgaaccaacagcagatgccaaggcattctatgccatgttggctgcttcacaagagcaactccatagtttcactcaagtgtcacgcctaacagcggtcacacgcctgatgggaattaaatcacagcataatatatcttcagagtgcatgaataatttgcttagtctcattggtgatatattgccatcaggtcacaagatgccagccaacttgtatgagtgcaagaatcttcttagtggattaaaaatgccatatgtcaaaatagatgtttgcataaataactgcatgatatactacaaagaggatgcacttaaagaaaaatgtgatatttgtaatgaaaatcgttatgtagctattgaagaggaacataaagggagaaaacggaaaccagtgccacgcaaagttatgcgttatctgccatttataccacgattgcagcggatgtacatggaacccagaacagccaagcatatgcggtttcacaaggatggtactcgtgccaatcctaacatcatggtacacctatctgatggtgaagcatggaaacactttgatagacacaatccaaattttgcactagatgctagaaatgttcgtcttgcagtagctacagatggattcaatccatttggatttggggcccaatattcttgttggccagtttttattatacccttgaatttacccccagccctttgtatgaaggatgagaacatctttttaagcttagtgatcccagggccaaaccatcctggtaagaacttgaatgttttcatgcaccccttagttgatgagttcaagcaagcatggcaaggagtagtcacttatgatagttctgtgaagcagaattttaacatgagggcagcctaccatacttcaatccatgacggtccagcattggccatgttctctggatggtcaacacatggtggtttgtcatgtcaagaatgtatggcagatattcatacaacttggttacctaatgggcacaagtatagctggtttgattgtcatagaagattcctcccacccaatcatccatttagaggtcaaaggaatgcatttagtaaggatacagtaatgcatgacctccctccacgtagattgacaggggaagaggttgaagcttacattaagaatacatttgataattcctttgaaggttatgggactacacacaattggactcacatgccgatctggtgggagttgccatatttctcaacaattctagtacgccataacattgatgtcatgcataatgaaaaaaatgtcgctgaagctatttggagtacttgtaaaaacattagtgacaagactaaggataatgtgaaggctcgccttgaccaagaattaatgtgcagtagggttcacctcaaccttgttgagaagccaaatg

SEQ ID NO: 96803 - DNA, 399 bp, Oryza sativa
  Clone ID: PAT_MRT4530_94866C.1
atgtcgtggcagagggttggtgcgctgctgcttggggctcagtcctgcctgcctgtcccgggggttccggccgtaggcaggattgggtcggtactcttgtctatggctaggatgggttggaaactatgtcacgtcttccgtccgtataccgtggtgatggccggcagcatcacccgtcgtggactggacttgactggcttcgttttggagctgcggggcatgtgcgttgtcttggggtatccacattgtcgcgaccgagaaaattaccttttcccgaacgctagtgtattaatccccgtcccaggaaaagccggggtacaccgaacaaacatgatacaaaaggcacatctttattatatcgataatatttacattattacaaaggcacttaaggcctga

SEQ ID NO: 96804 - DNA, 663 bp, Oryza sativa
  Clone ID: PAT_MRT4530_94867C.1
tcccccctcctcctgccacacgtccggcgaagccgatggccgcctcgccttggccgttctccccgccgtagccgccacctccgccgcgatctcatcgcgacctcttctccgctggaagatcaagggttctgatttgcgccgtacaccatcgaccgccgggggggcgcacgaacgccggcgacggccgcagcggaagaaggcccgcagcgagcgttgtgcactacgggggagtggtggtagctccggagcaagcagtgccaatgctgctaatttgaatctataattgatcaggatgcatttccagatggggcgtatgctgcatcgcgatggggatgagagagaattccttcatggagtctggtttggcgtatgcgcataggtttctcagaatgtttgccaccacaactctgcaagatgcaccgtgctgaccagaaagcatcctcttgaagtccttcagaacatctttctccctgatgattgcatgacagttggcctggctatccgtggtcagtcttgccagtgcttttccagcagatagttggacttggaccttgtctccttcatccaggctacggaaaacacccagcagcatcacgaccagctttcttgtggctctatggtctcttgatccagcatccagcgcaaagccatcgactattccta

SEQ ID NO: 96805 - DNA, 228 bp, Oryza sativa
  Clone ID: PAT_MRT4530_94868C.1
atggcgaaggctggaaagccgcgtcggtactccgaaagtaaaggcatcttgggcgaactacaaagacttcgccataacgagttcggcatcaaggaggcccaacaggacaccccgcttcaagctacgggggctccaaatgcaggcagcaacgctactattgagggctgtgtttacactaggggtgaaaaattttgtcgcgtgacattatatatacggacacacatttaa

SEQ ID NO: 96806 - DNA, 211 bp, Oryza sativa
  Clone ID: PAT_MRT4530_94869C.1
aaaaaaaactataaagcgaacgaccttaattataataaaaaaaaaaaaaaaaaaaaaaaaaaaaaaaaaaatatataaaaagtatccaaacggttcaaaaagaccgcgggataaaactatatgggccgccctttcttaggaatcaatcctatctacccgggccttcgaagaatttacttttttttttttgtcgcacactcaaatttcgttg

SEQ ID NO: 96807 - DNA, 7284 bp, Oryza sativa
  Clone ID: PAT_MRT4530_9486C.1
ctaggtgcgagtgcacaagacatcatcggtggcgacgggaggaggaggttgagctagagcccactcggcgccatgcaaccgagctagaggagtagtaccagcaagcgacaacccaagaaccaagcgtgtggtgggtttgcatggagcaacgaggttgttgcgacggggctctacgccatcctcaaccacattatcctccatgccacacccgtccaagccgttgagtgcgtcagtgactccgactcccacaccaccaccggtgccatggccgttacggcaaatgacacctattcctgttgcttcgtgacaaaggtgtgtgctatggcgcccatcgacatggaaacccacctcagcggcctcctccaagtgggtgtgcaagtcttgcagcgagcgtggcttcaccgtgttactcctcccccatttaactgaggtgcaattgttgcaaacaatgtagaactgttgtgaccttccctcagcaaactcactgatagaattagccgacaaaacaagtgggaaggtttccccttgggattttgtgttgtttcctgagcttgatggcacactagattcggtgcctgaagattgctgcatcgatgacgtgaagaaactatcacttccactcttcctctgccactgaggcacatagctaggccacatactcatatccacctcactcatctcggtatcttcagtaagcatggagacgacttttgacatcggtgggcgttgctcaggcaggcccacggtgcaaaggagaatgatgttgatgacacgcacaacctcttcctcgtcaaatcttgcaagtttagggtccaacatttcaagagtctgacttcgctcatgtagccgccaagcccatccaagcagatacttcttatcatcctcgaggctctcatcaaagtttggccttcctgcaataatctccattgccacaacaccataagcgaagacatcagccttctctgtcaagtggcccatcatggcatactcgggtgctagataaccaagcgtgccagctactcctgtgctaaggtgagtcatgttgtcctcataatgcctagctagcccaaagtcagagatttttggattgagatcaccatcaagcaagacattgctggttttgatgtccctgtgaactatccttgtgctggactcctcatggagatatgctaggcctcttgcgatgcctacgcatatgtcgaagcgggttctccaatctaggttcatatttgtcttgccagtagcaaagatagtttgatcaaggctcccattttctaggaattcatagaccagaagtggtgctttgctctcaatgcaacaaccatacaacttcacgaggtttcggtgttgaacggtggatatagttgaaatttctgtcatgaactcccgtttcccttgatgagatgttggagataattgcttcacagctaccattcttccatcatatagcttacccttgtaaacaaggccatagcccccccttcctaggatgttatcctggctaaagttgttggaagctgattttatttcaccataactgaagacatctggccttccaactacactgagaagctcagcactgtttttaataggaccaggatcaaccttattgttgccaccataaggagatacacttaatgctgagattaatggcccgtaggatccctgtctaggaatgcaacaagttccttttccagcccagaaaaggtgaatctccatgaaattttctgtaactctaacaacatactgcctcaaaacaacagtataagattttccatttgtttgtttctttatatcgaaatccttttctctgagttctccctgaataaatatgtcgaaaatccttgttcccaagcttgtccatgtcgtgttgtctggaaagaagatctctgcaaattgaagctcgacgttgtaaaatccattctttagtccaatgccatagtatctcaatgaagaggatgacgttctggctgtctggaatagtacactatcaagcgtgtttgtaaactggcgtgaagtgtatactatgaagctaaaattagcggcttccatgaatttccccgtgttgctaataccccatcttgttgagttcgaaacatagtatgatgcctctcctaaattcgtgtcgtcgggttcgtaataagatttatctgagcctataatgggtctagtaccaccggagtcaactgcaaatgaggaatcatctggagaagcaggtaaacatggagtatttcgctgtaggcaatttagacctgatgacaaaatacaagaagggaactttccagagagctcgttgtaggagaaatctagaactttaaggctagcaccctttgtgtctggcaagctcccagagaggctgttgtttccaagaaatagaacaatcaaggatgtcatgtttgacataaaagccaatgaagaactcccactcactaaatcgcctattcgcaaagatgtcaaattgacgagattagaaaaacttgtagggatgggaccatcaaaattgtttccttgaatcctcaactctgtcaaatctgataagctcccaatataatcaggtattctcccagtgaaatcattgtcggatgcccataagatcttcagttttctaagtttagacaaggctgatggtagctccccgcttagaccacaactatcgatatatagttcctcaagcttggtcatgttttctagtacttcaggaagtggaccgacaaacttatttgtgctaatgcccaacgcaaggagattgttgagattgccaagctcccttggtaaaattccagttaacgcattgattcccaccaaaagatactgcaatgccgtcatttctccaataaatgccggtaaagatcctgtcaaataattttgctgtaaattcaagttagctagataggtgagattctccagttctgcaggtatcggaccgacaacatccaacgcgtacaccctcagcttggtgatgtggcagacggtcgtgttgtcgtaggagcagtcgcacttgatgcccgggttgatggtttcgctgttatcgatgtcggtcgtttcgtcgatggcgatgccgctgcaagggtcgccggtgatgttccatgtcgtcggcggcttcgtgccccacctccccagaatcgcgttcagcgccgccactgttagccactcccgcgcccgtccacccggtggatggcaacggcagcgcccgcttctcccccgcctgcccggcatccctggtggtactggtggacggggacggagtgtcacgatcctagtttctctggaccgacttcccaactgagcctctgttgcttgtcctgcattgtcgtcaggtgaggtcgccaccgtgacattccccccaccttgagacgaagcttgtccccaagcttcagaatgcggaaaacgtcgacgcaattcctggccattttcccaagtgatgacctgtggatcattaccagaccatcgaacttgcaactgctccaccatcttggatcctttccgcacaaaacggcgatccaacacttgagaaggaacagctgtcagaccctcatctttagactgcaaaattggcaactgtgattgaacaaattcagtaggtgctaaggccttcttaagttgagatacataaataactgggtggatcaaactggtagcaggtaaggccaatttgtaagccacagctccaatacgatccagaatctgatagggtccataaaagcgaaatgccaatttgcaattagcccgagtaaccaccgactgctgtgtgaatggctgcaacttgagataaacccaatcaccaactacaaaagatcgttcagaacggtgtttatcagctgggaccttcatgcgagcttgagcccttaacaaatgatcacgaatcaaattctgcatcttatctcgttcctgtagccaatccgacaactctggtgactgacagagagcattaacagataaaccaaaatatttgggtttgcgaccatatagcacttcaaaaggagtagttcccaaggctgagtgaaaggatgtgttgtaccaatactcagccaaagccaaccatcctttccgtttgcccatcggatgatacgatgaactcatacgcaattgagtgccagccagtcgaaacaaggtagtccaaagagtgcttgtaaagattctgtcacggttggaaataagggattgaggcaatccatgtagcttatggatgttctgcatataagcttcagccacatcgaaggcagtaaagggatgagcaagaggcacaaaatgactatatttagagaacttatcgataaccaccaaaatacaattgaaagtagcagatttgggcaacccttcaatgaaattcaatgatacaaattgccaggcatgctcaggaactggcaaagtctgtaataatcctggatatttgacatgttcagacttagctcgctgacagattgaacaggcattggcaaactgaaccactattgtgcgcaaatggggcgaagcaaataaggattttacgcgctgataggttatagtaatgccagaatgccccccaactggtgaagagtgaagatttgctaaaattttctgttgaacaaaagaattagtaccaatccacattctgcccttaaaataaagaacacattccttcagagtaaaatcaggcacaacatttgcactaatgcacaaggtttgaagtttactcaaagcatcagaatcattggcatatcctgcaatgatttcctgaatccaatctggaaccatagaagatatcgctgttaactctgaaacagaaggaaatcgtgatagagcatcggttgcaccattctcactgcccttcttataaataatcttgtaacgaagtccaagcagttttgttaaagccttgtgttgccaaggagtagtcaaacgttggtcatccagaaaacataagctccgatgatcagtatgaatgaaaaactcagagtgttgaaggtaaggatgccaatgatcaattgccagaataatagccaaactttccttttcatatgtcgataatccttgatgacgaggacctagggctcgactcaaaaatgcaatgggatgttgtttctgcattaaaatggcaccaattcccttatctgaagcatcggtttccaccacaaatggttcggtaaaatctggcatcgccagcactggggttgtcattaaagcttgtttaagagactgaaaagcttgttcagtagttgcagtccaaatgtaagattgtcccttcctcaacagatttgtcaaaggtttactcaacacaccatagtatcgaacaaatttgcggtaataaccagttaatcccaaaaatccacgcaattccttcacattggtgggagttggccaattcttgaccaccaatatcttatcttcatctgttgacaccccatttggactaataacatgacctagataggccaacctttgttgtgcaaatgaacatttacttctcttaacctccaggtgatgttctgttaagatctgaaacacagattgcagatgctgaacgtggtcagataaggttctgttgtagatcaatatatcattgacaaaaacaagcacaaacttccttaataagggcgacagtatactattcatgcagccttgaaaagttgctggtgcacttgtaaggccaaaaggcattactctaaactcaaaatgcccatggtgagtcttaaatgctgttttatgttcatccatagcctgcatccgaatttgatgacagccaacccttaaatccaatttagtgaaccaccttgctcctgataattcatcaagcaattcatcaataattggcaatgggtacttgtttttcaccgttatagcattgagatgtcgataatccacacaaaatctccaagttccatccttcttcttaaccaaaagaacaggagaagagaaaggactggaactaggctgaataatgcctttgttcaacatctcctgaacctgtgactcgatttcatccttctgagctggagtatatcgataaggtctgacatttactggcattgccccaggaatcagaggaattgagtgatcaaatactattctcatataacccacagcttcagatccatgcactgcctgaactgagattgccatcagaccctgattatcagactcctccatactagccttgcggtcatctgctcgagttaaactaccactattcaacacccggtttggtggcaaaggtagaggtaaagcacccttgaaagctggatgtggccgaacctgcaacccattgtcactcttcttcagatttgaagctgattctagaatcacttcttcctgtaaagaagcaattgccaatgctgcctccaaatcctttggccgttgaagaagtactgcatttctgatttctcgacgtagtcccttagtaaaacgatgtgttaggtatctcatattcaaatctggatcataagctagcaattgattcattaactcatcaaattgtttaatgttatccatttgtctaatgagcatctcatgaagatctctatcaaacttatttgacacagcaatacaaaagtgctcccaattcgggtacctaacatgagccttagaggaacgtaaccaagatgaggccctcccagaaaagtaaatggtggctatcctcatcttccaatccactggatctgtaccatcgaatttagggaaatctagctttggaactctatggttgtactgacgcccaaattgatccccatcacattccccatttccaaactcagattgatcaaattttttcatcgatgtggagggaaattcgtacgtacccttgaccggagttgggcctagggttgttgccatccctagtacccttccccggtgttcatgagattgcagacggctattcgcccatttgcttccgccttccgccgcagcaacttgagaagaagatggcggcgtaggcagcaacggtgctttcctttccagatccagttgcacacggagttcgccgacttcctcccgcgattcctgcacggctgcctccacttgtggcctccaattgttcgtgtcttgatccagcttgacgacggccgcttgagtctcaccttgtgctcgattcagcaacaccagggactcttgaatctccatcagaagcttgccgaagtccacgttctgcttctccatatcttcaacttgaagttgcagacgggaggtgtaccgtggtttctgacacagctcggccgtgcgctcacgtcggttgtgcgcgacgaccaccgccacccacgcgctcccgctaccggccaccgaggttgctccctcggctctcctcgccat

SEQ ID NO: 96808 - DNA, 616 bp, Oryza sativa
  unsure (1)..(616): unsure at all n locations
  Clone ID: PAT_MRT4530_94870C.1
tccgcggggttccgaagccttggaagaagaaaccggccttgggccggcccgnttctttccggaggccttcgtcgaagaagagagcgccacttcgcaaatgaaagcaccccaacccggtgcncacttcgcctgcttcttcctcaccgcccgttcttganccgccgccgcaacgcgccgagcccgtngacgccgagtccgccgccttggccaggagggaccggtgagctntcgcgccgccaccgccctccgcgccctcgtcttcggccagaactggaggggccgtcctccggcccccatggaggtctcctcctccgcgcggctcctccggatgcggcatctgctgctgccgccgctgctccatcgctggtgcccgtcgtgatttggggaaaacgagaagagacgagaagactctagcctccagcgtgatttggggatgggttagggtaataggctgaccggtgggtccgtggacttatttataagcagttttatgtcttaagaggctttattgtaaaatatgtaaaatgttaancntacatagactgaagttaaaaaaggaggggctgaaatgcaaaacctaatggggcccatctgaagatcaaaaaaaaaaaaaaaa

SEQ ID NO: 96809 - DNA, 362 bp, Oryza sativa
  Clone ID: PAT_MRT4530_94871C.1
caaacagctggacacgaaagcacattgtattggaagtactctcacctctcatggtgaaagaaaaagaaaaacaatttgcaagttgtgccaaacaggtagtatgatacagaaaacatgcaatgtaccatatgtactagtactggttagttggccacaaaagcacactactgagaccacttttaattaattgaacaactctatacccagcgaagagtagctttgatctgatcctgatggcttaactaatcacaatttggccagttcctgccttcctgcctgcccttttactaactttttttaaggataattgcccttttactactgttctagtcatactcttcccatgattgcacttaattagg

SEQ ID NO: 96810 - DNA, 537 bp, Oryza sativa
  Clone ID: PAT_MRT4530_94872C.1
tcacggcaacgacgacggtggagagccgaagacgacggcggctacggcgcgcggctgctccgcccgcagccctagacctagaggaatgagggggagaggggttggagcggggaggcgggcggcggtggccggcgattcgcggctttcacacggcgtgtggcggtggcgactgcggcgcggctcgtcggcgcgggcgtggcttggcgccagtgcggcaggaggcggcacgtcggcggcagctgcggcgtgcgcgtcggcggctggaggcggcgcgtcggcggctgcggcgtgcagttgccgaccgaccactccttcagcatcaatgaccgcgaggagctccgtttcgtcctccttccccagctttcccacctcctctcttcctttctctcttgccaattgccaattggacataaggatctctcggtagagtgccaccgcatcctcgccggagccgctgcccacgccgacatcttctgctgccgccgccagatccggcttcttccctaccgttgcggccggatccgacctcggccccat

SEQ ID NO: 96811 - DNA, 1349 bp, Oryza sativa
  Clone ID: PAT_MRT4530_94873C.1
atgagggatgtgtgcatggaggtgctgcctccgatggaccactacgcgtcgagggggaactggttcatggcgcgcaagtggtcgccggaggagaacaagcagttcgagcgggcgctcgccgggctggacctgcggtgcccggactgggaccgggtggcgcgcgccatcccgggcaggtcggcgctcgaggtcatgaaccacttcagggacctcgagctcgacgtccagcagatcgagaatggcatggtgcccttcccggtctacggcgccgccgccgccggcggcgcgttcacactgcagtgggatggcgcccatggcgtcggggacttcaggaacgcgtaccggttcggcggcggcggcggcgggaagcggcacttcggccgtacgccggagcaggagaggaagaaaggcgtgccatggacggaggaggagcacaagttgttcctcttaggactgaagaaatatgggaaaggggattggaggaacatatcccgcaatttcgtgcagacgaggacgccgacgcaggttgccagccatgcgcagaagtatttcatcaggctcaactccggtggcaaggacaagaggagatccagcatccatgacattaccacggttaacctgacggatgaccggcctccctcgccatcacagtcctccttgatcagcaatcagtccaacacatcaactctgaccgcagcggttgcccccttctcatcgacggccgatgtcaagccacagaatgccgcgaatgcgtccttcaattcgccaagccggacacttgggatggcgggttacgggatgggattgcaagatcaaggattgcagtgtggtggtcctctacatgatcagttggccgcgagccgaagcatattgttttagatgaaaccaatccaggcagcaccatggatcagatgtctagtgtaatattgccctgcttgtagcttcatcactacctgtattgaagtaattaattatggggaatttttcggaacataacagagggggtgtggagggatctttgtgccatgttggtgactgataacctgtgatccataattgttggcaatactgagaatgtaacgaaacgaacgtcaagaacttgatgccggtggtattttcagacagtgattgctgctagtgctgaacactgatcatgcatgaagtggactttgtattcaatcatggatccagcttttgtgaggtggatgaggagaattctattcactatgttcttctggtcagtgatgcactgagaaacaccggttgccatctgattgaggggtttcagatcatgctgtacttcacacatacttatccacagtttatcaatttgctcattggtgttcccc

SEQ ID NO: 96812 - DNA, 1410 bp, Oryza sativa
  Clone ID: PAT_MRT4530_94874C.1
atgtccacggcggctgcaggtaggaagaagaagggaggcacacctgaggcctcagatgcggcggcggcagccccagcccgtaccctaggttgtggtgttgggtcggcgacggcggctctccccttcagtcgtggcggccgcggtgtcgggttagcaccgccgccccgctctctcggccgtggtggcgggccagcagtggcagcaatccctccaggcggcttccccagttattcagcgtccatggatggatttcccttccctccaccttttgatggatcctacagaggtggattccccagctcttcagcttggttggatgcgtccggtggtgatgaatcttctcctggatcatgggataaagatgtacatccacgtggtggtttcatgagctattttggaaatcatgcacaaaactctcatttggttggtgcgcctatttacattgctgatgctagttcaccaccagaggtggaaattttacaaggcaatgatgatggaaatggcaatggcaatgttaggactgagaagaggatactgtggacagaggaagaggatatcagattgatgagtgcttggatagagcattcaactgactctacatgtggagcagataagggaggtggccaatattggggtgaagttgttgaatcgtacaacaagactaccccacctctcagaaaaagaaatctgaagcaatgcaaggatagatggcacaagattaataggtggacggatctctttgagtgtgcttatgtaaaggctcgtagaatttttacaagtggatattctaatcaaatgtggattgatgcagcacacaagttttatgtggatgacaataaagaggcaaagctaggaccctttgtgctgatggaggtttggaaaatatgccgagaagtctcaaagtggaaaacatacaatgataacctgaggaatgcacgtaaaaggaaatcatttcacttggaaggagactctgaggaagctgatgacacttttgatgagatgccaaagcgaccaatgggtcagaaggccgctaaaaaggcagctctagatgcaaaaatcaagtcaaatggtttgggcagtagtgatgatggtcactcaaaggagtctcctattcagttagacaaatttgatagatatagcaaattccaggaggaaaacaatgacaagcgcatgaaactattggacagacaggaaaaaatatcttctgagaagctagaggccacaaaaattgcccaccttacagcacaagagtacaaagaaggaaggaagcttgagaaagagtcaaagatgatggagacttataacagcctcatctcacaagatacaagttcaatgtctgctgaggaaaaggcgcagcgagttagtatgatgaagtgtcttatgaaaactcttttccctgaatctgattga

SEQ ID NO: 96813 - DNA, 254 bp, Oryza sativa
  Clone ID: PAT_MRT4530_94875C.1
aaacaatacaggggtaaagtttgtgtccttgttcccataaaagaatgtaaattcacacagtaaaaactcgccagcaacagttttgtatttgttcacttttttttatcagggcaaaaaaaatgcaagatttgacacggtaatttttgaggtcgttcatgctagcacggttatttaagactaacttttacacgtccaattttaggagaaaatggaaataaaataagcctaactttcaccaaatttttttttttcgt

SEQ ID NO: 96814 - DNA, 1527 bp, Oryza sativa
  Clone ID: PAT_MRT4530_94876C.1
tgggaggagagggtgccacccgccgaggctgagctcgcctccccgcctcccgatccccgcgacccctcgcagctgcacccccaccggataacgcaacgccttcccccgcgtgcagaagaagccccctcccccctcgcgcgccaactgctctcctcctccgccgccgccgccgcaaccaaccagccagccagccatgcagcccgactccgcctcccaccgcatcgcccgcgtcgccgcccacctcagcccgtcgccgcgcccccagatggaggagggggtgaggccggcgccatgcagggccaagggcggcgcgccggggttcaaggtggccgtgctgggcgcggcgggagggatcgggcagccgctgtcgctgctcatgaagttgaacccgctcgtctctgtgctccacctctatgatgtcgtcaacacgcccggtgtcaccgccgatgtcagccacatggacaccaccgccgtggtccgtggtttccttgggcccaaccagcttgaggcagcacttacaggaatggatcttgtcattatccctgctggtctcccaaggaaaccaggaatgacaagggatgatttgttcaacaaaaacgctgggattgttcgctcactttgtgaaggcgttgccaagtgctgtccaaatgcaattgtgaacttgatcagcaacccagtgaactcaaccgtccccattgcagcagaggttttcaagaaagctggaacttatgatcccaaacgtctccttggagttacaacactggatgtagcaagggcaaacacctttgtggctgaagtacttggaattgacccaaaagatgtcaatgttccagttgttggtgggcatgctggagtgactatattacccctcctctcccaggtccaccccccatgctcatttaccccagatgaaatcagctatttgactaaacgcatacagaatggtggcacagaagttgttgaggcaaaggcaggagcaggctctgcaactttgtcaatggcttttgctgcagcaaaatttggtgatgcatgcttgcgagcaatgcgtggtgatgctggcgttgtggaatgttcatatgttgcatctgcggtgaccgagttgccgttctttgcaacaaaagtgaggttaggtcgtgctggagccgaagaggttctccctctggggccgttgaatgattttgagagagctggcttggagatggcaaagaaagagctgatggagagcattcagaagggcatcgatttcatgaacaagtgaggtgtatgaagggacaaagttatgcatacatgtaaagagtgtcctatatatagtgctcatatacatgtaaaattttcgccgggctcatatacatgtaaaatcacttctgtaaaacgaccgtgaaatgctaattaccctttagttgcactaaacctttttttcctgatcatggaataaaaatcctatactagacaaaaaaaaaaaaaaaaaaaaaaaaaagaaaaaaaagaacccaattcgccctatagtgagtcgtattacaattcact

SEQ ID NO: 96815 - DNA, 1954 bp, Oryza sativa
  Clone ID: PAT_MRT4530_94877C.1
atgtcgcacaaccacggcgacacgatcccgctccacccgtcgtcggcgcagtccgacatggacgagatcgagagcctcatctacgcggcgccctccgccaccgtcctcccggcgcggccgccgtccccgccgcgcgcctccatcccggtctccacctccccggccccgctcccggcccccgccaagccctccctccccggcgcgtccgtggaggatggccgagcccaccatcgtgccccaggcgccgcccgtgcttcacggcgtctccgaccccaacgccttccccctgctgcggcccctccgccctaaccccaggctcgagatagtccgtgctgaccacctggcccgcgtccctcagggaaacttcgattctgttgagttgcgtgcgggcgtggtgcgggaggatggccgagccctccaaggtgatccacatacggaacgtcgggcatgagatctccgagagcgaactgctccaggtggtgcagccgttcggcactgtcgccaagctcgtcatgctgcgtgctaagaaccaggctctcgtccagatggaggatttagcttctgctgtgaatgtgatccaatactacaatacaattcaacccagtgtaaggggaagaaatgtttacttgcaatattcatcccaccaagaattgactactgatcagagctctcatggacgaaatcctgatcagggagaccgtgccgtctcttgttacagtcctctctcctagcatgctcccaggttcaggctagaagctggaagactaagttctcataactgtatgactttcaaaccctcatacaatatcagtcacgtcaaagtgcaatacaagcttatggtgctttacattctcagcgaattgcaagttcactacaacaacgatagatctagagatttcacaaatccatctttgcctacagaacaacgctcaagatcatctcagcctagttataatgatccaagcagtttgtttggtttccagcaacctggagatccgtatgcacagatgagtaaggcagcaatgatcgctgctgcttttggtggaacattgcctcctggagtgtctggcatcaatgaccgttgcacacttctagttagcaatctgaacactgataaaattgatgaggataagctcttcaaccttttctcaatgtatgggaatatcgtgcgtatcaagatactcaaaaataaaccagatcatgccctcatccagatggctgacgggcttcaggctgagcttgctgtactgtatttaaagggagcaatgctattcggaaagaagcttgaagtgaactactccaagtacccaaccgttactgctgatccagatgcacgtgactactcaacttctcacctcaacagatttaacagcaatgtggtgaagaactaccgccactgttgcgccccaaccaagatgatccacatctcagcgcttccacaggacataactgaagataccatccattcccttgttggtgagcatgggactatcgccaactcaagactgttcgagacgaacggcaaaacgcaggcccttgtgctgtttgaaagcgtggaagaggcaacagaggcgctcgtggagaagcacgcaagcaagctggaccgaaccaacatcaggatttccttctcacagatgcagaatatatagttctttcctgggaattgtgaggagccaaagctataagcttaccttaacttttggatttcgtgcacttagcttgcatgaaccgatatatgtttcacctttgcccaaaaagtggtgtgaactgtctttcatgtatggatggatggatcagttaaacccgtgttctctgttatgtgatgccccctcttatgcaattcagcatggatatgttaaacctgtgctcatatgccctaaaaaaggtgaacactatcttaatgaatatatatcactccagtggttcgacgatcgaaaaaaaaaaaaaaaaaaaa

SEQ ID NO: 96816 - DNA, 594 bp, Oryza sativa
  unsure (1)..(594): unsure at all n locations
  Clone ID: PAT_MRT4530_94878C.1
gacgttgcatgcacgcctacccagctcggaacctccagagccgccccacccttccgcccacgcgacctttttttttaaaagaaaaacacctccgacacctcctcctcgtgcccccgaaaggaacggcctgggatcttccaactctctcaccgcctactgacgaagcggggccgaccagccggatgtactagcaaacttggacggctgctgttccaatataaaaaaaatccaccctgacaagctctgaaccaaggctcatatgctgcgcccgatgcctgcctctgcgaggaccgtgacaacaacgccgcgtgtgagacctgcaccaagacaggcgcgttccatttcttcccacccactaccataaatgggctggaaacctaggaaaaaatggaagggtagaccttccgaccagctataaaaaaaggnnctgatgttaatctccatgctgaccactgcacggtgcttgcgaacatccagcaccacacccctgacattgcaacagggagagcacagccacttcaccacgcgccctgaggatattggcccctgtgaccagggacacatgtttggataagcaacctgatgagacggggg

SEQ ID NO: 96817 - DNA, 1186 bp, Oryza sativa
  unsure (1)..(1186): unsure at all n locations
  Clone ID: PAT_MRT4530_94879C.1
ccggccggctcttccgtgcgtattgcggactccccaaatctgacccaccctgccactgcatccacccctccacttctccttctcctgcgccgcctcatcttatctcgccaatcccccttcgtcgcgcgcaaggctaaaccctagctcctccgcggctccgcccccaccgcctaaaccctgctccgcccccaccgcctaaaccctagttcggaggtagccttcgcggtcctcctctcctgtttggctcatcgattctacgttcgattgagttgcgtgcgggcgtggtgcgggaggatggccgagccctccaaggtgatccacatccggaacgtcgggcatgagatctccgagagcgaactgctccaggtggtgcagccgttcggcactgtcgccaagctcgtcatgctgcgtgctaagaaccaggctctcgtccagatggaggatttagcttctgctgtgaatgtgatccaatactacaatacaattcaacccagtgtaaggggaagaaatgtttacttgcaatattcatcccaccaagaattgactactgatcagagctctcatggacgaaatcctgatcaggaagaacctaaccgaattctgttagtaaccattcatcatatgctttaccctataaccattgaagtgcttcatcaagtgttttctccctatggatttgtggagaagatagtcacatttcaaaagtcagccggctttcaaaccctcatacaatatcagtcacgtcaaagtgcaatacaagcttatggtgctttacatggacggaacatatatgatggttgctgccagctagacattcaatattctaatctcagcgaattgcaagttcactacaacaacgatagatctagagatttcacaaatccatctttgcctacagaacaacgctcaagatcatctcagcctagttataatgacccaagcagtttgtttggtttccagcaacctggagatccgtatgcacagatgagtaaggcagcaatgatcgctgctgcttttggtggaacattgcctnctggagtgcctggcatcaatgaccgttgcacacttctagttagcaatctgaacactgataaaattgatgaggataagctcttcaaccttttctcaatgtatgggaatattgtgcgtatcaagatactcaaaataaaccagatcatgccctcat

SEQ ID NO: 96818 - DNA, 666 bp, Oryza sativa
  Clone ID: PAT_MRT4530_9487C.1
atgaggggtagtcgtcggcgagcccgtctaagctcgagctctcttgacctccgtgtgagggaagcaaaggcgaccagagagcctgttccgttcgagaaggagagggaggcaaggggccgccagagcgccgacgcgggagggccccaagttcctttgccaagtgatgccgggaggaggacgctaagaagcatgccgaggctgccactcgcaaggctgagaaccgtcgcctccgcctccgccttcgtgtcgtccaagatggcctcctgtgtcggcgccctgctggcgtccaaggtgaaagcaccacgaagggactggtttaatttgtctggtggttctggatatgaacaagttaagggtcagtctcaacttgccactcaagaagggtacaggtgtcgagctgcagtaggaaaagggcccacggttggacctactaattgtgcaatcagtgtaccattcgctttggccctgattaatcacaggacaaatggatcaacctacagcccgggagaaagcagaaagcatcatgcatttccaggaaccgattattcggattcagatgcctctaaggttcgaaaagccatgattgcagcagcaaacagacatcaaaattttgattcggagaatgcagttagtcaacagcaatgtgcggatggtccaagagattga

SEQ ID NO: 96819 - DNA, 592 bp, Oryza sativa
  Clone ID: PAT_MRT4530_94880C.1
gctgaagttgactgccaggctaagggcccagcattgtctccaatattcctctctcgaggcgtcggatgtttcattatgcttgtttgatgacttgaattattcacttcatctctcaaatataatggaaggtccggagagcctacgacaggaagggaagggaaaaagtggaaaaatggaatcaccgaagcaaggccatgccggtggcgacaagaggcggttgccgatggcagttcgcagaggagaagggcgacttggccatggtggcagcgacttggaaaaggggagcacggtgctggcctcgtccattcattggctggccagggcggcgtgcacacacggcggctacagtggagttgggcggcggaaaaggagattcacggcacgacgacgacttgccgtggtcggcaagatggcggcggcggcaggaggaccacgggcgatggcgccatgccgtgggcagcggcgcgcccataggagagagagaaggaaggaggcggcttcggctgggccggctcagctaggctatgcgccaactgggccgtggcccgagaagaaaaaaagtggagggagggagagaaaaggaatgggctga

SEQ ID NO: 96820 - DNA, 150 bp, Oryza sativa
  Clone ID: PAT_MRT4530_94881C.1
atggggacgcaggaatcaggtggaggaccgtccatcagagatgcaatcgatgatgggggattgctggagcataattttctgataaaatatcataattttataattggggatctatttaatagatatgttggtgatgctcctaagtattaa

SEQ ID NO: 96821 - DNA, 705 bp, Oryza sativa
  Clone ID: PAT_MRT4530_94882C.1
atgagctcgtcgacggcggccagcatcgggccgccgcagccgccgccgccccccacgtctcccgaggaagagaagtgcctcaacttggagctctggcacgcctgctccagcccgctcgtctgcctcccctccgtcggcacgcgcgtcgtctacttcccgcaaggccacagcgagcaggtgtcgtggctcagtgcaatgggatgctcacttctgtccaggggaaaccatcaaagaccatggtggattgccttgccatcttcgtgctggtgcttcttctccaagactctcgccgagcgcgaggcgttctattacgtggttgacaacgctgctgtcatggacttcatcactgtgaacaccagcggctccatcctcatcaacatgctcaagcctgagtataggaaatttggtgaatgggggaacaggtgcatttggtttacaacaattcagttctctgtaatctccaaggatctagcttcttacatatcaattcagccagtaagtggccaaactatctgtgttggattgttatgggagtatattataggtcattttctatcttcaacagctcttgtatcattcatttgttgctccaaaacacatgggtatattgcttcagcattctataatgcaccccaggagcttaaaaaggatattgagctaatgatagtgatgaccaggagctatctaaggaaaaagaataaataa

SEQ ID NO: 96822 - DNA, 612 bp, Oryza sativa
  Clone ID: PAT_MRT4530_94883C.1
atgcgctcctggtgcaccatcgccagtggaagccatcgcgatgcagaggaagcagagcagtcgcgtcgagacgctcccaaaaacttgatcgcccgcctacccgtgcaggtttctcaggcggacggagttccggaggcacctgctcgtcctggatccgtgcgcgcaagagatcagaactggggaagacagagtagcagcacaggaaacaaaagaggttcagcgataggaggaggaagtgcgagagacggagagtggaaccggagctctgtcgcggtggttaggaggaggaagtgcgagagacagagagcggaaccagagctctgtcgcggtggtgggagcgcttctcaggaagtgcgagagacgaagagtggaaccggagctctgtcgcggtggtgggagcgcttcttgtccgttaccggagtaacagtcatgcccgcattgaatcagattcaattcccgtctcgggaagtgcgagagacggagagcagaactggagctctgtcccggtggtgggggcgcttctcgtccagtaacgtgggggcgcttctcgtctgttactggagtaacagtcgtgcccgcataggaagtgtgagagacggagagcagaactag

SEQ ID NO: 96823 - DNA, 360 bp, Oryza sativa
  Clone ID: PAT_MRT4530_94884C.1
tataaataccccgaatttacaaggcgcgcgggcggggacattcaatgagctgacgaaggtaacaaacagtttctccaatgctaatgacattggcactggaggctatgggaaggtctacagaggagatcttggcaatgggcctcgtattgcaaccaaaagatccgagctagggtacatgtacggtaacctagaaatcccgagagcgatagagctcctatgcaaggttgatcacaagaacgttggcagacgcgtgggaatgagcttggaccagagtgagcacatgctgacatatgagtatgggcccaatggcgcactcatagacagcctaaaacggatagtagtggtgctcctacaatggaa

SEQ ID NO: 96824 - DNA, 763 bp, Oryza sativa
  Clone ID: PAT_MRT4530_94885C.1
ccggccgggattgtgacacccaggaacacatcatcatcatcatcatgtctccgatgccgtcgctgctactcgtgttcctggtcgcctcgtcggcggctggtgttgcggccggcggcggcggcggggagctgaagcacatccacctgtacatgcacgagacgttctcggggccgaacgccaccgagggcggcgtcgtggcgtcgccgttcaacacgacgttcgggcaggtggccgtgttcgacaacgagctccgcaccggcgaggacagggcagcgtcgccgctggtggggaggtaccagggattcatcgtcggcacggggcggagctcgccggggtacctgacgtcggccaccgtcgcgttcaccgccggcgagctcaacgggagcacgctgtcgctggagggccccttcttcggcttcgccggcacggcggagcgcagcatcgtgggcggcaccggcaagctgaggctggcgcgagggtactacctcctcaagctcatcggcaagacctcgccggagacggccgtctccgagatcgacttcttcgtcctcatgtacagctccacccactagctatgtataagcaagaagcgtgtaaacactagtgtaacactgtaccagcgaggcaccgttcttttctgatacagattctatcctgatttatgttagcacgttttttaaatagttaaatagtgtatagagaagttgctctaaaatatcaatcatttttttaagtttatagtaattactaaaatcagttattc

SEQ ID NO: 96825 - DNA, 435 bp, Oryza sativa
  unsure (1)..(435): unsure at all n locations
  Clone ID: PAT_MRT4530_94886C.1
cgggggaganccacgcgnncgnccacgcggccggtttgaaaagtttgnnacncngggnanccacgcataaggtcacggcaggagcatcaacaagggcacgagtagaccgaagccacggataacgagacacgttccagattggaaggtcaataggggcaggagctacgctcgggcaacatacaggtacattacttgctgcaactatggcaaggctagggcccaagcagctcctgttatcatccctacagaaggaactcgccgcacggacatcgaaaggaacctgcactgaagacactcacagctcaatggaacagtcttctacaacagccgaacaaagccaaaagacagaggcggaggaagaaaagacacctctggtcaccccacaaggagcaccagaccaagtctccgaatcacacaaaaccaaacccgagattc

SEQ ID NO: 96826 - DNA, 194 bp, Oryza sativa
  Clone ID: PAT_MRT4530_94887C.1
aggaaagaagaagctcaagaagcacagtgcataccaaatgattcaggtacacaacgaacaagggatgcacctaacaatccgcaagtccaaagcgattgacaatccccaaaaacagaccacatcgaacacgagaaggataggaaagtatatgttgctggaacaggacataaatctacaccacgtagaaaggaaca

SEQ ID NO: 96827 - DNA, 753 bp, Oryza sativa
  unsure (1)..(753): unsure at all n locations
  Clone ID: PAT_MRT4530_94888C.1
ccacgcgtccgcgccaatgcgcgatcttctgttcctgcctgccgctctaggataaccgtctccacttccatttgggaaaccctagaagtttatgcggatacggccgacggcctcggatgatccagtgatctgctgtccagaggtatgctgcattcagttattgctgttgattgatctggcttaagcttgggctataagaaatcatcagaccatggccggagatagtgacagctatcattgtgtcacaggtcttggttggtttgcgacctaactgaagtagagctagaaaaaccttgataggacaatctgatcatataacacccctacagcaaagaatgtaccaaaggaaatcataaagacaaatgatgatacaaccttgtcagcattttgttttgtggagacaaatggtgtttgtgctaaaccacaatggcgtgcaagcataggaccacacaactttgggttcccatcaaagctagtacttgggaatgtgctaagctgtcctgcatttggaactggcccttcaaggtcattgttagaaatgttgaatgctganaggaagtgaagtttgttcagcccatcaggaattgtaccagtgagattattgctggacaaatcaagcacctgtaggtttgtgagcttgtagattgattctggtatctctccagacaatctgttggaactcaaattgagtaactggagtgccttcaactgaccaatctcattcggatgatgccagtgaaaatattgatgcct

SEQ ID NO: 96828 - DNA, 387 bp, Oryza sativa
  Clone ID: PAT_MRT4530_94889C.1
atgcatatcctccaatcctcgacccgtggaaaggtggtgcacgaccagtgtggcacacaggctgtgcacatccaactgtcgtcccacccaatagaccctgacgtcagtctccgtggctccctttgcaccgagctcctgccgtcagtcgttttcattgtcccaccgctaggtcttgcatcaacttaccgctccatccccatggcgcaagaagacctccttatggcccctggtcacctacaccaccatcgcttgtgctattcctcggctcgttatcgaggaggagcgacggcggtgcgcacctcgtgcgagaagcacactactaggaaaaccattttcgcaaaacgagacccttccatttttctaggcgggtatcattttcggaactaa

SEQ ID NO: 96829 - DNA, 666 bp, Oryza sativa
  Clone ID: PAT_MRT4530_9488C.1
atgccgatgccaccggcggtgagatactacgtgccgtgcgaagaagcggacgacatccacgacctcggggaggaggagcagttttgtcctctgccactgtcgccgccttattccccggcacagccgtcgccgccgccgacatcgccaccggcatcgccgacgctgctgcccacgtctcctctctccgacgaccatgccgatcacaccacggacagcttgatcaccttcgcgagcaccgtcgacgtcgccgcggacgacgacttctacttcgacttcgacttcgacgccgacgacgacgccatggatgagaagcacgcggaatacctcgcggagtgcgcgctgaagcactacaacggcgacgccgccaacgaggccaagtacgagctcgtcgccgcctccgccacggcgagcggcttcatggactgccgcggcgccttccacttccacgtcagcttcttcgccagggccgccggcgccggcgcggcggaggcggctccccgcttcttcttggccgagctgcaccaccgcatcgccatgctcccgacgacctgcgtcgtctcattgaacaacgacgacgagatacagatggatccccagccttccggttgctttgatgacgagccgtttgatgtcatcatcaagcatccaaagggtttgaataagtag

SEQ ID NO: 96830 - DNA, 141 bp, Oryza sativa
  Clone ID: PAT_MRT4530_94890C.1
atggccgtcgcgtcgtgctgctccttgcccattggctcacaacctatgagagtagcggtggggagccagaggagcgtcaagacggggagtgcatcatatgaagtgtcatcccccggtggatgccgcttcggtttgtcatga

SEQ ID NO: 96831 - DNA, 1408 bp, Oryza sativa
  Clone ID: PAT_MRT4530_94891C.1
cacaaacccccgcgcgccgccccaaaaacgctaatccccacctgtacaccacagccgctcaccgagctctcgcccgcgtcgtccgtggccgcgctttcccctgctagcctccgcgtgatagatggacgtggcggaggcggcgtcgccaggggtgggcgcgtgggcggcgatccgcgggtacttcacgccggcgacgctgttcctcgtcgtgaacatcgtcatcggcaccatcgcgctcacctcccgcacgcaccagcgccgccggcggcaggtgtaccagtatcaccacgacggggagatactccaccacgaccagttgcaaccgccgccgccgctgctgcatcagcaatactacggcggcggtgagcaccagcagatgatgatgcaggagacgctgtatgctccgccgccggcgccggcgccgctcgcgcggacgtcgtccgttcttgaccggctccgctcgttcggactctaccgcttccgctccggtgacttccctcccgagtacgctactgctgcggcggcggcgacgagccaactccaccaccagcgcacggaggaggtggtgtcttcgtctccggtggatgaggtgaagctgcaagggcactacgcgaggagccggtcggagccggcggcggcgccggcgcaggaggagaggaaggcggcgtcgaggctgaggaactcgagctccgaggtgaggagggcagaggtcgtgagggctccggcgagggtggtcgaggcgttcccggaggaggccgcggccgccgtggacgcgacggccgaagacgatttcacaccgaagcagcagcgagatctgccgctccagcaagaatacgttcctcccccggcgccggcgccggcgccgctcgcgcgcacgtcgtccgtcctggaccgcctccgctcgttcaccctctacagcttccgctccggcgacctcgccaccgacgacatccccgccgacgcagcggcggcggcaacgcccgcacaagcgcactacggtaggacccggtcggagccggcgcgggagcaggacaagaaggcgaagaagcaggcggcgtcggaggcgaagacgatgaccaagtcgagctcggaggcgaggaaggacacggcggcggaggacgccgacgacggcggcgtggacgccagagccgacgacttcatcaacaaattcaggcagcaactgcagcttcagaggctcaactcgctgctcaactacaaggagatgctcaaccgcggcagcagcaagcagtagctagccacactcgccaagaacaacaagagccttgcaatttcacagcaagctcactaagctccctgttaattatactacttagcaatgctaaatcaatcaagagatttcttataaaaaaaaaaaaaaaaaatctcgcggcgagttcgccccctcccc

SEQ ID NO: 96832 - DNA, 395 bp, Oryza sativa
  Clone ID: PAT_MRT4530_94892C.1
cttcctttttttgagattgaatatacataatatacattccggatccaaatccaaagcacacgagaaccatgcatatgcgtgactccatgaaccgagatactaacatagcaaatgaaccgaggtaaatgaagatagcaatgtgtgatgatgcatatatgcacatacagattaaagcaatggctatatacataaaacataattcaagggcgaaacatgaactgtatgaaatagagttaaaaatttgaaacaaggatactcaggtgcagaggaacaaacagtcaaggtcatgagggtcaagcacacatgaactaatacagtatataaaggtacctagtgatcataaagcggaggaaatcatgaataaatctccaaggaaaagcccaaatagcaccagt

SEQ ID NO: 96833 - DNA, 285 bp, Oryza sativa
  Clone ID: PAT_MRT4530_94893C.1
atggcagctccatgcgtggagaaagtgccgatggctcggcgtgaggagcatgcaaccacggcaacgacaccgcataggaaggaagcgagggcggcgatggctccacgcggggaggaagcgagcgcggcgggggcttggtacgagcaggaggtgatggctcagctaagcggcgagggttcaatatggagaggaagcgatagcgacatctcggccgccaagcggagggaaggagacgacgaaaatggcggctcagtgctgggagtaggaggccatggctcaacgtga

SEQ ID NO: 96834 - DNA, 759 bp, Oryza sativa
  Clone ID: PAT_MRT4530_94894C.1
atggactcctcagcgacccccgtgggcttatctccgccacttctcagtttggtgctccgcaatgaaccatgctgtacaaaagcggttcacgggaacgaacggccaagatctttccatccaaaacggacggccgagatcgaccggtccacggccggaccacgacgaacggcaacgatgacgtcggcgatgacgtcatcacctacggcgactcgggcttgcaaactcgccggcgaacgacggcgcggcgacgcgaacggagggcaccagcacgtagagggcgacgcggcgaactcaccggtgaccaaaacggcggcggaagatcaacggacggcgacggcgtcgaggaagaagcggcggcactcttcggcttgacgacggcgacggtgctccgacggtcttcaacgacggcgaaggggcggacgaggacggcgacgcgacggcgaccacgacggcgacctccccgagcgacgacgacgaccggaacggcggcggcgcacggctggagcgacggtgacgatggtggcgcggggctacacggtgctagggcgcttccgacgacgagagacgaaggcgagggtggcgacgggtagtggcgacaccgggggtccttttataggggctagaaggcagcgtcggaggcccacggcgaccggcgacgagaaggaaagtctagggctcggaggagagagatcgatccgaatcgaactcgaatcctcgaatttccaaacaaaattagccgatgattccaaaagagaaaag

SEQ ID NO: 96835 - DNA, 1488 bp, Oryza sativa
  Clone ID: PAT_MRT4530_94895C.1
ttaacagcgccatgcggagacggaggcaagctccccgcgttgccaatggaggaagagcgagccggcgcgcctctccagtcggaatcccctcaccggcagcttcttcaggagagactccgcctgcgcctccgccatgctgctcacttgcaccggcacgaaccccgccgacgccagcgtcgcccgccacgccgacgccgccgtcttgtcgccccccacccccacggcggcgcgcacgcactcttggatctttggctggacccagaaccgctcgatcttggccgccacgtcggagtccgtgcccatggcgtccagcgactccagcagggacacggtggagcgcaatgcctgcagcaggtgcgccgcgaacggcagctcgccgcggtcacagccgcggtccacggagacaaccagcttggcgccaaggcgcctgaccaggtgaagcacggacggcactgcggtggcgtggaccgagccgacgggaaggtggacggcaatggcgtcggtggcggcggcaacggcaagaaggggggtgaggtcggtggcgtcgaggttgaaggcggcgaagcggaaggggacggagaggtcggcggcgaaggtggagagggtgtcgtggatgagctgcagctggagcgggtgatgggaggaggaggaggcggtgacgttgagggcggtgaccttgagggcgacgccggggtggcggtgggcgaggtcatgcatgagggaggcccactgctcgccgacaccgatgtcgaagtcgaggaggtggatgcaggaggcggagggtgcgagctcgtcgaggacggcctggacgcaggtgaagtgggcgaagtggagcagcggggagaggtcggagaaggacttgtaggaggtgagcttgaggaggaggtcgtgcgggtgcggctcgtggaggggcgggggcggtgtagaggaggaggaggagtcgtcgtcggagatgagggctcggcgcagggcgtccttgaaatacaaggcggagcggagtagcggcggggcggcggaggcggggaggcggtagttgatcgccgggcgcgccaagatgtgtcgggcggccaagacgtcgccggcctcggtgagtttggcggcctggaccagctgctccacagtactagtgttgtcgtcggccgtcggctttgggtttgggaaagacgaagaagctgggtggtggtggtgcaggcctcgatcagcgaagaagaaaggtgcaggcttagcgtagtcgaggtcgacgtcatcaagatcaaggagtggatggtggtggtcgttgatgacccagtggaggaaggcgttgtcgtggtggtggtcggcgtcgtcgagccatggcggcggcggcggcgttgaggccgcgtgggtgggcgggcggaggccgggcgaagtcagggtgaatgaagaagaagaagcgttttggccgctagccgaagagccagcttgctggcttgaccgcccaatgtcggttcctccctcccaaaccgacat

SEQ ID NO: 96836 - DNA, 1455 bp, Oryza sativa
  Clone ID: PAT_MRT4530_94896C.1
tcagcgacacaagggcgccggtccaccgtggtctgggaccaccgaggcggtccaccgccggtccacgggaaccgacggcccggatcgacccaagccgatcgggcggccacggggtggcgcgctggggcacgggcgcggctcaggccagccggccgagcgacggcgagcggcggcgcggccaccggcgcgggaagctgtggcacacgcgggctgcggcggcgagcggtgcctaggcatggcggcgacgtgcaagcggcggccagtgcggcaaagagaggaaaagaaaggaaggggaggaggagggagatgctcaccgagatgacgatgaccggcgcggggaaggacgacgacgaccacggtgatggcggcgccggcccggcaagcgagggggcggtcggggagcgtcttggcccgaggaaggagagagagagggattaggccgcgcgcggcgaccggagacagcgaggagaggccgccggaggcggtagaggtggtggtggctcgggttggcggctgaaccggggctccggtgatcgtttggggatttggagtggcggccggtgtgcggggcagcgcggcgaagccgagggtggcggcggatttgcgtggcgatggctgaggcggtgaggagtggtggcttgaggcgacacaggcggtggtggagctcgggtcgatggtggaagcagtcctcgggcgatggaatggacgggtggagtggcggccggggcgtggcacgatgcggcgaacccgaaggcggcatcggcgcggtgcggcagcggctagagtggcggtggcgggcagctggaggcggtggaaggggcggcggctcggtttcatggtggagatggaattccgacaatggaatggggaaacagagtggatgccgaggtagggcttggctcggtgatgccgaaggtggcggcggccctagcgacaggaaacggcggccggagctcgcctgaggtgggtggcgatggggagcagcgtggggagagcggggaaaagcgcagggagctcggggtggaggggggaaacggaagaggggagcacgagggtgctttatatagggctcggggaggcgggatcgggcccgagaggggtggaaaccagccggcgacgtgggggagagagagagagatgtgggaggcggcgacgtggccggattttgcggggagagtgggggaaaacggcgcggacgtgggcgacgaccgcgtccacgcacgcgcgggagaggcggcgacgtgggatgccgacgtgggcgaagtggagctcaatttggcgccaaaaattggggaaaagtgggggaaaatgtggaggagttggaggggaaccggtttcacttggtttgggtgcgagggcgcgagcgggagggcgccggatttggcgggacgtgggcggcaaccgccgaccatggcggcttcggcctgggaagccgaaggtaggaggagggcctga

SEQ ID NO: 96837 - DNA, 160 bp, Oryza sativa
  Clone ID: PAT_MRT4530_94897C.1
acataattagatttgtttgaatgggaaagaagcaaggaactggagaaaaacaaagaatccaaatagggaacgggctagacaaaacacaagttgctgggtagctagaaggaacaagcccatactagcgctgcgaagaccccaaaggagagaaaaccaaagc

SEQ ID NO: 96838 - DNA, 541 bp, Oryza sativa
  Clone ID: PAT_MRT4530_94898C.1
aacaaaaaaccccgaactgggatattaaaggggccaaaaaaaagggtcaaaaaaacaacaaagggcaaaggggggaagggtacaagcaaaccctggaaaaacaaaaagaaaagggttttaaaaaccagacccccaaacgggaaaaaaaaaccccccccggccagaaaaaaggaaagcagcagaaaaaaagcattgccaagggcccaggaaaaaacccggaacctttttagaactgggaaccctaaaaacccttggaaccatgggaaaactgggggccgaccccctgggagtcctttcccaggggggggggggccccgggggccccggaaaaatccccctcctccatgcccttggggaagaaccaagggaaaaaggcccccttggagaacaagagggcaaacttgggggcgaggggggaaaacaccccgccaacccgggggggggggagaaataaagcacacggccctttggacctgggccaggcccccccccggaacaaccggggggggtggtaattgatgccgcacttgaaccccggggg

SEQ ID NO: 96839 - DNA, 447 bp, Oryza sativa
  unsure (1)..(447): unsure at all n locations
  Clone ID: PAT_MRT4530_94899C.1
tagcgccccccccccccctggtcccttacccctttgttttaaacactctttttttttttttttttttttttttttttttttttttttttttttaaaggggggaaataattaacaataccttccccccaaaaaacaatttaacccccattttttaaaaaagccccttgctttgcccccctggctggcaagccgggcacagccactccccccaagaaccccnnnnccgtttaaacccaacggcccccacccaaaaaaacaccgggtcttttttggcctaaaaacccccaaaccggttcggtttcctttatttttagccccccctcccccccgaagaaggggggcgggcaatgggacaggccatggggcctcggcttcattgaagggaagggggcccccccccccaccccccggggcccccccccctgggggccaagaccctcccccggg

SEQ ID NO: 96840 - DNA, 273 bp, Oryza sativa
  Clone ID: PAT_MRT4530_9489C.1
atgcttgcctttgcccttgtattttgcatgttcctccttgagaagagtgtggaagcatacaagatctacattttaagattgaagactgagggaggccagggtcccaccctgtcccgggacccgggccctcatttgcccttgctgaggaaggccaggaagcctgtatcaggacctaggccctcccttgcccttatagataacacgtccctccttgagaggagtgttgaaacttacaagatatacatcttaagattaaggctgagggaagcctag

SEQ ID NO: 96841 - DNA, 276 bp, Oryza sativa
  Clone ID: PAT_MRT4530_948C.1
atggccggccgtttcgtgtttcctaaattggcctcccatctgtcttctaaatcaacaagaagcctcttccctagaaccgctgaggcatcgaggaacttcaacacctttccaagtgctcaccccaagcttaaaataaactgcccaaccactgggctgccctctgttgatcacaccaatcacttgatcaagcccctgggttgtgctagagatgccaacacaaccgctttatacagtacaactgtcaaggaccgactcaccccaattgtccgtgagtaa

SEQ ID NO: 96842 - DNA, 115 bp, Oryza sativa
  Clone ID: PAT_MRT4530_94900C.1
ggcgataaccgggcgtaacagccattggggagtaatctgggacatccatgtggaaggccaggatgcgaggcaccagaggcggttcggccaaaccaggggttcagccaacccctga

SEQ ID NO: 96843 - DNA, 303 bp, Oryza sativa
  Clone ID: PAT_MRT4530_94901C.1
caaggtgaacctaatttacaacgaactggacaaacattcgggctaaatacgaaacaagccccaggaacaaccaaaggctaaactaagagaaaacgagaccctacgacacaaaagggcgcaaagaccggaatctgaaaggacagaggaaaagaagcacagggccaacctgcaccaaaaggaccgcgaccgaggcggtaacgggggaggcgaattcgccgccagcccacccttaagctgacgctgcaaagtaagagcaaccgagacaattggaggagcaagagcaggccaaaacaccacgagcag

SEQ ID NO: 96844 - DNA, 288 bp, Oryza sativa
  unsure (1)..(288): unsure at all n locations
  Clone ID: PAT_MRT4530_94902C.1
tgtaccgcgtgcatgccgactgtcatatgcttcttctatatgggtcaccttaatattcatattcactgggcccgtcggttttacatacgtcggtgactggggaaaaatccttggcggttatcccaactttatatccgcctgtgcaggggcatncnnccctctttcgccagcttggcggtattatgcgatagatggcccgcatccgatcggccctttcccaacatgttgcgcatgccgtgaatgggcgatatggggaccgcgccctggtatgcggccgcattatagcgc

SEQ ID NO: 96845 - DNA, 309 bp, Oryza sativa
  Clone ID: PAT_MRT4530_94903C.1
aatgacttttatggaagacactttgaaaaattggatatttgctggtgtaaagtccatcaccggtccctaaacttgtactactgtgtcatcccggtccctaaactcacaaatcgaccgttcaggtcctcaaacttgtttgactgtgtcatcccggtctctaaacttgcagatcactcgtttagatcctccaactagttcagttgtatcaccccagtccctaaacttggatttgaatatcatctaggtcaaataggacggtctaaagaacaaactttatatcaaacttgtagccctcagggctgcaggaat

SEQ ID NO: 96846 - DNA, 1205 bp, Oryza sativa
  Clone ID: PAT_MRT4530_94904C.1
atgggatctatgtcatgcatcaacgacttcgccttccatccagggtaggcgtatcgcttcggcagcatcaatttcatcacagatgaatttggcaagatctctcttctcgactcggattcgaaccagtcgggatgagacaatctctcggctccgttcggcctcccaaatgccgctgagatctactccaaggctttctccctcgaggtggcttcaaaccactcgggagggatcgcatccacaacatctttttctccatcaagtttttatcaagaaatgcctgaatatcctccggtaaccatgtgactttcgccctccctcgcagcaatgtttggatcaagatcgccttccctccgtaggtcccgatctaatctagcctcgactaagattggatccagctccagagaggtcggtgtcctacttcagccactcgggttatgctcgccaactaccttagctcctcataagacagcttctacgacgacactgagatcggagatggatctgacttcgacgacgactatactccacttctcattggggtcttcatagctaatgccgaaactgacacccagatagcagcatgtctcgtggatgaagaaacagtcaaagtggagcaagaacaacgaacccggagagaacaaaaggagctcttacaccgagaagaagaagaacgcaaacgaaaggaggacaaaaatcgagttggccgatgctggacgcatggttcgagatctcataggtgaaactgatgtagacaacaccaatttttttcttacgcatcagcagaatgctgtcagggcggtaacccccgtcaacactctactcaacgcacactttactcaacgcaggactgcaggagccccggcccatgtgacgcctatccttaacaaggtgaaaaccatgggcgcggccaacatccccgacggtgaaggaggcagtcgacgggctactgaatctacagctcaaacgcctgccggcaaccgcctaccacatctccaaccaagagaatatcgagagcccgggcgcagcaggacaaactcccgtgcacctcacggggacaggagacgacaagaccagtcggttcactcgccagccagcaacaacagtgagagaatgttcaaattgccgagaatgcccccgaaatgtacccctcttgatctacaattaaaataacgttcaatggcctccaatgagtttatatctcctgc

SEQ ID NO: 96847 - DNA, 319 bp, Oryza sativa
  Clone ID: PAT_MRT4530_94905C.1
gctcggtgttgcggccccgaggctcagtgaagacgctgggctcggtgcggccgacggcgggctcggcgaagaagagtttcgtggtggcggagccgggctcggtggagggcgtcaccggtcggtggagccggcaccgggctcggtggaggcggcaggctcggtgtcggcggcggcgggctcggtggcggcggtggcggtctcggtggcggtggcggcgagggaggacgacggcggcgaagtaggagttggcggcggcgctagggttctaaggaggcgggaaactgtagcgggacttagaaaaattttcgatccgatctga

SEQ ID NO: 96848 - DNA, 728 bp, Oryza sativa
  Clone ID: PAT_MRT4530_94906C.1
ccggccgggaacctcgtccgcacataagagaaattcaataattacacacaaaaaaaataaggcataagaaggcagctgcagctgctagctgctgttgttgttggtagtagttttttgggcaccaattttccatggagacgaaggtgaggatgagctgcaggttgggcactatggtggccctggtgctggtgggcgtcgtgctggcggcgatcctgcaggaggccaccgtcgacgcggcatcgtccagcagcgactcgccggcggcgaaatcgggcaccggctacctcgactacggcaacctcaaggcgaagctgcctccaccgggcgtcgccgttaccaagaggccatgcatagcaaaagagaaatgccgcggctgatcgatcgatcgatcgatcatcaccgacgtacccagacggatgaaacggatcgacgtacgtactgcttatggtgtcagcgtgttcttgttttttttttcttttcttttctttctttccgatggaattgaaacgtgtgtgttcttgtttttcttcttctcatggcatcgccttggctttctatatataatgaggtttttaatgtcactaattaattaaccacctgggatatataggccacattggtgaaaatccaactgtttgtagcgagtatagtgcgtagagtcgtgctccagcattattaatacatcatcacaccgatgattaattcttctaaaaaaaaaaaaaaaaaag

SEQ ID NO: 96849 - DNA, 624 bp, Oryza sativa
  Clone ID: PAT_MRT4530_94907C.1
atggaggagaacggtgtcctcgtcgtagtcaacgacgggcgtccgccgctcaccagccattggaaacgccacatccgaagatggttgctgacgacggcgagaaagaagtggaggcagcagcagcggcaaggaaggagcggaggtagcggcggtggcaatggagaggtgagaagcgttggcagtagcggagcggtggcgctcttctcgccggatttggcggcgggcttcgagtggccatatccggcatcggggagcttgtggctgacggagctggcgaggcgagtggcgatgtcgatgacgacagccgtgcgcggggtggaggcgaatgacggtggccgtgcgcggcgtggaggcgacgacggcggccttgcgccgtgcagaggcgatgacgactcggaaggtactgagcggactcctgagaaggtgaatatatatacatttgagatgtatcacaccgagtacaaagaaaagcggtgggctacacatgctggtcggaatcactgtgagggatgtcggtcttgggcaacaatggttatcggggaagcggcgtccaaaggagtcccattaggcaattggtgcggggcaggccagtccaacgaccatggcaaggagtgccatggctga

SEQ ID NO: 96850 - DNA, 571 bp, Oryza sativa
  Clone ID: PAT_MRT4530_94908C.1
gtctcttcacgtgccccacccccctccccaccggggcggcttgtcacccacccatgggcaaatccatggcccccctccccgccgccgtcaccgccaccgcctcctccgccgtcacccccgccgacgacgaggcccactccctcctcccttccaccccctccaacgaggaggatgacgacgacctcgaggagcgcgcctacgaggcgaccgagaaggtcatcgtctcgatctcggacttccccgacgccgacgacgacgaggaggagtccgggctcgccacctccaccgccgcctcggggatcccgcccttctcgtggaggaagctgtggctgttcacggggccggggttcctcatgagcatcgcgttcctcgacccggggaacctcgagggggacctgcaggccggggcggtggccggggacacgctgctgtggctgctcctgtgggcgacctccatgggcctcctcgtccagctgctcgccgccagggtgggcgtcgccacggggaggcacctcgccgagctctgccgcgacgagtacccctcctgggcgcgccgcgcgctgtggctcat

SEQ ID NO: 96851 - DNA, 457 bp, Oryza sativa
  Clone ID: PAT_MRT4530_94909C.1
agatgattaatggtgaaactttatactatctaaaattaacagttgcctacacttaataataaagggaatatttggcggacaaacccacaatataaaatgggttaccccctttttttttcctcgattataagaagaaccaaatttttggaaatattagacctgagaatccggttttaacccgggggggacattaactccgggaacacccgccgactcgacgccgttgagcacctattttcttccggcataaccgccggcggcggccccgccgttgagcgcaaccaccgccgactcaacgtggtccagcaggtacccaaagatctttttcttaagccgttccgccgcctccgacgggggggccggcgccccgtccagccagtcgttcacccgtttcagctgccccagcgtcccggcggcgtcgccgtcgatcagccgttccacgtgcccgacgaaccac

SEQ ID NO: 96852 - DNA, 445 bp, Oryza sativa
  Clone ID: PAT_MRT4530_9490C.1
ctctctgaattctctctccaaagtccaaaccatggctcctgctcatttgacttcgggaagccatggccgcctgcctcacgtagctatgtggccgttcatggcgaaaggccacaccatcccgctcatccagctcgccaactacctgcgtcaccaccggctcgccaccgtaaccttcttcaccaccccgggcaacgccgcgttcgtccgtggtgggctgtcgtccggcgacgacgacgacgacgtagccgccgtcgtcgagctggacttccccgtcgacgcgccgggcatccctgtcaggtttccctaagtgatcgacaaacaagctgtggaaaacacacgcgaacatgaggaaacacgctgagttttgtggtgcgatgaagctgcaccttttcggtttttttcttctccttttattatgcaaataacagacttaggattcgatccc

SEQ ID NO: 96853 - DNA, 153 bp, Oryza sativa
  Clone ID: PAT_MRT4530_94910C.1
atggcgtgttttagtaaagctactttggtccaagctccggcgtccatcctgcccttggtggtggtgggctggtggcttcgatttactccgacgtcagcggccatggaggtcagcgtcggccatttcttctacttccggcgacatcatctgtaa

SEQ ID NO: 96854 - DNA, 606 bp, Oryza sativa
  Clone ID: PAT_MRT4530_94911C.1
ttttttttttttttttttttgtaccctcgatcctcaagcccaacatggtcaccccaggctctgacgccaagaaggtgtctcccgaggtcatcgctgagtacaccgaccgcaccctcagaggaccgacccgctgccgtgcccgccatcgtcttcctgtccggtgggcagacggaggaggaggcgaccctgaacctcaacgccatgaacaagctcagcaccaagaagccgtggtccgtgtcttctcttcggccgtgcctccacgagagcaccgtcaaggctggtccgacggagacatgagagcaggcctctacaggtcagcaactcaggctgctcgtacatacaaggtgacgctgtccctgagggcctccgagagctcacgtcaagactacaagtactgatttgccttggaggtgctggctgccattggaacattctgcggctgttgcttaatgtggttttgatatctagagggcaatctatggttatcttaaatgtcttgtcgtaataattctggaacctttttgtgtaacacattaccaaatatcaattgcctggattgaaatatcgttttaatcgaaaaaaaaaaaaaaaactcgtgccgaattc

SEQ ID NO: 96855 - DNA, 206 bp, Oryza sativa
  unsure (1)..(206): unsure at all n locations
  Clone ID: PAT_MRT4530_94912C.1
aaaaaaaaaagagaaggcgacgcgaaaagcagaaagganaaaaaaaaaactccgttctcttctgggangaacaggttgggggaaggtngangatgtgtnatgttgnggtngagngtgaattccccggtaggnttnccccccgnagatcccnttcgattcggggccttttncgggcgaaccccttngtcctncctcgnggtgcagtt

SEQ ID NO: 96856 - DNA, 1608 bp, Oryza sativa
  Clone ID: PAT_MRT4530_94913C.1
tcacctaccaggacaggaccccggcccacgccacaggtggcggccgccgccgcgcgccgcagccgcctcctcggcttcccacggatcggacgggtcgcagactcgcggcgcacactggcacccgatttgttggtttcttacccctcctacaaggcggccggacgcccacagatcggatcgggtcatcaactcatcatcgccccccttcaaaaggccacccccctccccctcccttctcgcctcattccccacagccgccgcctccttcctctcctcgatctccctattcgtcgtagcctcctccctcgttcgctccgcccgcaaccatgtcggcctactgcggcaagtacaaggacgagctcatcaagaacgctgcctacattggcactcctggcaagggtatccttgctgcggatgagtccactggcaccattggcaagcgcttcgccagcatcaacgtcgagaacgttgaggagaaccgccgctccctccgcgagctcctcttctgcacccctggcgccctccagtacctcagcggcgtgatcctcttcgaggagaccctgtaccagaagaccaaggatggcaagcccttcgtcgatgtcctcaaggagggtggtgtcctcccgggcatcaaggtggacaagggcaccatcgaggttgccggcaccgagaaggagaccaccacccagggccatgatgaccttggcaagagatgcgccaagtactacgaggctggtgcccgcttcgccaagtggcgcgccgtcctcaagatcggccccaacgagccgtcgcagctcgccattgatctgaatgcgcagggcctcgctcgctacgccatcatctgccaggagaacgggctggtgccgatcgtcgagcccgagatccttgttgatggccctcacgacatcgaccgctgcgcctacgtctcggaggtggtcctcgctgcgtgctacaaggccctcaacgagcaccatgtcctcctcgagggtaccctcctcaagcccaacatggtcaccccaggctctgacgccaagaaggtgtctcccgaggtcatcgctgagtacaccgtccgcaccctccagaggaccgtccccgctgccgtgcccgccatcgtcttcctgtccggtgggcagagcgaggaggaggcgaccctgaacctcaacgccatgaacaagctcagcaccaagaagccgtggtcgctgtccttctccttcggccgtgccctccagcagagcacgctcaaggcctggtccggcaaggcggagaacattgagaaggccagggcggccttccttaccaggtgcaaggccaactccgaggctaccctcggtacatacaagggtgacgctgtcctcggcgagggcgcctccgagagccttcacgtcaaggactacaagtactgatttgccttgggaggtgctggctaccattggaacattctgcggctgttgcttaatgtggttttgatatctagagggcaatctatggttatctaaaatgtcttgtcgtaataattctggaacctttttgtgtaacacattaccaaatatcaattgcctggattgaaatatcgtttttacggaaaaaaaaaaaaaaaaacccgcggcc

SEQ ID NO: 96857 - DNA, 897 bp, Oryza sativa
  Clone ID: PAT_MRT4530_94914C.1
atgaggatcatggtgcgcacgctgcgcggggactgggtggcgctcgacgtggacggcgccacgacgacggtggcgcaggtcaagggcatggtcatggcccgggagcgcatcgcggtggccatgcagcggctgttcttcgctggccggtgcctcgacgacgaccacagcacgctcgcggactacggcgttcggcacgactccgtcgtcttcctcagcctccgcctcgccaccgacgcctatcagaaggagatgtggttgatgcagccggagacaacgacgacgaagaaagaaatgcatcagcagcagttgttgcatgtccatgttgccgcagccgacgaggagaaggcaagatcctgtcacggctgcggccttgatgtgtccggcgatggcgcgaccaccgggctctccatccgccgccgacgtggccaccatctcggactcaatcacgttgcaatagagtacggggagaggcggacgccggtgcgatttttggacaccggatgggcttcaagattcgtgttgtacgccttctcctccaactccgacgacctcctcttcttctccagcgccggggaggagttcgccggctctagagggatggctgggggaggcggcaactcgatggtgggtggcggatcgggcgggtggcgacagagccgtagggctggaggagggcggtgggccggcgttggtggcaggggcaccttgccgccgacggctcgaggaggaaggaggggaggaggggggaggaggagggggaggaggctggtcgggggggtctcgccggcgccattgacgccctccggccagccggcaaggcgggcggcggtggcggcgggagatcgggcggagccgctcgcgagcgcgaagggaggggaacgggaggagaagaggtag

SEQ ID NO: 96858 - DNA, 876 bp, Oryza sativa
  Clone ID: PAT_MRT4530_94915C.1
atggcggtgagagttgagaacgtagagttcaacgtgaggacaggcaactaccctgaattcatgaacaaccttcgcgacaggctcgcggagcatcctgacctcgacgacgtctacgccggctgtcccgtactcgcgatgcaacgatgcccaaaacagccggcgaggtggatgtacatcaacctggtgggcaacggcgacgacagagcaaccttagccgtccgggatgacaatgtcaacctcatcggcttcaggaacctgaaaggacaatggttccacatgggcttctcggggatgagcaagccgattctccctgagccatccacatttctgggatgcgacggcagctacccaagcttacttggtggtcgcgatgaagacgacgttaagaatatgttggttaatgatattgacctgcgacaggtcgtcctgctggatgccgtccataagctgtcgggctacgaacaaccacctgatccatatggcgctgcagacgatgacaccaaactggatctggtgcacctgaccgtcgtcttctgcgagggcgcgaggatggctctgcactacgacgccgtgaacgatggccaaatcagcctcaacgagcggcaagtagattacttgcgtaactggtggcttatgtcacgggcgctactccaggacgagacaacaccatggccccgcaggcttagtagcgagaccggtatcaacgacgatgagcaggctcgccgtgtagtgctactggtgctcaacactagcactaccgtgcacgttcacggcgcggcggagcgccgcccactggtggagaaactctttgtagtcccggctcgtaacccccctttagtcccggtttccaaaccgggagtaccaatccgggactaa

SEQ ID NO: 96859 - DNA, 1023 bp, Oryza sativa
  Clone ID: PAT_MRT4530_94916C.1
atcgatcttgagctccagcttcatcttctcccggtgataatgtccaagctagtctcagctggttggtctcctgatctcgccatggatgcctacctgcacaccctgcaactgtgcaaggagcagcagcaagatgatgctcgtggcagtggcatggtgatggagccgaggagcatggagtacatcgccgcgctggccgccggcaaccaggcgcgccacctcctcgacgtcgcctcctccgccggcgggggcggcgcttcgtcgtcgtcgtcgtcatccccggccacggctgtcgcgctcgccatcgccgccgcgcggacgggaggccgcctggtctgcgtccgcgacgaccagcaaggcctcgacggcgtcaggcgccacctccgccgcctcggcctggcgacctccgcggtggacttccagctcgcgccgtcgccgtcggcggccgtccggcggctgcgccgcgtcgacttcgccgtcgtggacgccggcgtggagcgctgcggcgaggtgctcggggccgtggacgtggaccccatgggtgccatcgtcgtggtcaccaacgtcttccaagaagagaggacgagctggagctcgaggtctggccatggcgatggcagtagggtttgcagctatgggcaggtggtagggaagggcaggtcgatggtgttgccgatcggccatggcggcatggaggtgacgaagctagggctaggccgtagggtaggaggaggggggttgattggggcccacttgcagtggcagaggcagcagaagaagaagcttgtgagcacacccaagaggactttcttggtttgtgatggatcatcttgacttctcgagataattagctcatctcattaattaatttctagtttaaccttcttttttttttttgccctttcttgggagagattcatcagaaatatggtagccaaaactataaacttgtatgtaaatcgaaaaagaatagatgattggcatgcaatagatgatgacaaaaaaaaaaaaaaaaaaaaaaaaaaa

SEQ ID NO: 96860 - DNA, 426 bp, Oryza sativa
  Clone ID: PAT_MRT4530_94917C.1
tcacaaagaatgcacaaaatcacacaaatgcgggaaaaaagctgggcatgcagcatggggagccgcgtgcagcccggctgctcttacagcaacagcaccggctgatagctctaaaaacttgccaccgcagtggatagggatggtggcggcggtgaatggcaaggcggtgacggcaaagcggcggaggccgcgcgaatccacgctgcgcagcgccggttctgctcccgccattgtgctctccgccgctagctccccaacaaccccgccacggccccctcctcgctggcggcggtggcccagcgcccgcggccaaggagctccaccgcaccatcctggagatgcaagcggcgcacagaagccagtgctcgcggtggtgcacggcgcctgcgtcggcggcggcgtcgaggtcttggccgcctgcgccat

SEQ ID NO: 96861 - DNA, 591 bp, Oryza sativa
  Clone ID: PAT_MRT4530_94918C.1
ggacctggaaaggacaatccttgggaggttgaaaactggcgaggcgccgtgttcttggcgtccgacgagccaagttcgtcaccgccacaacctcgtcgtcgacggcggcttcacggtgggcaaagacctcctccgaaatccaccgagctctacttgaggtgcttgaatttatcaggcaaagcatagcccgtcatgtgcttatctcagtcttatccgtgcatcgacaagtatgtcatggtgttgcgtgttgtgggtaaaatatacgcacaaccatgtatgtaatagaaacttagaaactattgttggatcgaaaaataaatatctgatattcgtccacgctaacacgagtaaaattttttactgaatttctctcaaataaaatttttattcattagtaaatttgtaagtaaaatttttacccgtaatgacgtggacaaatcttcaatgtttatttttcaattcaatggtagttttcacgtttccaccactcctatttccccgtggtgtcgaatgttgctgcaagaacattcaaaatgtgtcgttccctgaaaacgatgagatcgctgttgctatccgcaaaaaaaaaaaaaa

SEQ ID NO: 96862 - DNA, 156 bp, Oryza sativa
  Clone ID: PAT_MRT4530_94919C.1
gccactcaggatcaatccaacttcggcaaccaagaacggagacagctggatcgagcccaaacgtgtaacagatgacgcaatgcccttgccctaccatttggtggtaccttggtctaccctattctgcctctggttgaaggaccattttaggtcatt

SEQ ID NO: 96863 - DNA, 407 bp, Oryza sativa
  unsure (1)..(407): unsure at all n locations
  Clone ID: PAT_MRT4530_9491C.1
ctttgttgtcgtgggcactaagcctaaattaacccagggtgtacatggaatatcagtgccatatcaaaccacagactagtgtaaagtagaagagacgtgtccatccaaaaacccataagctagaagcattatggggaaggattgcggcaagcacggcgacgacgacttccggcagggatgccggcgattcatcaccgtccttgtcgtcctcgccatcctcgtcggcattaattgcctcatcgtctaccctngttcttcgccccacccacccttgcttctaccttcaggacgccaccctccgccagctcgacctttccaacttctcctccaccgtcggcggcgtcctctccaccaccatccaggttacctgttgtttccgtatccctaatgatccgtgtggtgtttat

SEQ ID NO: 96864 - DNA, 2415 bp, Oryza sativa
  Clone ID: PAT_MRT4530_94920C.1
cttttcgaattctgctggtctccattgcggctactgttcttggggttgccctctctctctccttcctttggttttgggcggttttcttttgctgaaaaaaactagttcttgattggttcttgtcatctttgggaggacattgctctgggtgtgtgtcaagattgtgctgggagcataaagctgggatctttggccagattgtagagggcttctggttcttgtcactgggggtgctttagagcatttcttggtgtccattactgttctgggtcatagagtttccaatctttggcaattactcggaggaattcttgagctgtgtgctactgtttcctttccctgataaatcaaccaagggaagggaaggctgtatattttccctttcttgttcttgatctttgcaataattttgatcatcttgaagaaaagaagtgtaaagtgtttggctgtgaaatggctgaggtgaagcctgaggacatggtccatcatccacccatggaccagctccagggatttgagtactgcatagactccaatccatcctggggtgaagcaattgctttgggctttcagcattacattctttccctgggcactgctgtgatgatcccaacaatgctggttcctcttatgggtggaaatgatcatgacaaggcaagagttgttcaaacactgctatttgttactgggataaaaacactgctccagacattattcggcactcgacttcctaccatcattgggggctcatatgcatttgttgttccaatcctctccattatccgtgacccatcgcttgcgcaaattgctgatggccatactagatttgtgcagacaatgagagcaatacaaggctccctgatagtctcctcgagcattcagataattcttggctatagccaattgtgggcaatttgctccaggttctttagcccacttgggatggttccggtggtcgcgcttgtggggcttggcctattcgagagaggattccctgtgattgggagatgtgtggagatcggccttccaatgctcatcctgtttgtcgcgctctcccaatatctgaagcatgtaaatgtccggcatgttccagttttggagaggttttcgctgcttatatgcgttgctcttgtgtgggtatatgcccacatcctcacagcaagtggcgcctacaagcacacagccctgctcacccagttcagctgccgaacagaccgtgccaacctcatctcttctgctctatggataagcattccgttcccgttgcaatggggtgcaccaacattcagtgcaaatcatgcgtttggtatgatggctgccgtcgtggtgtcgttaattgagacaactggagctttcatggctgctgcccggttggcaagcgcaacaccaccacctgcatatgtgctgagtagaggcattggatggcagggaatcggtaccttactagatggtctatttggcactggtactggatctactgtttctgttgagaatgttggtcttcttggatcaacaagggttggtagcaggagagtgatacagatttctgcaggattcatgatcttcttctccatgctaggaaaattcggtgcactatttgcctccattccattcccaatatttgcggctatatactgcgtaatgtttggcattgtcgctgctgtgggactatcctttttgcaattcaccaacatgaactcaatgcgcaacctcttcattgttggtgtctccctctttcttggcttatcaataccagagtacttttctcggtataccacgagcgcacaacaaggaccagcgcacactaaggctggatggttcaatgactacatcaacagcgtcttctcgtctccaccgactgtcgccctcatcatggcggttctccttgacaacacactcgatgtcagagaggcggcaagggaccggggaatgccatggtgggcgcgattcaggacgttccgaggcgacagcaggaatgaagagttctacaccctgccattcaacctcaataggttcttcccaccatcttgagcagagcagagcagagctgccgaaattcagagaatgcaaagacaaagttccagatgcaccaagcagtgaaatgtagtctgcttttgatagggtagaacagaaagttgagctgacaaaatgagcaattttaccagcaggcaaggaggaactctcttctagctgtccacttgtacatagaaacgattcgtttttcttttcatcagcttcaacaccgaggatgtttgattttgctgtaagcaattaattaatatcttgtgaacaactggtcatattagtttgaataagaactgttagttataatttttttatccattaaaaaaaaaaaaaaaaagccacaagactactcccccccccccctccaaaaaaaaaaacctgcagcccggg

SEQ ID NO: 96865 - DNA, 2395 bp, Oryza sativa
  unsure (1)..(2395): unsure at all n locations
  Clone ID: PAT_MRT4530_94921C.1
gaacaagcaacaccatttaataattgcattctctagcgaaacaactcgataggccacactgtacatactaccaattacataggaattcatctcacttaaagcaaactcaaatggaaatgtaggatgttaataaatttaggtagcattacacaataaatcacatgtaaatagttcatgagtaggcacaccataagagtagaaaataggcaagantccatgaactaaggtccaacacttattccttcaccttgtacatccttttcagccacccaagtcttccttcacgtgtatcaagggtaagaaatatttccctatattcaggtttaataaataataaggtagccatgaaatgctcatcactgccttccacagctcctgcatcaacaactaactccattatctctgaaatactgcatcctcctcgacagatcctcacagatgattctaagttagttggcttctctttctcaatgagataactgattgctccatctgcataatttttctgaggatccattttgttatttgggacttcatcataagatttttgtaatattgcctcttcattttgcctattgacattcttacgagtcatctcgacatcatttgaagctatggaagatttattgccaccaatcatagcattgacgcaaatattagattcatcacctgctgaatctgaatccagcatgccttcaaatattatatttagcaaatcaacttttccaagtggttcaaagcgaaacttacaacaatccatcactgcctgaacaatgtgatctattatcttatttgtgatcaactttttcttgagcagggctcgaatgaaattaatatttcccagtgtttcaagtttcactaccctttctttatcccgttgctccatctctcggtcttgtccaatcaatttgccaatctcagaacatacggtgtgagcactttcgaatatttcttgacatttgttcgacagtgcttgtttgaacgtaatttcttcacaatcacagtcttcaggagggaatggtgtgaggttttgatttagatatgtgcaaagttgcgcatacgtcgaacagaaggctggctcagcaacaaccttttcaaatataagattaataacatccttcaaaatatcagcgctagagattcttgtttctattagctggcccttctgaagatcgaacatctttggtgaaaatgtgtttagtatacttttcaatgttttcagaacttcatctttgccagagataatgcctctctgatctttagaatcaaagtggaagcttgattggtcaggcttgttaaatttctcttgcttccaacctaaagaatagggttcttttgcttcagagaagttgtcccaaaatttctgttcccaattagtttgtgcagaccatgaatgccagtcacggctgtctgtcgcgtcaaaccgtttatatgatggagtttgtactatgaaatacaagactttgcatctttgaggaacattaatcagagcagcacaaacgatttctgccatgatgacatatgagaagggaaggatgctcacatgatctttctctgctccaaatcccgaaattttatcttcaccattcagttcaacattaatatcttgacaaaattttaagatgtccttgggcacttcgacattctgacaaagttggagaagttggtcccttgtgtaactgattcgttggtgaaaacttggaatccctggctgatggacttcttcggaggtaaaagtatgctcattcgattctccatggtcaagcaccgagtaaatgttcacctgagaggaaacttgattggcattacttgaaacgacccacttctcatgatctgagcctggatctgggtggtcaaacttgcagttagtgccaaatttgcagattccccggttcatgtagtatgagcacaaccctgtcccaggacgaagtggaagcccaagaacgttcagctttacttgctcaactttacttttgccttcaatatggtggcagtggcatgcattcccagagaaatactcttgttgtggtggcactggcatgcggggagggtggttgaacctgcaattcatcccaaacttgcagctcccgaacttgacgtagtagctgcagtcgggctcgccgggccgccgcgggaactgctcggccggcttcttgtcgtcggcgccatgctgcggcctcggatccgggtggttgtacacgcagctgatgccgaacttgcagctcccgaacttgacgtagtagctgcagtccggctcccccggtcgccgtgggtgctgctcctccaccttcttcgtctttcccgccaccggcggctttggcttcgacgtcgtctcgccgtcgccgacgacgacgggagtcgggcgcccccagaaccagtcatcgtcctgaggcat

SEQ ID NO: 96866 - DNA, 7233 bp, Oryza sativa
  Clone ID: PAT_MRT4530_94922C.1
atgtcgcaccgcgcgctgccgccaatgccggacacgctgtcggacgcgttcgccgccgcggtgctgatgtcgtcgacggacaagccggacacgctgccgccggggaggctgtccccggtctcgccgctcacgcactcctcatcctccaagctccccaccccgagctcctcctcgggctcctcgggctccctctcggtctccagggcccccgcctccgcgctcgcctcgcggaggagccattccggcgagatcccgctcccctccgatggcccgccccgtgggtcgcgccctggccaccgacggaccggctcgggccccctcatcttcacctcctgctccagctccgccacctcgccgctcaccaacgcgctcccggcggggaacatctgcccctccggccgcctcgccaagccgctgtcctcctgctccgccgcggccaccccgccggccccaaccccgccccgcgccgcccgccacgacgtgctcggctcgggcaccgccaactacggccacgggagcatcgtgcggtcgcgcagcggcggcgtcgtggtcgccgaggaggacgcggtggtcaggcgggccatgtccagcgccgacccggaggagctcaagaaggccgggaacgagcagtacaagaagggctactttgaggaggcgctcaggctctacgaccgcgcgctcgccctgtgccccgacaatgccgcatgccgcggcaaccgcgccgccgcgctcatcgggctccgccgcatcggcgaggccgtcaaggagtgcgaggaggcggtccggattgatccctcgtacggccgcgcgcaccagcgcctcgcctccctgcatataaggctaggacacatcgaggatgctcagaggcacctctcactggcgacccctcagcctgacctcctagagttgcacaaattacaaacagtggagaagcaccttgggagatgtatggatgcacggaaagttggggactggaagagtgtgttgagggaaagtgacgcttctattgcggcaggagctgactgctctgctatgctcttcgcctctagagcagaagctcttctacggctcaatcagcttgacgaggctgatctggcgatctcgagtgcttccaagttggactactcatcttcatgcacctcagacaacaaattctgtgggttccttgccaatgcatacctcttttatgtgcatgcccaagttgacatggcattgggaaggtttgaccatgctgtctcttctgtagacaaggccaggataatagatcaaggaaatgttgaagttgtaacaatgcataacaatgtgaaagctgtggccagagcacgatctttggggaacgagctgttcaattctggaaaattttcagaagcttgcttagcttatggtgaagggctcaaacatcaccctgtgaatccagtcctttattgcaatagggcagcttgcaggttcaaactaggtcagtgggagaaatccattgaggactgcaatgaagcactcaagattcaacccaactatccaaaggctttgctcagacgtgcggcttcctatggcaagatggagcgatgggcagaatctgtgaaagattatgaagttcttagaaaggaacttccaggtgacactgaagtggcggaagcctatttccatgcccaggttgctctgaagtcttctcggggtgaagaagtatctaatatgaagttcggaggagaagttgaggcaattactggaatggaacaattccagatggctacatccttgccaggtgtttcagtcatccatttcatgacacctttaaatcagcagtgctgcaaaatttccccatttgtgaataccctgtgtaccagatacccatctatcagtttcctcaaggtcgatataagcgagagccctgctgttgcacgcgcagaaaatgtgaggacggttccaacatttaaaatatacaaaaatggcctccagctttcccgcaagcgaccactggctagccaggacaaagccgtgactgaacacagcacgcaggacacaaatgttgctgatgactgttgctggttaagcaaagctcataatttagcaaagacatcaaagcaaacaaagccaacattatcgaattttgataatgccaaagtgtgtcaaaatttggcattaccaaaatgtggtgtggttgatgttgagtatagttatgtagacgggtttttgcctgccttgtttaacatcatggaggggttttcgtctcgggatcttacgtccttgggacaggtgattggttctcgactcggaggccagttcaagaaaattagtttttgctacgataacttaaggttgagcctagggcaaggatctgcaccctgtacaagttccctgaagacaatcttgcaaagccgcaattccaatctgcgtctctcctgcttgtttggcgttctcatggcgtcctctgccggtgggggtgataaagggatcatcactgcgatggttgcccacccgaagccggccaggggaggtgagattgtcatggcgaatcaaagggaggaggttctgaataaaggtactttagcaatcggggtagcaacaccagatgaaaaccaaaccacgatggaaggtgcgggtactgctgttgaggtggacagtacgactcatcaggggccagcagctttcattgagggggaggttgtggaggaggatgaggacgcaatcgaagtggttatagaggaagaggaagtgcagaaggctggccaatggactatattagcaagattctattccttgaagtctccaaatcttgccgctctctttgaagacatgcgtcgtgcttggcggctgcgatcagacatgacttacaaatcgctgagggataatttgtttatcatatcttttggtgctgagggggattataggtttgttatccaaggtggtccatggattcataggggggatgccctgttggtggcagagtttgatggcatcacctgtccgtcaaaggttactttggatgtgattccagtatgggtgcggatttatgatcttccactggtgctaatgacaaaagcaaggggtgagatatatggtagcaaactgggcagagtacgggaggtggatgttggggatgatggccgcaataaacatgacttcttccgtattcgtgttgatctctcagtcaagcgaccactaaaggataagttaaccatcaaaatctctgcacaaggtagagtggaaacaagaagttttgcacttcgatatgaaagagtgccacacttctgtttcatatgtggcttcatggggcatgctgataaggactgcgataagagaggtgcaaatgtggagaatccctttcgcttttcagctgatttgagatgctcacccttaaaaccgtttgagcgaaaagttaacaagagagatgtggaacagtgggatgaagccattccacccagagtggatgctcatgataattttgatgacaaggagaaggagggggatagttcagtagatgagcaattggctctgcaagccaatctgatgaatatggcagggacagaagggatagacaaagagcatgatgatagtcaagatgactggagtggcgggaataggaagagaacgcaagacacgacagaaattaacaatccggggcgggtccagcaagcgctggtaatataccagagtgcaaccgtgaaggatccggcggatagtagagaagccggcaaggacacaagagcgctgaagcgttccaggaagacggaaggaggttcggaggtgtctaattcggaggcaaccagccatggggtcgctgttcgtgatctcattgccttggtgaaagaggcaaattcccaggtggttttcctcagtgaaacgagacagaagattgaaagaatccgcagacttcgttctagattaggtttaaaaggttttgttggatgtaatagtgatggtttgagtggtggtcttgctctcttttggcatgagtctatctttatggatgttaagagtgtgaatgaaagatatgttgatgcgtatatgcatttgtctccggaagatcctctatgtcatgtaacctttgtgtacggagaaccgagagtggagaatagacatcgtttatggtctcggctcctggatctcaaacagtcctcccccctcccttggatgattattggagatttcaatgagactctttggcaatttgaacatttttctgtttctaaaagaggtgaggctcagatgagagctttccgagatgtgttacaaatatgtgagctggttgacttgggcttctcaggggtcccctatacttatgataaccgaagagaaggtagatcaaatgtcaaggtgcgtctagatagagcactagctgataatagttggagagacatctatagtaattcccaggttgtgcatctaacctcgtcctgttctgatcactgtccaattctcctgaagtttgctgcggacagtagacagtctaaccgaaagaagtgtctccactatgagatttgctgggagcgtgagccggcctccactgaggtgatttctttggcctgggctgaagcaggagaaaaaagaaccttaggggacattaattttgccctcggaaaggtaatgggagcacttcaggggtggagcaaggtaaaatttaagaacgttagccgtgctatagaaaaggccaggaaggatttggcaacccttgttagccacaatgctgactatagtgagatcaggcgatcctctgatgtcttgaatgaattactttatagagaagagatgctttggctgcaaagatctagaataagttggttgaaagaaggaaaaggtttcccggagatgaatgtggatctttgcaaagatttcactgagcaggaaattgcagatgctttatttcaaattggaccgatcaaagcccctgggccagatggtttcccagctcgtttctttcaaagaaactgggatgccattaagaaggatgtggtttcagccgttaaatctttcttcgaaacatcaatcatgccagagggtgtgaatgatactgcaattgtgcttattccaaaagtggatcagcctatggaactaaaagattttaggcccataagtctgtgcaatgtgatctacaagattgtttctaaatgcctggttaatagacttaggccaatcttggacgaattggtctcacaaaatcagagtgcctttgtgcccggtaggatgattacagacaatgctttgctagcttttgaatgttttcacttcatccagagaaataaaaatgcgaataaggcagcgtgcgcctataaacttgatctttcaaatgcctatgatagggtggactgggtgtttttggagcagacaatgtgtaagttgggtttcgctccccggtggattaaatggatcatgacatgtttgtcctcggtgagatattcaatcaaatttaatggaacccttctggatacttttgctccctcgcggggtcttaggcagggagaccccctttcgcctttcctcttcttatttgtggctgatggattctcgagactaatggaagaaagagtagctgctggggatattgcgccggtcaagatatgtcgaggtgctccaggcatctctcatctactttttgcggatgatactctgctgttttttaaggctgactgtgagcaggcaagactgatcaaaggggtgcttaatgagtatgctttaggcacaagacagctagtgaatccgaacaaatgttccattctgtttgatgatacttcccctgctgaaacacaggacgcaataaagaatttactgcagattgtgtgtcacaactttgaagacaaatatctggggttccccactccggaaggaagactgaacaaaggtaagtttcagagtttacaggagaaaatgtggaaaagaatcatcttatggggagaaaactatctgtccagtggaggcaaagaaatcatgttgaaagctgtgatccaagctattccggtttatgtgatgagtatctttagactaccagagtcggatggatcttgggacgttcagaaggtttcccgggtttttttgccgattgatgctgatgaaattctcaaaattaggacatcggtgcggctggaggaagatttcctagcctggcatccggataggctgggacaattttcggtgagaagtgcttataaactggcaatatcccttgattatgcagatgaaagttccagttcctctggacagaatccacagaagatatgggatctgatttggaagtgcaatgtgccccagaaggtgaaggtcttttgttggcgtgctgcaaacaactgccttgctaatcaggaaaataagaagaaacgtaacctggagcgttctgagatctgctgcatttgtgggaatgaaacggaggatgtcagtcacgctctaagtcgatgtccccacgcagtccacctctgggaggccatgaaagctacagggagcctatccctgaatgttgccggaaatgctacaggaggctcctggtttttcgaccaaattgagaatacaccagctgaggaaagaatgatgttgtgcatgatgctgtggcggatctggtttgttcgcaacgagttataccatggtaaagtaccgccccctattgcagtctcgaaaaggttcttggaaagttattgcagttctctgctcgaaataaaacagcatcctcacgctgatgtcgtcagagggaagcatgtggttcagcaacccacgcggatgagatcggaagcaaatcatctgcgtcgtgtggtgcctgcccgctgggagaaaccacagatggggtggatgaaactaaatgttgatgggtcatatgattcgaactcaagtaagggaggcataggtgtggtgctcagagacagtgtaggtactgtcatcttctctgcttgtggttttctggaaagatgcagcagccctctcgagtctgaactcctggcctgcaaagaaggcatcaacctggccctgcaatggaccctgcttccgatcattttagaatcggactgcctgatcgctgtcaacatgatccagtcggcaaagaaggaaatgtcccaacttgcttacttggttagggatattcgtgaattgatgatgggtggcagagacatcagggtcagcaagatccagcgtagtcagaataatgttagccatttcctggcaaatagaggccgaacaaattcttgttctgttttttggcctgatgaaagctgtaatcttatatcccaaactgttcatgatgaggctctagccgagtaa

SEQ ID NO: 96867 - DNA, 214 bp, Oryza sativa
  Clone ID: PAT_MRT4530_94923C.1
tggaacggggcagaaaatttttcatccattatttctccatcttgcattccgcaagaagaccgcttgttcgggggaaaagagttaaaaatgaccaaaaacgatcacaacacgttggcgtactccaacacgtactttcgggtctccactaaaacgtaaaacctctttagaagaggggaaccggaccttttttttggtggccctttacaacttgggc

SEQ ID NO: 96868 - DNA, 3765 bp, Oryza sativa
  Clone ID: PAT_MRT4530_94924C.1
atggggccgctgagtgtgaatgaaagatatgttgatgcgtatatgcgtttgtctccggaagatcctctatgtcatgtaacctttgtgtacggagaaccgagagtggagaatagacatcgtttatggtctcggctcctggatctcaaacagtcctcccccctcccttggatgattattggagatttcaatgagactctttggcaatttgaacatttttctgtttctaaaagaggtgaggctcagatgagagctttccgagatgtgttacaaatatgtgagctggttgacttgggcttctcaggggtcccctatacttatgataaccgaagagaaggtagatcaaatgtcaaggtgcgtctagatagagcactagctgataatagttggagagacatctatagtaattcccaggttgtgcatctaacctcgtcctgttctgatcactgtccaattctcctgaagtttgctgcggacagtagacagtctaaccgaaagaagtgtctccactatgagatttgctgggagcgtgagccggcctccactgaggtgatttctttggcctgggctgaagcaggagaaaaaagaaccttaggggacattaattttgccctcggaaaggtaatgggagcacttcaggggtggagcaaggtaaaatttaagaacgttagccgtgctatagaaaaggccaggaaggatttggcaacccttgttagccacaatgctgactatagtgagatcaggcgatcctctgatgtcttgaatgaattactttatagagaagagatgctttggctgcaaagatctagaataagttggttgaaagaaggtgatagaaataccagatttttccataacaaggcaaaatggagagcaaagaagaatagaatatctaaattgcgtgggcctgatggtaccgtagtgaagtcgactcatgaaatggagaaaatagcgacagattacttcaaggatatgtttacagctgacccctgtattgatcagtcaagagtatcccgtttgttccaggaaaaggtttccccggagatgaatgtggatctttgcaaagatttcactgagcaggaaattgcagatgctttatttcaaattggaccgatcaaagcccctgggccagatggtttcccagctcgtttctttcaaagaaactgggatgccattaagaaggatgtggtttcagccgttaaatctttcttcgaaacatcaatcatgccagagggtgtgaatgatactgcaattgtgcttattccaaaagtggatcagcctatggaactaaaagattttaggcccataagtctgtgcaatgtgatctacaagattgtttctaaatgcctggttaatagacttaggccaatcttggacgaattggtctcacaaaatcagagtgcctttgtgcccggtaggatgattacagacaatgctttgctagcttttgaatgttttcacttcatccagagaaataaaaatgcgaataaggcagcgtgcgcctataaacttgatctttcaaaagcctatgatagggtggactgggtgtttttggagcagacaatgtgtaagttgggtttcgctccccggtggattaaatggatcatgacatgtttgtcctcggtgagatattcaatcaaatttaatggaacccttctggatacttttgctccctcgcggggtcttaggcagggagaccccctttcgcctttcctcttcttatttgtggctgatggattctcgagactaatggaagaaagagtagctgctggggatattacgccggtcaagatatgtcgaggtgctccaggcatctctcatctactttttgcggatgatactctgctgttttttaaggctgactacaaatatctggggttccccactccggaaggaagactgaacaaaggtaagtttcagagtttacaggagaaaatgtggaaaagaatcatcttatggggagaaaactatctgtccagtggaggcaaagaaatcatgttgaaagctgtgatccaagctattccggtttatgtgatgagtatctttagactaccagagtcggtatgcgaggatctgaacaaacttgctcgcaatttctggtggggagcagataaaggaaaaaggaaaactcattggcgggcctggagctgtctgacaaaaccgaaacacaatggtggcttgggttttagggactttcgtctctttaaccaagcgttgttagcaagacaggcctggcgtctgcttgataaaccagatagtttgtgtgcccgagttatgaaggctaaatactatccaaatggatccttagtggacacggcttttggggggaatgcttccccgggatggagagctattgagcatggcttagcccttttaaagaagggcatcgtctggaggattgggaatggccggtctgttcgcatctggagagatccttggatccccagggaccattctcgtagaccaataactactaaaagaaattgcagggtgaaatgggtttctgatctgttgggacaggatggatcttgggacgttcagaatgtttcccgggtttttttgccgattgatgctgatgaaattctcaaaattaggacatcggtgcggctggaggaagatttcctagcctggcatccggataggctgggacaattttcggtgagaagtgcttataaactggcaatatcccttgattatgcagatgaaagttccagttcctctggacagaatccacagaagatatgggatctgatttggaagtgcaatgtgccccagaaggtgaaggtcttttgttggcgtgctgcaaacaactgccttgctaatcaggaaaataagaagaaacgtaacctggagcattctgagatctgctgcatttgtgggaatgaaacggaggatgtcagtcacgctctaagtcgatgtccccacgcagtccacctctgggaggccatgaaagctgcagggagcctatccctgaatgttgccggaaatgctacaggaggctcctggtttttcgaccaaattgagaatacaccagctgaggaaagaatgatgttgtgcatgatgctgtggcggatctggtttgttcgcaacgagttataccatggtaaagtaccgccccctattgcagtctcgaaaaggttcttggaaagttattgcagttctctgctcgaaataaaacagcatcctcacgctgatgtcgtcagagggaagcatgtggttcagcaacccacgcggatgagatcggaagcaaatcatctgcgtcgtgtggtgcctgcccgctgggagaaaccacagatggggtggatgaaactaaatgttgatgggtcatatgattcgaactcaagtaagggaggcataggtgtggtgctcagagacagtgtaggtactgtcatcttctctgcttgtggttttctggaaagatgcagtagccctctcgagtctgaactcctggcctgcaaagaaggcatcaacctggccctgcaatggaccctgcttccgatcattttagaatcggactgcctgatcgctgtcaacatgatccagtcggtaaagaaggaaatgtcccaacttgcttacttggttagggatattcgtgaattgatgatgggtggcagagacatcagggtcagcaagatccagcgtagtcagaataatgttagccatttcctggcaaatagaggccgaacaaattcttgttcagttttttggcctgatgaaagctgtaatcttatatcccaaactgttcatgatgaggctttagccgagtaa

SEQ ID NO: 96869 - DNA, 5132 bp, Oryza sativa
  Clone ID: PAT_MRT4530_94925C.1
atggcaaacgaaggaaaaaaacaatcgaacaaaaatctagccaccggacctcaccggaaacacgagtggtacgagtttgccaccgtggagctcgaagccaccgtcgtcgccttcgagctactgccactgcctcccaaggccagatccgggttttcgcctgccttgtttaacatcatggaggggtttttgtctcgggatcttacgtccttgggacaggtgattggttctcgactcggaggccagttcaagaaaattagtttttgctacgataacttaaggttgtctgccggtgggggtgataaagggatcatcactgcgatggttgcccacccgaagccggccgggggaggtgagatcgtcatggcgaatcaaagggaggaggttctgaataaaggtactttagcaatcggggtagcaacaccagatgaaaaccaaaccacgatggaaggtgcgggtactgctgttgaggtggacagtacgactcatcaggggccagcagctttcattgagggggaggttgtggaggaggatgaggacgcaatcgaagtggttatagaggaagaggaagtgcagaaggctggccaatggactatattagcaagattctattccttgaagtctccaaatcttgccgctctctttgaagacatgcgtcgtgcttggcggctgcgatcagacatgacttacaaatcgctgagggataacttgtttatcatatcttttggtgctgagggggattataggtttgttatccaaggtggtccatggattcataggggggatgccctgttggtggcagagtttgatggcatcacctgtccgtcaaaggttactttggatgtgattccagtatgggtgcggatttatgatcttccactggtgctaatgacaaaggcaaggggtgagatatatggtagcaaactgggcagagtacgggaggtggatgttggggacgatggccgcaataaacatgacttcttccgtattcgtgctgatctctcagtcaagcgaccactaaaggataagttaaccatcaaaatctctgcacaaggtagagtggaaacaagaagttttgcacttcgatatgaaagagtgccacacttctgtttcatatgtggcttcatggggcatgctgataaggactgcgataagagaggtgcaaatgtggagaatccctttcgcttttcagctgatttgagatgctcacccttaaaaccgtttgagcgaaaagttaacaaggtcagagcaatgcagaacactggagcagctcgcaatctgttcttccgtggagctggaagtgctggctcatcgtcctcaaagcagagagatgtggaacagtgggatgaagccattccacccagagtggatgctcatgataattttgatgacaaggagaaggagggggatagttcagtagatgagcaattggctctgcaagccaatctgatgaatatggcagggacagaagggatagacaaagagcatgatgatagtcaaggtccgaagttaaagagtgggtctaatgttgtggccctggctggatcaacaggggaggccataccctcaaaagagatgattcatgctattgcaaatcttcagcaacaagcctcctttggggatgggtcgtcagatgactggagtggcgggaataggaagagaacgcaagacacgacagaaattaacaagccggggcgggtccagcaagcgctggtaatataccagagtgcaacggtgaaggatgcggcggatagtagagaagccggcaaggacacaagagcgctgaagcgttccaggaagacggaaggaggttcggaggtgtctaattcggaggcaaccagccatggggccgctgttcgtgatctcattgccttggtgaaagaggcaaattcccaggtggttttcctcagtgaaacgagacagaagattgaaagaatccgcagacttcgttctagattaggtttaaaaggttttgttggatgtaatagtgatggtttgagtggtggtcttgctctcttttggcatgagtctatctttatggatgttaagagtgtgaatgaaagatatgttgatgcgtatatgcgtttgtctccggaagatcctctatgtcatgtaacctttgtgtacggagaaccgagagtggagaatagacatcgtttatggtctcggctcctggatctcaaacagtcctcccccctcccttggatgattattggagatttcaatgagactctttggcaatttgaacatttttctgtttctaaaagaggtgaggctcagatgagagctttccgagatgtgttacaaatatgtgagctggttgacttgggcttctcaggggtcccctatacttatgataaccgaagagaaggtagatcaaatgttaaggtgcgtctagatagagcactagctgataatagttggagagacatctatagtaattcccaggttgtgcatctaacctcgtcctgttctgatcactgtccaattctcctgaagtttgctgcggacagtagacagtctaaccgaaagaagtgtttccactatgagatttgctgggagcgtgagccggcctccactgaggtgatttctttggcctgggctgaagtaggagaaaaaagaaccttaggggacattaattttaccctcggaaaggtaatgggagcacttcaggggtggagcaaggtaaaatttaagaacgttagccgtgctatagaaaaggccaggaaggatttggcaacccttgttagccacaatgctgactatagtgagatcaggcgatcctctgatgtcttgaatgaattactttatagagaagagatgctttggctgcaaagatctagaataagttggttgaaagaagtgaagtcgactcatgaaatggagaaaatagagacagattacttcaaggatatgtttacagctgacccctgtattgatcagtcaagagtatcccgtttgttccaggaaaaggtttccccggagatgaatgtggatctttgcaaagatttcactgagcaggaaattgcagatgctttatttcaaattggaccgatcaaagcccctgggctagatggtttcccagctcgtttctttcaaagaaactgggatgccattaagaaggatgtggtttcagccgttaaatctttcttcgaaacatcaatcatgccagagggtgtgaatgatactgcaattgtgcttattccaaaagtggatcagcctatggaactaaaagattttaggcccataagtctgtgcaatgtgatctacaagattgtttctaaatgcctggttaatagacttaggccaatcttggacgaattggtctcacaaaatcagagtgcctttgtgcccggtaggatgattacagacaatgctttgctagcttttgaatgttttcacttcatccagagaaataaaaatgcgaataaggcagcgtgcgcctataaacttgatctttcaaaagcctatgatagggtggactgggtgtttttggagcagacaatgtgtaagttgggtttcgctccccggtggattaaatggatcatgacatgtttgtcctcggtgagatattcaatcaaatttaatggaacccttctggatacttttgctccctcgcggggtcttaggcagggagaccccctttcgcctttcctcttcttatttgtggctgatggattctcgagactaatggaagaaagagtagctgctggggatattacgccggtcaagatatgtcgaggtgctctaggcatctctcatctactttttgtggatgatactctgctgttttttaaggctgactgtgagcaggcaagactgatcaaaggggtgcttaatgagtatgctttaggcacaggacagctagtgaatccgaacaaatgttccattctgtttgatgatacttcccatgctgaaacacaggacgcaataaagaatttactgcagattgtgtgtcacaactttgaagacaaatatctggggttccccaccccggaaggaagactgaacaaaggtaagtttcagagtttacaggagaaaatgtggaaaagaatcatcttatggggagaaaactatctgtccagtggaggcaaagaaatcatgttgaaagttgtgatccaagctattccggtttatgtgatgagtatctttagactaccagagtcggtatgcgaggatctgaacaaacttgctcgcaatttctggtggggagcagataaaggaaaaaggaaaactcattggcgggcctggagctgtctgacaaaaccgaaacacaatggtggcttggcttttagggactttcgtctctttaaccaagcgttgttagcaagacaggcctggcgtctgcttgataaaccagatagtttgtgtgcccgagttatgaaggctaaatactatccaaatggatccttagtggacacggcttttggggggaatgcttccccgggatggagagctattgagcatggcttagcccttttaaagaagggcatcgtctggaggattgggaatggccggtctgttcgcatctggagagatccttggatccccagggaccattcttgtagaccaataactactaaaagaaattgcagggtgaaatgggtttctgatctgttgggacaggatggatcttgggacgttcagaaggtttcccgggtttttttgccgattgatgctgatgaaattctcaaaattaggacatcggtgcggctggaggaagatttcctatcctggcatccggataggttgggacaattttcggtgagaagtgcttataaactggcaatatcccttgattatgcagatgaaagttccagttcctctggacagaatccacagaagatatgggatctgatttggaagtgcaatgtgccccagaaggaaaataagaagaaacgtaacctggagcgttctgagatctgctgcatttgtgggaatgaaacggaggatgtcagtcacgctctaagtcgatgtccccacgcagtccacctctgggaggccatgaaagctgcagggagcctatccctgaatgttgccggaaatgctacaggaggctcctggtttttcgaccaaattgaaaatacaccagctgaggaaagaatgatgttgtgcatgatgctgtggcggatctg

SEQ ID NO: 96870 - DNA, 1851 bp, Oryza sativa
  Clone ID: PAT_MRT4530_94926C.1
atggagttcttctccgatccggttacgtcgtttgcagggttttcgcctgccttgtttaacatcatggaggggttttcgtctcgggatcttacgtccttgggacaggtgattggttctcgactcggaggccagttcaagaaaattagtttttgctacgataacttaagactccgtttcagggatgttaggatccggaaggggaagaagtgccatgttcaatctaatctgttggagtctgtctcggtcaaggactctgtcgttcagtgctataaattggagagcctagggcaaggatctgcaccctgtacaagttccctgaagacaatcttgcaaagccgcaattccaatctgcgtctctcctgcttgtttggcgttctcatggcgtcctctgccggtgggggtgataaagggatcatcactgcgatggttgcccacccgaagccggccgggggaggtgagatcgtcatggcgaatcaaagggaggaggttctgaataaaggtactttagcaatcggggtagcaacaccagatgaaaaccaaaccacgatggaaggtgcgggtactgctgttgaggtggacagtacgactcatcaggggccagcagctttcattgagggggaggttgtggaggaggatgaggacgcaatcgaagtggttatagaggaagaggaagtgcagaaggctggccaatggactatattagcaagattctattccttgaagtctccaaatcttgccgctctctttgaagacatgcgtcgtgcttggcggctgcgatcagacatgacttacaaatcgctgagggataatttgtttatcatatcttttggtgctgagggggattataggtttgttatccaaggtggtccatggattcataggggggatgccctgttggtggcagagtttgatggcatcacctgtccgtcaaaggttactctggatgtgattccagtatgggtgcggatttatgatcttccactggtgctaatgacaaaagcaaggggtgagatatatggtagcaaactgggcagagtacaggaggtggatgttggggacgatggccgcaataaacatgacttcttccgtattcgtgttgatctctcagtcaagcgaccactaaaggataagttaaccatcaaaatctctgcacaaggtagagtggaaacaagaagttttgcacttcgatatgaaagagtgccacacttctgtttcatatgtggcttcatggggcatgctgataaggactgcgataagagaggtgcaaatgtggagaatccctttcgcttttcagctgatttgagatgctcacccttaaaaccgtttgagcgaaaagttaacaaggtcagagcaatgcagaacactggagcagctcgcaatctgttcttccgtggagctggaagtgctggctcatcgtcttcaaagcagagagatgtggaacaatgggatgaagccattccacccagagtggatgctcatgataattttgatgacaaggagaaggagggggatagttcagtagatgagcaattggttctgcaagccaatctgatgaatatggcagggacagaagggatagacaaagagcatgatgatagtcaaggtccgaagttaaagagtgggtctaatgttgtggccctggctggatcagcaggggaggccataccctcaaaagagatgattcctgctattgcaaatcttcagcaacaagccttctttggggatgggtcgtcagatgattggagtggcgggtatatgaagaggatgccagacacttacgaaattaacaagcccgggcgggtccagcaagctcttgtcatatacccgaatgcaaccggtgaagcatgcgcg

SEQ ID NO: 96871 - DNA, 476 bp, Oryza sativa
  Clone ID: PAT_MRT4530_94927C.1
tttaactgcaggctaggacacatcgaggatgctcagaggcacctctcactggcgacccctcagcctgacctactagagttgcacaaattacaaacagtggagaagcaccttgggagatgtatggatgcacggaaagttggggactggaagagtgtgttgagggaaagtgacgcttctattgcggcaggagctgactgctctgctatggttggatcccatctttcttgtactatggtgttgagtagccctttcttgattaaagggcatacacttatgtaattcaccatttgcagctcttcgcctctagagcagaagctcttctacggctcaatcagcttgacgaggctgatctggcgatctcgagtgcttacaagttggactactcatctttatgcacctcagacaacaaattctgtgggttccttgcccatgcatacctcttttatgtgcatgcccaaattgacatggcattggga

SEQ ID NO: 96872 - DNA, 422 bp, Oryza sativa
  Clone ID: PAT_MRT4530_94928C.1
aaccccagccccgcaaaataaaattatgggggatcaaacatttttttgcccccaaaagagggggggagggaataacggggtgggccaccggcccaaaaaaaattaaaaaaggggagcgcggccaaaagttttgggaacaaaaaaaaacaagggaaactctaaaacaggggcaaagggggcatcctgataaacgctttgggccgggacaaggggggccaaaaaagttcgtcaccaaccccaaaactgaaaaaaaaaaagccagggaaaacgggttgaaaacattctaaaaattttttatgttcaccaaaaactggccccaaaaaatgaaagggacccacaaacaccccttgtaccggaacatgaccccgaggaccccaaaaacaacggggaggaaccccgggtaatcaatgggcaggtcctgc

SEQ ID NO: 96873 - DNA, 1749 bp, Oryza sativa
  Clone ID: PAT_MRT4530_94929C.1
atggtaaagaatcttaggttggctctcacgaggttggatgaaactgctgctggtgttggtacattccttcatctaacaagccgttttggtagtgctctcttgccagatcatgctgaaaagattaatcaagagactagctccactttggtggccactgagatctttggccgtgacacagagaagaacgaggttatgaggtggttggttgacaatatagagggagattcgaacactcctggaatcaaccgagtccctgtttctgcaataattggaatgggggcaaggataacaaaaaacatcttggaggcacttacaaaacagaagcctaatgctaatactttggaagcattgcaacacattctcaaagagaatctcgaatcaaagaagtttttgctcatattggatgatgtttgggaagacagcaattggggtgaatggcaaaaattaatggctcctttccagaacagaccccataacggaagtagaatcctgttgacaactcgaatgacatctgtagcagatatggttacaagtgtgatgcgaagtaataatgattatatgaacctaaatggattagacgaatatcacaattttatgatgttcaagaagtatgccttttatggtatgaaaactgaagattatgaacatctcctgccacttgctgaaaacatagcaaagaagtttcaagggtgtcccttggtgacaaagattgcaagcgagcatctcaggagcaatctttgctttagatactgcagtatatttccaaaaggttatgaatttaagaaggacgaaatagtgaaaatgtggatggattcaggattgatcctaattgatagtggaacagaaaggccagaagacatcggagaaagatacttggtgcaattggcaagaaaatcattctttacttttgcgacagtgggagatccttgtagcaaattctacgcagaatattatgtgatgcatgatttagtacatgaattggcatgcagtgtttctgttggtgaatgtctaagacttgaatctagtggctatatgcagcacaagtgtacagttagacatttatggattgcaaacttcaacaagttaacaaccgaggagattaaggcaatttccagctttgagaatttgcgttcacttatcattgaagactcctatcatgtcaacgatgtttggatagctgcattggaggaagttgtacagcttctaagaggattgcggttattgagcttaaaagggataaccaagttatgtttggcaaaagaagttgttaataagcaccttcgttatatctctttctctgggatgcaggatatagatggaatctctaaactctatcatttgcaagtgcttactgcagtgaaaagaataagtacagcaccgaaacaagtgaataatatcgaaaacctttctcatctgcggtatgtatcatatggcagtaacggttttggtgaattttttgttggcagattaacttcacttcaagaattgcacaattttgagattcaactgaaggaaggttacagaataagttcactgaggaatttaagcagtatttgcaagctacagatttgcaactttgagaatgttgggacccatgaagagattattgaggctaagctaagagataaatcatatcttagatcgttgtccttaaactggtctgagactactaatgtattgagccacattctcatcttgaaaatctggaaatatcagggtataatggtcttcgatttccaacttggctaa

SEQ ID NO: 96874 - DNA, 1157 bp, Oryza sativa
  unsure (1)..(1157): unsure at all n locations
  Clone ID: PAT_MRT4530_9492C.1
gtgtgttttttttttttttttttttgaatctgaaatttctgctctgctcgtttattctcaatgcacaaaatgtacagatatcaattcgcaaccaatgaaccaaaccaatatcaatgctcaaggaagaaaaataaatttaaaaatgtattgatctgtactgtacgtatacgaagctactcctcaatatctctgtatttttagctggtgtatgaatttgaatcggtgaaacaaaacgcaaaaaatggatcttattgggtaggaataatcatctagcggaggctcctctccatcatctcgttgtactgcagccatgagatttgcctctgtagcttcatctgcgcgtggaatttggcgatgaactcctccgccttggcgtccacgccggcgtcctccgtcacggcggcggcgctcgcctccagcatggacagctcgaggagctgctcctccatcgcgccgtcgcggaagctctcgtcgtccacgccgccgcactcgcccggctcgccattgtagtcgtaatacccgacgccgccgccgcactcgggctccgtgtcgcggcgggcgaagaagtagcggtcctcgtcgccgtagagcccgggcgtgtccgggacggcgggggcgatgcaggggattaggcggagcacccgcgccgacggcgtgcggaaccggaacgccggcgtctcctcgatcgagtactcccgctcgccgtaccccaggcggtcgcctcggccgacgacgccgaggcccacgccggcgcgccgcaggttgctgagcaggcggaggctgtgcaccgcgctgcccttcctcgcccagagcaccgccaggcgcagcagccgccacgcccgcctcccgatcgacgccttctgctgcttctgtttctgcttcggattcgccgccgctgccgccaccaacgccattgccgcaaccgcaaacaccagaattcagaggaagaaaacgaccgcgaaatgcagcacccgatccgctcttgctttcgcctagtagttggttgattgatttcttcggaatcggcgcgtgtgatgtgtgctgatgtgatgagatgagatgatacgagacgacaagatgaggtattaataggtatagggggggatnctnctttgcgttgaggcgaggngggaaggaagcgagcgcgttagttgctg

SEQ ID NO: 96875 - DNA, 580 bp, Oryza sativa
  Clone ID: PAT_MRT4530_94930C.1
tagactttaccattctcatttctcaatcaagcagggaacaagtagttcagagaaccccatagatactctgttattgcagatccctttcttctccaactcaggtaaaaatctgggggcgctcaggctcatcgacgacggggcagagagggcttctccggtgagggtggaggggagcgccgagcgcccccgcgctggaggaggggcgcgccggcaacgccgcccccgcacgtggctggcttcccgacggcgtcgagctgcagaagcagcctcggtgtcggtgcactcagtagcagtggtcgtaggcgacggtggtggcgatgtcggcggcggagaggccgaggtcagcgaggaagacgatggcggcgtctggcctagacggcgatttgagcgtaggtcgtcgaccgcgtgaaggaagcgctcgtcttcgtcgtcgtcgagttccgaggccgagccgcagcaacagcgccgcctctccatcgagctcagcatgccggagatgagaaaggagggaggggatgaggatggaaacggagacagcgtgagagaggagacggaaaaaggggcgagagtggcatgattc

SEQ ID NO: 96876 - DNA, 215 bp, Oryza sativa
  Clone ID: PAT_MRT4530_94931C.1
atggagacagggatttttatacaggttcgagcccctgaattgtcaggtcaacgcttcgttttcttgaaggaatctcagcagtctggatctaacaggttctggcccaccaagaccacccactactacgagtacgactgctggctgcagttcgcaccgccgccggggaacggtacgccggcggtcaccggcggcgtcaagtgcggcaagcacaagtg

SEQ ID NO: 96877 - DNA, 265 bp, Oryza sativa
  unsure (1)..(265): unsure at all n locations
  Clone ID: PAT_MRT4530_94932C.1
ctgccgctgatgtgcgagccgaaatcaaatctatcgacgaggtttcgtgcggttagtgtgggatcgatcgatttgctcggtagtatctgtaaatccgctcgctgttactggtttggtcgctcgctcgtcagatagggtttcgttcgctgctctcgcaaattggtcgtggactcgtggttcagcgcgcgtgcatgtttgtaggatgggagcgtaggttgtggagtagtcgaacaagtaagggatgggagcataggttntggattag

SEQ ID NO: 96878 - DNA, 395 bp, Oryza sativa
  Clone ID: PAT_MRT4530_94933C.1
aggcacaaccacaaaggcaatatatccaattgcaaggccaatgcctacggagcagattttgggcagtcaaagttttttgatggagaactagccaaccaaagaatttatttttggttcagtcggggatttccatagagaatcaaactcattggtggcaaatgagccttcgaattggaaaagtagcatctcggacatgtggggcccgcactatcgcaaccgccatgtcgaacaaaacccggattaaaaccactgaaggacctaaagggaacggttttagatatcaaagccgttctgttaacttgctcttcaaatatcaaagccgttctgttagcatcgaaaagaagagtggtaagctcccagagatccacgatgatgatcaaattagtagccgccac

SEQ ID NO: 96879 - DNA, 383 bp, Oryza sativa
  unsure (1)..(383): unsure at all n locations
  Clone ID: PAT_MRT4530_94934C.1
gagatggcgccggggtcgccgcgcgccgaggaggagcacggcgtcgaggcggaaccgaagcccgaggtggagatcccggttcctgaggcgggcaccgagatggaggtggacggggggcaagccaccggcggcgaggccgagacggagaaagcggtcgaacaggtggtgggcggagagatgcaggaggcggaggaagaggcggaaggcgagtgggagatggtgacttgcagaatcccctttggaggccgccgccgccgacgacgacgtggaggccgtggagagcttcggcggcgcccgttgcgcggttcgacgaaccggcgttccaagatnaggagaaagagaaggaggaggggttgagattnaagaagttatttgagattgtt

SEQ ID NO: 96880 - DNA, 305 bp, Oryza sativa
  Clone ID: PAT_MRT4530_94935C.1
ataaattatattttttttttttttttttggttgttcttttaacaaaattgtgttttttaaaaaaaacttttatgttaaagtacacatcatggtcttaattggtgtcaacaaacatgtgcatttgccacgaaacttcggtttaaaacaccttcattttttatttagcgcccgcaaaagcccctgggaagggctaccctcaagtgactcatgcaagatcctgaaaatgattaactgggggtaaagggcctccaatcaatggattgttaaaggatatgcttccataaagcaaaagcagagccctccag

SEQ ID NO: 96881 - DNA, 2846 bp, Oryza sativa
  Clone ID: PAT_MRT4530_94936C.1
cctgtatcagaatctgtgagaccaagctactggagattgatggaatctcgtatcatgaccccaagaagcaagaggaggaaatttgtaccattcggagaaggtgcggtgctacctgaggagatgctgacggaggtgttcctacgactgcccattaaatccatccttcgtttccgggctgcctgccactccaggtatgcaatgttgtcttcccaggatggtggtgatgtctactgatggtcctcttggtgcgtatgtcaatcctcacggttttgtccatgaaaccatcacaattttgtcaactctacatcacgagaaccgaggcaatgccaccacatcctaagcttctgttcgtctcgcctacagcaaatttcaactccactgcggtgtacaagtgctcgccatcgaagcccattgatgacctgctgttcacactcgatgatgtgcgtggaaactatgtggaagtggcaccttcaccatgccatggcctcaccctcctgtataatgctgttgcgccagcttactacgtcttcaatgcaactacacgggcaatcacacggttgccaccttaccaagatgtgattcatgccactgctggcgttgggtttgatgcccggacgaaggagttcaaggtggtgaggctttttcgaggaaaatcgcatgagatccattctgtaaagtgtgagatattcattcttgggggtgaggaaggggatcattggaggcctaccgctggtggagtacctttcaggttctgtagttttgctctttctgctatccgcaatgcagtggcgaacaaacttcagccagtttttgttaacggatttctccactggttgatcaacccctcgtttttactcaaagcaccaagagctgctatcatatcattttctctcactgatgaaaccttcagatggatccgatcaccaccctttgaggtatccagagtgcacttggctgagcttgatgatcagttgtgtatggtccgagaccttcgtaatggcttgcctactggtagcatgtttgaaatttggaggctgaatgactataactctggtgattggtcgcttgattaccgaattggtttgacagggaatttgccaagagatttacttgagccacgaattgtgaaagttattggttcctttggtagctacagatcaagcaagaagataatcatcgctacatctaagcacaagggaatgttgtgtgctgtcctttcaaatccagttgcagataagttagatatatggaagtgggatcatgttgacccaatagatggaaaggcgtcgcagcaacagaaccctggagttaacagaaatttccacattgccagatgccaagatgttcctaagaagttctctcagtggaaactattattggctccgtgcgagaagtttgctaacccttcaagtgcttcatcagggaagaatccattttactccagagaccaatctaaggagctaaatagtgccggcgtctccgtgattctccccgtcccgcggcgcaccggcaccggcaccggcaccggcggcgagatggcggactgggacggggtcccggcgagggagcggcggcagatggaggagatcctgcagctcgatatggaggagctcaacgtggagatggtcaacgacgacggctcctcctccgaggaggcgaacggcggcgacgacggcgccgacgccttcctcagtcctgcgggtgttgtcctatttcctggagctaccctgcctctcagactaattcagggtagatttgtagcagctgttgagaaagctttgaggcaggtcgatgctccatgcacaattggtgtgataagacaacttgggaggatggatgatggttcattaaatgttgtagcccgtgggcagcaaagatttcgtctgaagcgtcattggatggatgttgatggggtggtgtggggtgatgtccaaatcattgaagaagatactcctttaagaaccccaagggatgcatttgcacagctagcatcatacctctggagacagataatcacacacccaagcatggatgattacgtgagaaaaccagatcttctgtcattttccattggaagcaaacttcctgtatcagaatctgtgagacaaaagctactggagattgatggaatctcgtatcgtcttcgaagggagattcagcttctcaaggcctttaatctcataaaatgtagatgctgcaagtctctcatagcaaagcgtagcgacatggtagtgatgtctactgatggtcctcttggtgcgtatgtcaatcctcacggttttgtccatgaaacaatcacagttagcagggcaactgggcttgctcttgatggcaatccttcaacggttcacagctggtttccaggatactcgtggacgattgcatcatgtacggactgtgagtccaacataggctggttgttcaaagcaaccaagaagaatctgcgaccgagatccttctgggggatccgtagctcccaaattgcagatgatgcacaagaactagatcaggacgaatgatgctccgtgtacagtagtaaactttgtgtgcccctccctttttcttatgaagttatggaaaacactttattctctggtccataggcctagttctccgtacctgagtagtggtcgttgtgacgatcgctatagaataaccacttcctcctgtgtgtattacacaaccattgccttatgctaaagttccgtcacagaattttttgaaatgtagtgttactagaaatccatagtacaagatgaatgatgatatgatcagatgtttcaagcaatggtttgacatgtcttatgagcacatagaagttggtgcttgataccttcacttgaggc

SEQ ID NO: 96882 - DNA, 2454 bp, Oryza sativa
  Clone ID: PAT_MRT4530_94937C.1
atgaccccaagaagcaagaggaggaaatttgtaccattcggagaaggtgcggtgctacctgaggagatgctgacggaggaattttgtcaactctacatcacaagaactgaggcaatgccaccacaacctaagcttctgtttatctcgcctacagcaaatttcaactccactgcggtgtacacgtgctcgccatcgaagcccattgatgacctactgttcacactcgatgatgtgcgtggaaactatgtggaagtggcaccttcaccatgccatggcctcaccctcctgtataatgctgttgcgccagcttactacgtcttcaatgcaactacacgggcaatcacacggttgccaccttaccaagatgtgattcatgccactgctggcgttgggtttgatgcccggacgaaggagttcaaggtggtgaggctttttcgaggaaaatcgcatgagatccattctgtaaagtgtgagatattcattcttgggggtgaggaaggggatcattggaggcctaccgctggtggagtacctttcaggttctgtagttttgctctttctgctatccgcaatgcagtggcgaacaaacttcagccagtttttgttaacggatttctccactggttgatcaacccctcgtttttactcaaagcaccaagagctgctatcatatcattttctctcactgatgaaaccttcagatggatccgatcaccaccctttgaggtatccagagtgcacttggctgagcttgatgatcagttgtgtatggtccgagaccttcgtaatggcttgcctactggtagcatgtttgaaatttggaggctgaatgactataactctggtgattggtcgcttgattaccgaattggtttgacagggaatttgccaagagatttacttgagccacgaattgtgaaagttattggttcctttggtagctacagatcaagcaagaagataatcatcgctacatctaagcacaagggaatgttgtgtgctgtcctttcaaatccagttgcagataagttagatatatggaagtgggatcatgttgacccaatagatggaaaggcgtcgcagcaacagaaccctggagttaacagaaatttccacattgccagatgccaagatgttcctaagaagttctctcagtggaaactattattggctccgtgcgagaagtttgctaacccttcaagtgcttcatcagggaagaatccattttactccagagaccaatctaaggagctaaatagtgccggcgtctccgtgattctccccgtcccgcggcgcaccggcaccggcaccggcaccggcggcgagatggcggactgggacggggtcccggcgagggagcggcggcagatggaggagatcctgcagctcgatatggaggagctcaacgtggagatggtcaacgacgacggctcctcctccgaggaggcgaacggcggcgacgacggcgccgacgccttcctcagagataccgacagggaaggagtggctagcacttctggacaattcacattcaacacatctctagcctcgttgcacacctatcttggtggtgttgtcctatttcctggagctaccctgcctctcagactaattcagggtagatttgtagcagctgttgagaaagctttgaggcaggtcgatgctccatgcacaattggtgtggttctcatgtacaagcgacacagtactcgacattatgctaatgcttcagttggaacaacagccgagataagacaacttgggaggatggatgatggttcattaaatgttgtagcccgtgggcagcaaagatttcgtctgaagcgtcattggatggatgttgatggggtggtgtggggtgatgtccaaatcattgaagaagatactcctttaagaaccccaagggatgcatttgcacagctagcatcatacctctggagacagataatcacacacccaagcatggatgattacgtgagaaaaccagatcttctgtcattttccattggaagcaaacttcctgtatcagaatctgtgagacaaaagctactggagattgatggaatctcgtatcgtcttcgaagggagattcagcttctcaaggcctttaatctcataaaatgtagatgctgcaagtctctcatagcaaagcgtagcgacatggtagtgatgtctactgatggtcctcttggtgcgtatgtcaatcctcacggttttgtccatgaaacaatcacagttagcagggcaactgggcttgctcttgatggcaatccttcaacggttcacagctggtttccaggatactcgtggacgattgcatcatgtacggactgtgagtccaacataggctggttgttcaaagcaaccaagaagaatctgcgaccgagatccttctgggggatccgtagctcccaaattgcagatgatgcacaagaactagatcaggacgaatga

SEQ ID NO: 96883 - DNA, 1074 bp, Oryza sativa
  Clone ID: PAT_MRT4530_94938C.1
atggcgcgaattgtcttggtcgttgcttttgcagccgtcgtcgtcgtccaggccgccatggcacagaggccagggatgccgccggccgttgttcctccttctctgccgacgacgacgccgcccgcgccgaccgtcgtcgctcctcctctgccaacgacgccgccgccggccgtcgttgccccttctcctcctctgccgccgctgacgccgccgccggccattgtcccccctgctctaccgccgccgccgccgctgccggccatcgtcgttccaccggctctgccgccgacgcctgccattgctgttcctcctgccctgccgccgatcccggccatcgttcctccttccctgccgccgacgccagaggcgaacctgccgtgcgtggcggagctggcgccgtgctccgagttctaccggaacgcgacggcgaagcccacgggcgcgtgctgcgcgccgctgaagaaggcgtacgagagcgagctgggatgcctgtgctccgtgctgacgaacccggcgatggccgccaccgtcggcgtcgacacgaagaaggggttggatctgttcgggcgctgcgacgtcaaggttcccgccgacgtgtgcagcagccatgcgcctgctcctgtcagggtttacaatttcgtaaaataccgaagtttcgggtcactgaaatttgggaaagtgctgctccagccagcagtcctcccacagcgtctcccacagatcttcacactgtcacccccaacagatgcaaaggaggcggcgcagcctcttccaccatgctgcatgaacgatgtggcagcatgccgttctcctatcgccagtccatcccccatggctggtgccccgtaccagtgcaccattgccacctaccccttgtcatggtcactcatatctctacggctcagctctgtcaagaggcaagaaaggtattcttcaagagtactcaactgctcaatcctcaatcactccttccctgatttcctcaacttcttgcattcaggtttggtactgcatgcatttattttgatgtcaaagaacatgatttggtactcaattaatgtggatccatactaa

SEQ ID NO: 96884 - DNA, 1107 bp, Oryza sativa
  Clone ID: PAT_MRT4530_94939C.1
atggagacgctgagcatgctgaaggtggggtacaccctgctgcggagcgagacgccggcgacggacctcgtcaacgccttcatggactgggcggcgcgccgctcgctgctcctcctcgccgtcttcgtgccgccctacctcgcctacaggctcgcctcctcggcgctagccgccgcgtcgccggaggacgtcgccggcaaggtcgtcctcgtcacgggcgcctcgtcggggatcggcgagcaggtcgcgtaccggtacgcgcggaggggcgcgcggctggcgctggtggcgaggagggaggcgagcctgggggaggtggcggcgagggcgagggcgctcggctcgcccgacgtgctcgccgtccccggcgacgtcgcgaggcccgacgactgccggcgcttcgtccaggccaccgtcgaacacttcggccgcctggatcatcttgtgaacaatgctggcttggccaacgtgtgctggtttgaggaggtgccagatgttgctaatttcaaacaagtcttggatgtgaacttctggggtacggttcacccgacgcacgccgctctcccccatctcaaggcgagccgcgggaagatcttcgtcaactcctcggcatcggctgtgctcgccatgccaaggatgagtttctacaatgctagcaaggccgcggtgcacaacttcgccgagacgctgcggatggagctccacggcgaggtcggcgtgacggtggcgacgccggggtgggtggactcggagatgaccaaggggaagcacctgtccagccatggcgcaatggaagtcgaccaggacaccagggatgctcaggtgggggtgttcccggtggagcgcggcgagcggtgcgcggaggcgatcgtggacgcggtggcgcgcgggcggcggcgggtcacctcgccggcgtggtacggggcgctgttcctgtggcggacgatggcgcccgaggtggcggacgcgtgccagcgcgtgttctaccaccggcggagctccgccgccggcggcggagggagggcgagggcggcgctggaggccaccggcgccaaggccgtgctgcagccgccgtcgctgcgcagctcggagatcaaagtggagtag

SEQ ID NO: 96885 - DNA, 540 bp, Oryza sativa
  Clone ID: PAT_MRT4530_9493C.1
atggacgcgaaccgccccgccaaacacaacccattggagccaaaaccaagacgcactaaacagaaaccaaataaccgccgcccgccacaacgcccgccctcaacaaaatggtgcgcaggcaacaacgctcgaggggcaaccacacgcccgctccacggccccccgcgcccccccccccgcgccactcagagatccccacgcaatcctctgtccaacaccatcaccccccccaaacccaccccccccccgcacccaaatccccacccccctcccggcgccgtaaacaacgggcacaccccacacggccccacgcccgcaccctcagcgcgcccaaaccaccagcctctcctcgacgccgtccccaccccatgcccccgccctccgccgccgcacccacgcgccgccgcagcgatctccgaacctgctgcctgcgcggccaggggcggcgcggccgccacctcggcagccgccgtcgtggcggccgcgccgcccctcgccgccatcgtcgcctgctccttcctcgcctactacctccattga

SEQ ID NO: 96886 - DNA, 1243 bp, Oryza sativa
  Clone ID: PAT_MRT4530_94940C.1
ttctctctcttaacctttctctcctctctctctctctcttgagttcttggttgatcgccattgccgcggaggagctagaggagatgagatgaggggtgcggggtttctgctgctcgttgtgttcgccgttgccgtcgccggtggggcggtggcggcggcggcggatttggacggcggcgatggtggtggtggtgtggcggcggagtggcggtttccgagctcgaggatgcgggacgcgtacgtggcgctgcagacgtggaggcgggaggccatcttctccgaccccggcaacctcaccgccgactgggtgggccccgacgtgtgcaactacaccggcgtgttctgcgcgccgctgccgtgggatcgccgggaggtcgccgtcgccggcgtcgacctcaaccacggcgacatcgccgggtacctgccccccgagctcggcctgctcgccgacctcgcgctgctccacctcaactccaaccgcttctgcggcgtgctcccggccaccctccgccgcctccgcctcctacacgagctcgacctcagcaacaaccgcttcgtcgggaggttccccgaggtggtgctcgacatgcccgcgctccggttcctcgacctccgcttcaacgacttcgagggcggggtgccccgccagctgttcgaccggccgctcgacgccatcttcctcaaccacaaccgcttccgcttcgacctcccggacaacttcggcaactcgccggtctccgtcatcgtcctcgcgcacaacagcttcggcggctgcctcccggcgagcctcggcaacatgtccgggacgctcaacgagatcttgctcatcaacacgggcctcagctcctgcctgccgccggaggtcgggatgctgcgagaggtgacggtgttcgacgtgagcttcaaccggctcgccggcccgctgccgtcggcggtggccgggatgaggaaggtggagcagctcgacgtcgcgcacaacctgctcacgggggcgataccgcaggcggtgtgcgagctgccgcgcctcaagaacttcaccttcgcgtacaacttcttcaccggcgagccgccgtcctgcgcgcacgccgtgccgcgctacggcgaccggaggaactgcctgcccaaccgccccgcccagcggacgctgcggcacatcgaaacagtttgtgttgctgtggtgttgaaagggattgggaagtggtgggggtgtggggatttggaggatttgggaacatatgattga

SEQ ID NO: 96887 - DNA, 381 bp, Oryza sativa
  Clone ID: PAT_MRT4530_94941C.1
tttatattttttatatatttaattagtgaatatgttgttaattaaaaaaagtttttaaaaattttaaccttttacttaaataaaaatcttaatttacatatttattcaaaaacattttgatatggagaaaaaaaactacgaataaaatataagaaaaccaaaatactttaaaatttgccactacccagaatgaaaattacaagctaaaacaaataaaatgggtttttttgaaaaaaaaaaaaaaccaaaacatagaaaatatacataagctaaatgtccatttttttgtcaaaaacaccattttataaaaataggcctatctgggaacaccacaatcctagatcaattaattatgataaactatggttgcttaattaaaaa

SEQ ID NO: 96888 - DNA, 373 bp, Oryza sativa
  Clone ID: PAT_MRT4530_94942C.1
gcgatctagaaccccacgcgtccgctgacgcgtgtggtagaccccgtgggtgacataccgatcccagctggcgcaccaacaacaaatacatatggctaccaaatagcgtgacttaatcaagaaactaagcagaggactgcgagaacacgtgcacaacatacatatatatacgagctgctgatcatgcaacggaatgtgtatatccagtaatgcctgatgagtattgatgctgccagtgatcatgatccaccaactgaccatcactcaaatgcatatcttgatagacctacatatgtatagatggtgtcaacgaccggcgagaggctgatagcatataggacgcgcgggcttattctctccggacgagtgagac

SEQ ID NO: 96889 - DNA, 347 bp, Oryza sativa
  Clone ID: PAT_MRT4530_94943C.1
gcacgagcctcgtgccgaattcggcgcgaggagagaattagctcgtaagtttggacagtgcaacaaaacttgtctgtatttcctcgatctgaatgcgtggaaggaaaggaaattttcaacttggagatctatctgctactgatgaattcccgcttctcagtttacatggagatgagttaatctgggtagtcagtggaagaccataaaaagaatgttgttgtattcatgatgccacgtaccaccaatcatataccgctggaatatttacttcgacttccaaattaattatcatgtaacactcttaaactatatgaaatattcccttccaattagattaatcatttttc

SEQ ID NO: 96890 - DNA, 134 bp, Oryza sativa
  Clone ID: PAT_MRT4530_94944C.1
tggcacgtcggaacacgccaaagaagaggcccgtggcgacgacgctttcggcaggggataaaaaccccacgaaaaattatggcaagggcaacaagatttgtcggcatgagcagcaagatccgctcgagctccgg

SEQ ID NO: 96891 - DNA, 180 bp, Oryza sativa
  Clone ID: PAT_MRT4530_94945C.1
atggcgatggactttccctcacttcagcgcaaatcctggggttctaggcagatgtacatggagccagtaacggccaagcacatgcggtttcacaaggagagtgcttgtgataatcctgatattgtggtccacccattttatggcgaagcatggaaacacactttccaggttttgcactag

SEQ ID NO: 96892 - DNA, 659 bp, Oryza sativa
  Clone ID: PAT_MRT4530_94946C.1
tttttttgccggttgtttggaagtgtgctgtggtgtccccgcaccggggggaggcgtgtgtcggcgggggtgctccgggcctgttgcggcatgcggcgtctttcggccgcagggttgagtttgtggggttcaaagtgtatgagcccaatgatcagcgccagtggccggggtcgtggctacagcatatcaggggctgagcccatataatggaggttcgtaagcacgcagtatggcataccgggcaagccccttctggcaatgcagctggcgtttgcaactggagaaacaaccaagtctggcaacatgctgcgcgctgggtggcgcaaacaatctcactatcaggacattaacatggttgcagccatagcgcagcagctacaactccagcagtttggggatcttacttggatgcggaatctggctcaagctcaagctgctattggcttttaacgtgccatctgagatatgggtatcctaccctagggtactagggtgcacccagtaccagtgaccacctggcggtgtgcttgtaatggattttaacagtatatggttcggaattaaaaataagctcagatatcatgcatatggacatggtgaaacttggggtgatataaatagaaataaagtgtcgttcatatttaaaaaaaaaaaaaaaa

SEQ ID NO: 96893 - DNA, 1230 bp, Oryza sativa
  Clone ID: PAT_MRT4530_94947C.1
cccgcgcgccccgatcgtcgccacgcgtccggccaggcgtccgaataaacgtcctcgcctttgcctccctccgccttcccctcgctgcaatctcatcgtccactcccccgtttccatccccccgaatcttcttcttctcttcttgcggtgactgagaagaagaaaaaaaaaaagaaagaggagaaaaattgctacgagattccttcttcgtcgccgccgctgctgctgcgttatccccaagatttttgggatagtgttttctgttctctctcataactcataagggtaaatgggttcagaaggaccttcagttgttactgtccatgttaccggatttaagaagttccatggggttgctgagaacccaactgagaaaattgtgggcaatcttaaatcattcgtagaaaagaaaggattgccgaaaaaccttgtacttggaagctgcacagtgcttgaaactgcagggcagggggcacttggcacattatataaggttttggaatctgccattgcagaaagagagaatgggtcatcggctcaggggcaagtaatttggatccattttggagttaatagtggtgcaacaaggtttgctcttgagaatcaggctgttaacgaagccaccttccgttgtccagatgagctagggtggaaacctcagagggttcctattgtaccatcggatggagccatctcacggacaagagagactacgcttccggtaaatgagttgaccaagtcactccggaagacaggctacgatgtaatgccatcagacgatgctggtcggtttgtatgcaactatgtgtattatcattctcttcggttcgcagagcaacacggcatcaaatctctgtttgtacatgtgcccctgttcttgacgatcgatgaggaggtccagatgcattttgttgcttcccttcttgaagctcttgctgtcttgaactagggaaaaagaaataacaattcaagattggaagcaggctgaataaaactgtattgtcatcgatgatattggtcttgctccaaagggtgtatttatgaggaaattggctgcttagagtgtgttcttggtcagatgccacttgtattccactacatcacatgttctaaacatgcctgaaaacaaacttggttttcaataaaaatcgacagatcgtcgaaatggatgcattgcatccagtacggttgttgatgctgcttttgcatttatgatgcccccaaaaaaaa

SEQ ID NO: 96894 - DNA, 522 bp, Oryza sativa
  Clone ID: PAT_MRT4530_94948C.1
atgggagagctggcttcctcgccgccgcccgcggcggtgctgcccgtcgtcttcgtcgacggtgaccagaccgtcgacctcggcaccgtcaccgtccagccctccctcggtgtccgcaagctgcaggccgtcgtcgccgacagggtggggctcgctgccgcagcagatcctggcctcagctcgctgctgcccccgcctgctgcgctgcctgtgttgcccctcgaggagtgggacctgactcgcctgctgcgtcgcgctcgagggctcctggcttgctacgtcctcgcctgcctccggctggtcccggctctccaggagctgcagcggcagcgcgatgttgtaggtcatgggggcggtggctgttctgtgattggtacatggggttggggcatgttggcgcgatggacccgccattctggtcagcccagccgttctggcggtggggtgacggcctcgtcgtgcaccgagtgcgaggcgggggctggcgatgatgcgggagccggggttccactgtttttctga

SEQ ID NO: 96895 - DNA, 558 bp, Oryza sativa
  Clone ID: PAT_MRT4530_94949C.1
tgttttctcacataactcataagggtaaatgggttgagaaggaccttcagttgttactgtgcatgttaccggatttaagaagttccatggggttgctgagaacccaactgagaaaattgtgggcaatcttaaatcattcgtagaaaagaaaggattgccgaaaaaccttgtacttggaagctgcacagtgcttgaaactgcagggcagggggcacttggcacattatataaggttttggaatctgccattgcagaaagagagaatgggtcatcggctcaggggcaagtaatttgggttggtatccaccttccttgattccatattacataatgatgtaatgcagtcagcaccttgcgtattgcaatgctgtcctatcagaaaaagaataaggaagtttctatttgccttcaatgccactcgaatagtcaaactaattatcatttgaaacttgttcagatccattttggagttaatagtggtgcaacaaggtttgctcttgagaatcaggctgttaacgaagccaccttccgttgtccagatgagctagggtggaaacc

SEQ ID NO: 96896 - DNA, 427 bp, Oryza sativa
  Clone ID: PAT_MRT4530_9494C.1
cccacgcgtgcgcccacgcgtgcgcggacgcgtgggtagattttccaaaacaatcaaggcagcagcattattaaagacaagcaggcagccacaaagcaagcaaaggtgggcattagaatacacaccttgcagggacacatgcagagtcatcaggatgaaaagctagtccatggtgataagaaaagcagcttgcttgcaccagacctgatcaccccaaagcaagaacaagaagaacaccttctcaccaatcagtcagtactcagtacacgtgaagcaatctcagcaagaacagcataggtacatatatatatttagatagatagccatctcatttgatataataagcccaagtccagtgcagtgaacacaagaagctcttgttctgaagattcaaaaagagcaagaacttggtgatttcaatcaagaa

SEQ ID NO: 96897 - DNA, 295 bp, Oryza sativa
  Clone ID: PAT_MRT4530_94950C.1
cttccatatattttttttcaatactgaacaatttgcaggggccccgcacagaaatagcctaggcacaacactggggtgtgaaaaaccaattttttttccaaattcacctacaaatacagcaaacctttaatacacacacaacttttaaaacaatgactccaaaataaccaaatgtaaacaaaagccaacctaaaaacacgccctgtttataacaaaaaaaaaccccatttctaggacaaaaactttcgcctaaagggttaatttaaacctccagaggaattcaatccttgccgtc

SEQ ID NO: 96898 - DNA, 888 bp, Oryza sativa
  Clone ID: PAT_MRT4530_94951C.1
atgggttcagaaggaccttcagttgttactgtacatgtgactggatttaagaagtttcatggggttgctgagaacccaactgagaaaattgtgaccaatcttaaatcattcgtggaaaagaaaggattgccaaaaaaccttgtgcttggaagctgcacagttcttgaaactgcagggcagggggcacttggcacattatataaggttttggaatcttccattgcggaaagggagaatgggtcatcggctcaggggcaaatccactttggagtcaatagtggtgcaacaaggtttgctcttgagaatcaagctgttaatgaagccaccttccgttgtccagatgagctagggtggaaacctcagagggctcccattgtgccatctgatggaggaatctcacgcacaagagagatgttcagaacacccatcttttctgtttacaaacttatcataaaagaaacgaatactacccttccggtaaatgagttaaccaagtcactccggaagacaggctatgatgtaatgccatcagacgatgctggtcggttcgtatgcaactatgtgtattatcactctcttcggtttgcagagcaacacggcatcaaatctctgtttgtacatgtgcccctgttcttgacgatcgatgaggaggtccagatgcattttgttgcttcccttctcgaagctctatcttgaattaggaagaaaaatacaatttaaggttggaagcggactgaataaaattgtattgtcatcgatgatattggtcttgctccaacgggtgtatttaaggggaaatggctgcttagagtgtgttcttggtgaaattccacttgtatgtatgccactacataacatgatctaaacatgcatgggaacttggttttc

SEQ ID NO: 96899 - DNA, 421 bp, Oryza sativa
  Clone ID: PAT_MRT4530_94952C.1
tcgtccacctgctcgtcgcggtggggcccgtctcggttgtgtgtgcggcggcgacggcggagtaggccacggtattggtggtcttgatgagatcaagaaccatgcccattatctgtagaacataccgatcgaggaggtgttctaacagcttaaatgtacgctctagggtctatgctcccacgaggggaaccggtgtatcgagatgatcttcctcaacaagctctatgagaataatgagagcaagatactcaagttcttgcagttcatgtggaacccgctgtcgtgggtcatggatatggccgtcatgatgggcatattgctggtcaacggtggggggaagctaccagtctggaatgacttactcaggattataacactgctggatataaacttcaccatctccttatcgatgagaacaact

SEQ ID NO: 96900 - DNA, 417 bp, Oryza sativa
  Clone ID: PAT_MRT4530_94953C.1
atgaagaagttgtttgaggctaatgttttgaaaagtgctaagagaaaatgtgcaggagcttctgttgattcctcaagctacatgtcagatgaagatatttcttttagcaagttgacaaagacaccagtactgatgtgctttatgtctactaagcgacagaacatattggactcagctttgatgcaattcatggccaaggccattggtgttgagccgaagtcgttgtcaagtgtatttgaagggcaagctaggggtttgaggatgaactactatccaccgtgcttgaaagccgacaaggtgttgggtttgtcaccgcacactgatctggatggcttgacactgcttctccaggtgaatgatgtgcagggcctgcagatcaacaaggatggcaaatggttctccgacaattttgtgtga

SEQ ID NO: 96901 - DNA, 268 bp, Oryza sativa
  Clone ID: PAT_MRT4530_94954C.1
gcttttcaagtagggagactaaatatacactggaaccattattggattaattcaggacagcgagttgctgctttgttggtgaaaaacaagcatcgcattgtattccagaaggctcgacgtttcactacaagtagcatacaaaagcagaggtattatcgatattaagattttcattcaccaatgagtacgagccaccagataaattaccatgggcgaacggtatagtaaatggcataacacatggcgtgatcttttgcgagatgaaaac

SEQ ID NO: 96902 - DNA, 867 bp, Oryza sativa
  Clone ID: PAT_MRT4530_94955C.1
atggcgaggtggcggatatggcgaccacgaagcccagccgtccccttcctctcgctgctcctcctcgcgccgctcgtcttcacaggactaaaagctgttaataagattggattatcaagtgaaagaaattattccagggggcatgttacttttgttacagtattcacgacatacaactctgatccagctgaagcaagcaaactcccatctaatgttgtcacagttggaaagcattcttatagcaaggtgggaaggtcgatggctatcctcaacactttcattggtttcatacaggtgtcaattccaagaagcctcgcgctcatcttgcccgatcccaaggcgaggtggacggatatgggcgaccacgaagtccctctggccgcttcttctcgctgcgcctccttgcgccgctcgtcttcccagtcccaaagctgcagtcgagctggtcgccgtagaagggtctgtgcattgcgaggtccgcctcaccggaggggcggtgccaatgcttgcctcctgctcaccgcgccgaggctgctcgtggccgggtcgccctagtgcttccttgctcttccgtctcgagacgccccgggccagcctttgaattctggatttgtagcagtaagaggaaccagggatggcatttttaaggctattgaattcttcaaagaagtccttgaggcatactacttgaagtatatggaggcttcccgcatgcttggtgatcaattagcactggcatgggttgtgaagtcctatctaccatctgctttttcaaaattttctaagcatgaggcatttacagtttataattggacaccacctgaaggtgctggacagttccatggtatgccattggatgtaaagtga

SEQ ID NO: 96903 - DNA, 219 bp, Oryza sativa
  Clone ID: PAT_MRT4530_94956C.1
cttacttctcgccgaccgtcaccaacctctgctttcgctgaggcggtggagacgcacccaagtcctgagacgaaagagaagcttaccgctgggctcatcgccttccggcgggtcccgggtacagaggagaacttcctccccctcttcggaacattgctgccacttgtggtgtgtcacgcccaaaacgaccctaaaatatatcctttaaattacgcctag

SEQ ID NO: 96904 - DNA, 324 bp, Oryza sativa
  Clone ID: PAT_MRT4530_94957C.1
atggcgtggacgaacgaggacgacgcgccgtggaaaaagatgccggaaaaccgattcaccccctccccaccaccgcgcgatgccgccatccatctgtcgcacggcgcggcggcaaagaaacgacggctcggccgctatccagcggaaggcgagaagcctcctctctcccccacgcgcgcgcgcgactgcctgtgctgccgtggcatgcacgagacgccacgagcccacgacgctggatgcgcgcgtgtggttgccggcacgggccatgtccgtgtccatgtcccggcaccctccgccccacccccgcctaaaagtcctcactaa

SEQ ID NO: 96905 - DNA, 2224 bp, Oryza sativa
  Clone ID: PAT_MRT4530_94958C.1
gcgctctaaactagtggatccccgggctgcaggcgagcaagccaaactgaattcccgacgcgtgcgcgcgcgcagatccgtcttctctccaatccgatcgctccgggcgcgcgggattcatgcggtctcactgccgcgcgctcccgccatgcagcaggggagttgtagcagcagcagcatcctggaggagggtttgactggcgcggggggtggttggtgtcgtgtgcggcaatggcgaccctgtcggactccgcgggcggtggcggcggtggccgggcgggcgccgagctgatggtgccgcagttccacctcaaggcgctgcacgccatcctcgccgtgcgcgcgccgcggccgctcgcggccgcgcccgcgccggcggcgtcgttccggaggcgggacaggtggttccacctgccgctccacgcgccgccgccgccggcgtcggccgagcatctgccggagccgtcccccggggagccgctcgtggtggatgtctacctgaccccgtcgggcggcggtgggggagctgaggcggtggtggagaggtggacggtgtcgtgcgagccgtggtcggccggggcgaggggcggcggcggcgccgccgcctccggggaggggctcgccgtgaaccgggcgtacaagcggtgcatcacgctgctgaggtcggtgtacaccgcgctccgcctcctccccgcctaccgcgtcttccgcctgctgtgcgcatccggccaggcgtacaactacgagatgggcttccgcgtcggttccttcgccgcgcccttcacccgcgccgaggaggcggccatgagcacccgccgcttcgcccccgtcgagacccagctcggtcgcctcgtcgtctccgttcagtacctcccctccctcgccgccttcaacctcgagatctgctccctcgcgcccgccatgctcatcaccgattacgtcggaagcccggcagctgatcccatgcgtgccttcccggcgtcgctcacggaggccgccagctcagcgccggccttcccgccgcggcgcccgaacagctgggcgccgtcacctgctccctggccgtatacgcccgggcagcaggcgaaattctcgccgccaccggcattgtacgcgtctcccacgccgtctcctcccacgtttgcgggtggctacctgcaatcgcggctgagcggggagactgcgccgatgatcataccgggtggtgggagaggccccgttcacaatcggaacatgtcggatcccgtcagggggttcatgctacctccaccttcaccgaagaacatcagaggcgactctggggggcatgagacaccgatggagacaggccggacagggatccggatggctgatctctacactaatttgccttctgttcctaagattaagattaaggatagtagggatgaatctggcagattctcaggtgttttttcctctagtggttccccacggcttgggttttcaagaagttcaagcagattgtcaatgcaggatgatactgatgatttagattttccttttgcggtggatgatgttgatacacctgattcccgaccagggagcagtggtggaaaggatgtgggggatcaagcgagctcatcatcccataaatcacaggatgctgctgtgggttatcttgtccacatgctgaagtctgcgcggccgctgcgagactctagcaattcacctcttacatcaagggttgaatctgttgaaggaggtaatgtcagttctttcatgtcccgtaggacatctgatgcgctcgaggagcttgaatcttttaaagaaataaaggagaacctgcttgcccgtagtagatcaaggatgcaagagtcattggataaatccttgcgccattcttaacatagctggtgaagtatcccaaccatttaaggaggttgtgtggtaagagatgttcttaccgcgggcatctccatgtgtataactgtcaaccggcgcttgttatgaaatgaggatatacaagtcgttcattcttaaactcaagcaggatcatgatccacctttgttcatagtgttttgtatgcaagcaaaaccaaccggatacatgcatcctcctggaagtatatgatgatcaccgcgtgcgtacgtgtgggattatgtaatcatactaaacctgtttatttattctattttagctcttaccttacctgctcttaatataccaaactgtttgtttattgctacaaattctttaaaaaaa

SEQ ID NO: 96906 - DNA, 2925 bp, Oryza sativa
  Clone ID: PAT_MRT4530_94959C.1
acagagaaatcgattggtctgtgccattcattttgtacagtctacaaaaataagcgaaaaataaataaatcattacaagggtcgaaacaaatacaatcagcgaggaaactgtgaagagtacatcatctctctctccatggtatagcacctagagacaacctgagattctggattagcaacaaggcccatttcaacattcttggtgctgttcagggaagtacatttgtacttcggagttaataacggctttatttcgctgctcctttgtaagtcttccttgtatgcccttgatcttgcagctcttaggagttgcagtcttatctccacttctttcattttaggtctctttgctcctttagtctttaagcacatctctgcaactgaggccatttcatcaatctctctatggctagcttcctctacaacttgagaatccagtatatccattgttgttttatctcttaggctttgaagaaaacagtggcacaaatttttctgttcaccaagacagttgagaaaaattggcttcttccttgttaggagttcaacaagtatcacaccgaaactataaacatcactcttctcggttaattggcttgtatagaaatattctggatctaagtacccaaatgtcccctgtactattgtaactacgcgagtttgatcaatggaaatggacctagaagcaccgaaatctgaaaccttagtagtgaaggtaccatccaagagtatattagttgatttcacatctctatggaagattggcattgcagcagaggaatggagataagcaagtgcccctgcagcctctagagcaatcctcattcgatcatcccatgtcaacaaacaattggtgctcagatcaccatgaagaagaccatgaagtgtgccattagaaatgaattcatacactagaagaggcacctcagattcaaggcaacaaccaaaaagtttcaccacattacgatgaataatctgggaaaggatggcaacctcattaacaaattggtcaatctcactctgctccacaattttggacctctttatggcaaccactcgttgatcggataaaatccccttgtaaacagtaccatggcctccatatccaaggatacgtgttgggtcaaagttgttggttgctttctctaaatcttccaaagaaaatattcttgtgttaggagtaacattgttactggatgagatcagctgctccaagagaaggcctttgttttttcggaagtatgcccttcgaattttcttccgagtgcttctcttccaccttttgaataatatagctgcaattaatgtaagagctagaactccaaaaccactgctaatcccaatggcaagtcctacaggagtaattgcagcaattgaaaagttattcatgaggacaacaactatagcttcctttaaagttataacatgtcccattacaatagtttggtatagagcattcatcaatatattaactacaacttccacactatgaaaatcattggataacatatcactctcttcagatattccatatctccatgctcctgtacatccattttggacataaggatttccttcaaatccaagagagcacttgcaacgataaccaatatatagcttcccatgtgtaacatcaagacactcgctgtttgtgctaacacatgcatatgcacttttgctttttgcatcttcacacgtcaaattggtcacagaccacttccaaacaccatactcttcagataaatcagacttttccaaaccataaattaattgttggccaaaatatccagaaccaccatagtatactgataaatactttgtgttggcatcttcaaattctgaaagcttgttaacataaaggagtccttcatctaatgatatatttgtcacttcatattttgcaggtggtcttccaataagagtgcgatttgatgcacaactcagttgaaatctcctcttagcaaaacagcctggctcaagcccaaacgggaaaggaatatttgtgctaccacatgatctagaacaattctttttcggggtagggttaaactcttgtttgcaatcatcaagaaggtagggattgccatcatcagaatttcctgggcaagcacaagaataacctccatttgccacatctatgcaattgttactgccacaggcaaattgtgtcttattatccaaccgagctgttggacaatttggttcatctgcgatgacagtcgagaggtatgccatggaagcaccaatggtgcttgcatttatcttattggacaggagatccgcaatgctaaaaatgtaaggacggaaggttaagaaagccttgatggtgatattgttgaagggctgcggtattgtctcgttactcttaacaatggtcactctaaaacctcgaaataacaccgggaatgtgacagtgcagcaacccatgccattgcaaatccctccttcggttgccatgtgcatttcctccatggaggcacacttgatcgtgcaatgacccacaaggttaccagtatctggatggaacaggtaaaccccgatcccacaaccgaggaacgccaagtaattgtaggtctcaacgttgagattcctcccaggagagtcccatgacaagttgtaggtgtcaactccatgaatcatggggatagtgtacatgatagaggcaaggacagttcctgaaggatagaggctaatcacctgagtcatagtgtttcccaagaagagcttcaaaggtttgctggtggtgtcgcaagtaagctcaaagccctgccgaaagcaaccaggcccgataccataaggataccagatgttcacttctccacatgttttggggcagggagcaagactagcagcagtgggaggaggtgctccagatgccaccaacatgacagtggatgctatgatcgatagcaaaaccagctgcat

SEQ ID NO: 96907 - DNA, 465 bp, Oryza sativa
  Clone ID: PAT_MRT4530_9495C.1
agttggccagtttattttgtggtgaatttcctgcagatagaaccttgtggtgtacaaaaaccgatccaaagaacatctgcctgggttcatctggtgcccaacatagttctttcaaaattgttacaggtcattgaatgatgacatgagcactgattgcagctatcgatgcctcaaaaaatcctaagctattattagaggggcatcaagcgtacagagttatcttgaaaggagaggctaaatggctatggagaagagaaattccaccgaccgcttcttcatcgtcaatctccagctgccgctggccttcgcgagccattttgccgcttcgcccaagaactcaaccgctgggcgctaccagtcgtcccacaaccatctcagtcggaagcgctgggttgcttcgtcacctttagctgccctctacctgcaacagcatgcagcacggtggatccacggaagtcgagatgc

SEQ ID NO: 96908 - DNA, 489 bp, Oryza sativa
  Clone ID: PAT_MRT4530_94960C.1
atggcgctccagccaagcttcaaccccttcacgctgctcgagcgcaacaatcccggcgacaatccgctgagcaaggagaaggagcccgtcgcctacaggaagccgcccgtgccgccggcggcctggccgtccaagtcggcgccggcgccgaagaagaagaacgacgacaagaagaagaaaaacaataacaacagcaagaacaagaagaagccgcaggaggccggtaagggtgccgccaatgccgcagcaggcaacaagaagcccagtgcggtcaagaaggaggacacggccaagtacataggctaccagtacagggcgccgatcaggacgaagaagccggacccggaggcggacaagaagaaggagcaggaggcggcggcggcgccgccgtctccgccaccgccgccgcctaggccggctactccgccaccgagcttcgatgacgcggcacacttcccgaccctggggaagaactcaaaaaagaagtaa

SEQ ID NO: 96909 - DNA, 385 bp, Oryza sativa
  Clone ID: PAT_MRT4530_94962C.1
gggggggaaacaaaccttttccgggggaaataacccaaaaaccgggaaaaacaaatattccctccaaaaaaaaccaaaaacccccctgaccttgacccaaaaaaaatggggctaaattccccccacaaatttttttttttaaaccaaaaaggtgggccccaaaaaaccgggacgcccctttttaaaacccccaataggttggccggtttcatttcatttgaaataacccacttaaaccccccccatttttttaaacttaaaagccgggggaccaattttaaattggggggggggttggccttcgggcggaaatgccaaacccttttaatgtggaaccccttcctcgatgacttgcaagaaaattcccccccccccggttttgggg

SEQ ID NO: 96910 - DNA, 354 bp, Oryza sativa
  Clone ID: PAT_MRT4530_94963C.1
ttggccgtggatggacacgtgtcatgacatccaaggctttaaagctggcggcgcatcagagggaaccatttattggagtcgccggccgtcctgttggtggtgaccgagcggttgcgccggtcgacggcgaacatgacggccgattctcctggctgacggtcctcgggtttgactttctaactttcaattcatgtatggcgaactaccggtcggacggggacctcgccgacgcgaccttcgggaccttatactacatggacctacagctgctgttcggctggtagctcatgctggagaaggcatagtccaactatcgggagagggggaacctgaaggcggacgcgtggatcctga

SEQ ID NO: 96911 - DNA, 668 bp, Oryza sativa
  Clone ID: PAT_MRT4530_94964C.1
ccccaatgctagaaagacttgtattatgaaacggaggaagtactgtatatgtacataaactgcaaaaatgagctatagcacaatgaaaccacatcttggatgtgtttccaggatgtggtttggtgtgatgtgctaattcttaaggattgttcctagtggtggtgtctggatttcctacccaagttgctgacaaccaagatgaggatatggtgatatgctgattgtcatcaccgatagagacaggttgtgtttctggtggtgcggactttaaattttggcatctttccttttaaatgcccgtccatcattattccggatatattttttgcattgtcgtcagcatttttggttccagaatacggttttcttgccatccaatgccactccgtcctaagccatctggacttgattgtactcaaagttctgtacggcggtggtctgtactgttgtagtcttgaccattctcttcatgggcttggctctcactgctgttgcggcaccttctctatcggcaccatttcacccacatgcttccggccaacatgcttcctgttttggcccaggccgttggtgctccggccgtggggggttcgcacgggccgttggtgctccggcctttgggggtacttccagtgtgagggatgcctgggactgggacttgggttgat

SEQ ID NO: 96912 - DNA, 588 bp, Oryza sativa
  Clone ID: PAT_MRT4530_94965C.1
tccgcctgccgcccagccgccgccttccgccttccgccagccagcgccgcgcgccagccgccgcgcgaggccgcccacgggtcctgaccccatcacctccgacccgcctccgccgccgccgccatcgacgccgactcagttctccgttctgaggaaggtgcccactggtccggaccccatcacctccgacccgccgccgccgccattgtcggagttcccggttctgagggaggtcccctcgggtcctgaccctatcacctccgacccaccgccgccgccgccgccattgtcggagttcccggttcttagggaggtcccctcgggtcctgaccctatcacctccgacccgccgccgccgccaccgccattgacggagttcccgattctgaggaaggttccccgagggccggaccccatcacccccggcccgccgccattgccgtttccctctccgccgcatccacacgacgacacatggcctccgccgccgccgccgccgaccccggcgcggcgtacaagctcctcctctcctgccccgccggcctccccagatcccgcgtaaccctccttacacaacctctctctctc

SEQ ID NO: 96913 - DNA, 1306 bp, Oryza sativa
  Clone ID: PAT_MRT4530_94966C.1
atgcagttccccttcgccgccggcgattaccccgccgaccaggtcgaccccgactacctctacttcctccgccacatccgccccgatggcgactcctacaccctcgagctcccctccgatggcgtctcccctccttccctcgtgaagtacgaggcccccgccgacaccggcagcaccgacggcgagtgcgtctccgatccctcccctggccgcgccagcaccaaccgcccgccggaggagaaggagtcgtcggtggaggtggacgccgagcctcctgcgcccgcctggatcgactccctcgtcgacatcgacgaggactaccgcctcttcctcaagcacacgcgcgtggtgaacgacaacatggtgctcgagattgacggcgccgtcgtcacctacccgtgcgccgcgtcctccgagagcagcagcgaggtcgaggatgcgcgggagaaagaggtggccatggattcagacgagccggtggtaattcttccggacccaaaagtatgcgactgggtggcggtgggtgacgcatccgtgcgaacattagatagtaagaagaagaggaagatgagttcaagcaattccaataatgccggcccttccatccccccggggtcacaaggtgttatatggccggcacatatcaacagtagaccggattcagatttcaagcagaggttattggatgctctcagcaaaccatttagtcgaaaagaatatattaagctatttgacatggcttctattcgtacaccattagtaaaattacggcaggtgcgcaatgatgtaaagttctaccctacacaggaaatgggaaattcatactttgatcattacccagatctcgttgaccaagttatgcacactagctttccaaatggtttagctctgatgcgtgggtttttcttctggttgcagaataatgcacatgaagatcaattcaggccatgggttgatgtttctaaagaccacgaggttattcctttgatcgattgagatttacacattgcagctggtcaaaccctcaagtccaaaacattaaacatctatttgcgggaatgactctcttaagggtgacgtaatgtcatcagcagagattgtctcgtatctatatggaatgagataaataaatatattgccaatgatcgagaaataattccctattggaatatgcgcacatcctctttgcaaataatttaacattgagttttgcctgtgaatttgagggctggattccatgttctacctgatctcaccatcataaagcaataaagcagtggtgttatttcaaaaaaaaaaaaaaaaa

SEQ ID NO: 96914 - DNA, 327 bp, Oryza sativa
  Clone ID: PAT_MRT4530_94967C.1
tgagagcggcggcgcagcagacggcggcggctgcggggggcgagaggccgattcgccggaggagagaaggagagagagagagagagagatggctttcacgatgcgcgcggtgaaggtgccgccgaactcggcgtcgctggaggaggcgcggcaccctatgttctactttttcaggcatgcttgttacgctcttctctccatcatgtagatctactatctttgcgacttttattatttcttttcagattcgcttcaccattttcattgagattcgtatagatccagtgttatactcaatccctaatgttattgttatgcttccttttt

SEQ ID NO: 96915 - DNA, 394 bp, Oryza sativa
  Clone ID: PAT_MRT4530_94968C.1
agacaccatatcctactctatctccgtatgagcaaatccgcccatacaattagtttgcatggtgctttactagccaaaggtggaggatccatgtgcccccacacccacaaaacatagcactaagccctccaaggtaaccaccgcgtgactcgagctgaaaacgagaccgactgcaagaattcaagaagcacctgagatgcaaactacagtaatactcattgtggtcaatgagacgggagatgcgggaaaacaggtaccaaatacagaacgttctcatactgagacacaaatcaaaagcacttgcattgccgtttacatctgcaatttttattgaaaggggaaatacgggggcattgctctttctggtacaaccaaatctatcgtcggagggatt

SEQ ID NO: 96916 - DNA, 409 bp, Oryza sativa
  unsure (1)..(409): unsure at all n locations
  Clone ID: PAT_MRT4530_94969C.1
aatcatcttgaaagttcatcttttaaattgtactcagttattcactatcaaaattgttggtacattgtgccagaacaaatgtcacgcaagaactataagtaccaaaatagaaattctagatgcagaagcttgccttcagaaagtcctgtcacagggtgataattgaacaatnaaagggctctgtnntcagcagccataccctgccacagcctgtctgagggctgccggcagtttcaaaatttggcctgcaaaactggcaagccacttttgacactgcctcccagctgcctacccgcttgcctaaaaaaccgacctccccaaaacaccacccaaagatgtttccaagaccataaaatgttttgggccaccaaaaaatgctttattttttttagattgtataccttcctgg

SEQ ID NO: 96917 - DNA, 306 bp, Oryza sativa
  Clone ID: PAT_MRT4530_9496C.1
tgagtggtggtggtggtcaaatcccaacggggggggtttatattaaaagaggaggagtcattaaaacgggaagacggccacacaacagtatactaactgttagtgggcacattcacacggtgctaatacgggaatgtgtaaacgagctgagaaacaaattattcaacaaactccatatcttccacgtgcatatctcaccaagcctcacatatctgataactcaaaacacactatctttacaactgcagtaacaaacatagctaatcttattattatactaattttagagattattttcgatctaaa

SEQ ID NO: 96918 - DNA, 276 bp, Oryza sativa
  Clone ID: PAT_MRT4530_94970C.1
gtaccaccacagtcacattccgagcatctctcatccacttgagttgtggtactatcgagcctcttgtcatcactatctgtagttaaaggtgtatccaccacctcaaaaccatcggtttcaaacttaggttggttcactgggatgccaccatgggcaaggagaagctcatcgaataaagtggttaaagtgctggcactctcatggcgcactgtataattccttagctcactttggatcctgtgaattggctgagcttggcactcgaatgcaagctga

SEQ ID NO: 96919 - DNA, 265 bp, Oryza sativa
  Clone ID: PAT_MRT4530_94971C.1
aaaatacatatagccggagcttccatatagggcattcacatatgcgcgacccaacaacatatagtcgcagcagataccactcttacatcaaggcagagagagatcaggcgtaacaaaaacaaaagcatagcactgtcggtaaaaacaaaagacgacgaacgaactgaaaacacacgaaacagggtggaagacatcaaccaatcaaagaggaactgtgaagcaaggctttatacgacgacgaccagataactctcaccagaacttt

SEQ ID NO: 96920 - DNA, 802 bp, Oryza sativa
  Clone ID: PAT_MRT4530_94972C.1
accattccttcagttctttgtctatctcaagacacaaataactgcagtctctctctctctctctctctctctctctctctctctctgcttcacttctctgcttgtgttgttctgttgttcatcaggaagaacatctgcaagttatacatatatgtttataattctttgtttcccctcttattcagatcgatcacatgcatctttcattgctcgtttttccttacaagtagtctcatacatgctaatttctgtaaggtgttgggctggaaattaattaattaattaattgacttgccaagatccatatatatgtcctgatattaaatcttcgttcgttatgtttggttaggctgatcaatattattctagagtctagagaaacacacccaggggttttccaactagctccacaagatggtgggctagctgacctagatttgaagtctcactccttataattattttatattagatcattttctaatattcgtgtctttttttattctagagtctagatcttgtgttcaactctcgttaaatcatgtctctcgccactggagaaacagatcaggagggtttattttgggtataggtcaaagctaagattgaaattcacaaatagtaaaatcagaatccaaccaattttagtagccgagttggtcaaaggaaaatgtatatagctagatttattggttttggcaaaaaaaaatctgaatatgcaaaatacttgtatatctttgtattaagaagatgaaaataagtagcagaaaattaaaaaatggattatatttcctgggctaaa

SEQ ID NO: 96921 - DNA, 5850 bp, Oryza sativa
  Clone ID: PAT_MRT4530_94973C.1
atgctcgccgtcgtcttctcctccggtcaccgcctcctccccctccccgtcctccccggcacattcaccacccctcctcctcctcctcctcctcctctcctatcccctcgccgtcctctgctcgcccctcgccggcgccgctgcctatgcggcggcggcggtggcggcctcctcctccttcgcgccgtcgccgcgaggcgcgcgggcatcgtgatcgacgtcgacgaggtgggcgaggtcggcgaccgcgacctccccgtggacgtgtcgttcacccggaggctgccgccggtgctcaccctcggggacggcctcgccgcgctgcggcgggccggggaggaggtgaaggcctgcccgcctgccgccgccgcgagcggcgtcatccggttcgaggtgcttgttccacccagtacgaaggcgctcaaatggctgtgcacacagtttaagagatcatcattgtttcctcagttttatttgtcgaggaagcaaaccactgattcatcaattcagcttgaaatctctggcgctggctctgcaatttgctttcatggttcctctcgagtagataatgggtttgatttgatatcaagatatctttcgtttaattcacacttgattagagcctatggatcagtaggtgttaaatatgacaaggaactattgtctttagaggagagaattggttcattttacttctttattcctcaggttgagctgagtgaatttgatggctattccatgttatcgtcaactattgtttgggatgactccgtgtctcacacatttgaggattctgtttgtttatttgaatcttgtttcagtcagatatggagtagctatgattcttcagctactatctgttatgaaaacatggtaacaagttacattggagaatcgcgtatgtcagagagcaggaatactcagttggtatacttggatgctgaatttctcgctgtaatagatggcaaagctgtcacggaaaaggagaattgcccaacttctgatcagtcatttgttcggttttcgccgcagttcttgttttgtgcaaacatggatttatgtttgcaaagcaacaaaattgaatctttcattaggagatgctctaacattaatttggcatgggcatccttcatagttgaagaatttgtcaggcttggttttacgtacttctgtatagctccagggtcgagatcatccccacttgcactttctgcttcagtccatcctttgacaacctgcatatcatgttatgatgagcgttcacttggatttcatgctcttggctatgggagaggttctcggaagcctgcaatagtaattacatcatcaggaactgctgtatcaaatctccttccttcagtggtggaggcaagtcaagatttcgtaccacttattttactcacagctgatcgtcctcctgagctgcaggatgtaggagccaaccaagccatcaatcaggtaaatcattttggcagttttgtaagacacttttttagtctccctccaccagatgatcatatttacgcgagaatggttcttacaacagttgattcagcagcctactatgccatgcaagcaccacaagggccagtgcatataaactgtgcttttagagaaccactagactacggatatcaagattggagtgttgactgtttgaaagggttggacaaatggtttataaatagagaaccatacactagatacctaggaatgaaaatggtttctgcattaggtaactattcttgttcagtaagggaggttctggagattgtaaagaacgcaaaccaggggcttttattagttggtgctattcacacagaagatgatatctgggctgtgactttactagctagacacctttcctggccgattgctgctgatgttctgtctggattgcgaatgaggaaagtacagaaatcaattccaggactagataagagcatttgttttatagaccacatagatcaaattctactgtctgaatctgttaaaagctggaaaactccagatgttattgtccagattggaagccggatcactagcaaacgagtgggaacatatcttgagtcctgctccccgtcttcttacatcttaattgatgcacacccatgccgccatgatccttcacatgttgtcactcacagaatccaggctactataactgaatttgctgctagtctgtgccagtgtaatttccaaacaaagacaagcagatggtcagatattttaatggttctgaattcagcggtttcacaggagataatgtttcaggtgcattcagaatgttcacttacagaaccatatgttgctcatgtaattggagaagcactttatggcgatgctactatgtttattgggaatagcatggtcattcgagacttggatatgtttggcaagggctggattgaccatagtacaaatgcaaataatgctatgatgcaccattttccaggctttcttggtgcaccagtagctgggaacaggggagcaagtggtattgatggtttgcttagtacatcaattggatttgccattggatcaaacaagcatgtattctgtgtgattggtgacatatcttttcttcatgataccaatggattgtcacttctgaaccaaaggacgcagaggaaacccatgacagtaattgtcattaacaaccatggtggtgcaatcttcagccttctaccagttgcaaaaacagcttcactccaaattttggagaaatttttctacaccttgcatgacatatcgatttccaaactctgtgctgcacacagatgttttctgctgagacttctgcctgttacattattggttatggagtcagctgtggatacaacaaataactttctggtggcaattttgcatccccagcattctcatgagttgtatttcaggataaaacatattctagttcagacaaaagctgaacttcatgatgccttagtgaagtcccatgaggggcatgttgattgtgttgtcgaagtggagaatcgcattgttgataatgccaactttcatagaattataagcatgttcacagaccatagtgcaaccatgcatctggcatatcttctgggaggtccatattgtaaggatggggtaaatggcttttctgttggtagaatacatgcagcagaatacatgttttacaggatccaacttgctgcaccacgtacatctgggatatcagaaagcagcttctttcatgaaggtttcatactaaagttatgtgtgggtgacagcattgtgggattcggcgaggttgcaccaattgaaattcatgaggaggatctgttggatgttgaagaacagcttaggtttctctttcacagaatgaaagatgctgagctagatgttgttcctttgttgagaggatccttctccaattggatatggacaacccttgggattcctccttcttcagtattccctagtgttaagtgtggtctagagatggctattcttaatttgctggagtcacaacgaatagatagatcctatggtatttttactggctccaatgtggtcgaatataatcagagcagcactgcaaacatacagatatgtgcactcgtagactcctgtggcactccaatggatgtaacacttgctgttgtcaaacttgttgctgaaggtttcaccaccgttaaactgaaggttgggcgtcgcgaaaatcccgctgaagatgcagctgttattcaaaaagtaagggaaattgtaggatacaagatcaatatccgtgctgacgcaaataggaaatggacatatgaacaggcaattgattttggatccagggtaaaaggcttatgtttgcaatacatcgaggaaccagtggactctgtaaatgacatcatcaagttctgtgaaaatagtggcttgcctgttgcactagacgagactatcgacaaccttacaggggatgtaatccctaagctacatcaattttcacatccaggaatagttgctcttgttataaaacccagtgttgttggtggctttgagactgcagcttatatagcaaaatgggctcacatgcatgataagatggctgtcatcagtagcacctatgagagttctgtaggtttggcaacctatatacagtttgcacattatgttgacagacaaaatgacataacatccagaataaagaacagaggttcttgtggaaatgtggcacatggacttggaacataccaatggttaagggaagatgtttcagatcaaaagttaaaaatccatgcgccaccacttggtgatggaatcagagcttcggcagaagatgcccatggctatctccagcatttagttataaacgacaagaagatagaaagaacttatagtgaagaaaaattgaggtcatatttcatccaagttgatggggataatttttcttatcaagtcaagcttcaagagggtggtgattgcacacatgaaaaggttattctctttcttcatggatttcttggtacgagtgaagactgggttccaatgatgaaagctctctctcctagtgcacgggttatagctgtcgatcttcctggccatggcgagtccgaaattctacagcatgatgttgaaaactccaaccaaatctccttttcagttcaatcagttgcagatttgttactgaagttgataagaaatataactgatggagcggtggttgttgttggctactcaatgggtgcaaggattgcactacacatggcattaaatcaaaaccacaagataagtggagctgttataatttcgggtagtcctggattgagagacgaggcaagtaaaagacgtcgtagtgctattgatagatcaagagcccacttcttgtcttcttgtggactggaaaattttctcgagacgtggtactctgcgaaaatgtgggccagtttacgagaacatcctaaatttgattctctagtgaggacacgaatgaaacacaataatatcaaagctctatctaaggttctcgctgactcaagcatagggacgcaaaagtccctgtgggaagatttgaagcacttgaagagccctctcctcatcgtcgcaggtgaaaaggacccaaaattcaaagagatatcgcagcaaatgtgcagggagataagaaagcacaaggatcgcgaatccgatggtctatgtgagatgatcattattccagacagcggccacgccgtgcacgttgagaaccctcttcctttagttagagcaatcaggaagttcttggtaagggatataccagacgtgatatccaagtagattacgaaatggaattatctatgtagaggagttcaagttacagcgatagccagagacagcagagcagaccaactctttggtgcggatgggtgcggcagttctggatgctattctgccgccggtagtctcacctacaccagcccgggaactattctcattgtggactggtgggggaggattaaagattagatccagagagaagggatgtgactccattatcatgcaaagttcctaaccatgtgacagacttggtaaggaaagaacgcaatgcgagggtcttcaagagatgaagattcttccctccaacgagtagcaggaaaaatcatcattgatgagcttcaccgtatagcggtataggagtacttgtgaggacgaattctaggagtacttgtgtgctgcagcattgtcccgagctgtacagtgctcttttcatattttgctgctctgtatatgctgttgcctgttggttatttgccactctctctcgccgtgacccttttttattaatacaaaatgatatgcaagtcctatgcatatccgtgaaaaaaacatggcggccagcttcaaaaaaaaaaaaaaaaaaaaaaaaaa

SEQ ID NO: 96922 - DNA, 3354 bp, Oryza sativa
  Clone ID: PAT_MRT4530_94974C.1
atggcgacgaggagcgccgccgccaggctgctctcctcctcctccgccgccgccgccgcctctcccctttggtccagacgccggcgccgccatccattcctccatccgccctcccgctccaagaccacctcctcctcctccagcagcagcaagcctcctcgccgcccaccgcctcgcaaggacggcggcgggccgcgcccgtgcctcttccaagaactctccggtctcgtcgccccatccgccagcgatgaccccgcgtttcagcctcggcgagatgggcaggagcggtgtggcctcctcggccatgacactgcgcagtgcgcggaaggtgctcgacgaattacccctgagggagcggctgcggcttctggttctttcaccggtagcgttccgaacaatgacgctcttgggttccttcctgatggtgggattgggcctcgtagcactgcaacaggcggtgctccggacagtgagcaatctatccaggaggtgggcgatggaaatgctggagatgttgagaatatcagtgaggttgtgcatagggtaacagaagttttgcgggcagaggtgcctggattgtctgtggaacagaggctggagaacctgggagttacatatacaccgaggcttgtgagcttggtgctcaacaggtgcttcaagaagaggcatttggggttcaaattctttgactgggttaggcaagttcctggattccagcacaccacggagacgtacaacgcaatgctgtacattgcgggtgaggagaggaactttggggccatggagaagttgatggatgagatggataaggagatgtgtttgaaggacatcaagacatggacaatcgtcatatccagttatgggaaggcaaggcagattggcaagatgctatctacctttcaggctatggggaaatcgagacatgtggcagcagatagtaaagtttataggacgatacttcatgctttatgcaattctgcaaagtccgagcttgctcttgagttctacaaagatatggcaaggaacacggaggttggatctgacatttttcgacttctattgtgttgtctcgcaggatcagataatgctgaaggtgttttttatgtcagagatgatatgattaagagcatgaagtatccagaggagtattgttatctggaagctctacggagcttctgtgtttcaggaaaaatagaagaggctcagaaaatcttccagcagatgatgaacaagtccattgctagctcatctgcatttgagggcctcctctggggcctttgcaaagatggaaggatggataaagctcttcaagttatggagtacatgaaaagcaactcatctgcgagcagtgccacctttggttctctcattgatggctacctgaggaaaggagagcgtatgaaggcacttgaggtgcttcaggaaatgagggaatatggatgtgttccattggcatcatcttatactcagctcatgcaacacctctttgcatttgatcaacatgaagcagcatgtagattgtatgaggaaatgcaggaaaatggtattgaaccagatgttgtggcaatcacagcactgataggtgggcatgttcgtaatggacatatatctgaagcatgggatgcatttaggaatatcaatgagaatggtcagaaacccacattgaaagcttatacagtgttcatccaagagctctgtaaggcctccaggccccttgaagcactaaaacttctgaaggaaatgctggaatcagatttcaggccttccgagcaaactttcagcaggattatttccactctgtatgacaatcactatttggaagaagctagcaatattgagaggatgcgagcatcttttaattgttgtagccctatagaagagctgcaacgcagaacattggatcaagttgactacactgataaatttgaaaaatcatctggatctggtccggaagagaaggaaaggacagtggagtttgttggtcatccttcgtataaagactgtgaggtctcagggagctttccttgtgatgacacacaggatttagaacaagcaaaggattacaacaatgaagacgttgaacaaatatgtcggattctgtcatcttctgattgctggagctcaatagaacaggctttagagatgacatcaatatcttttactccagatcttgttgatgccattatgaagcgttgtaaggcaaacagtcgtgctgctttacaatttttttcttgggtaggcaaacgatcttactacatgcagacaacaaagacatataacacagccataaaactcgctggctctgcaaaagattttaagcacatgaggcatctttacagagagatgatatgggcagagtgttgcccaacagtggatacatggaatgtcatgatttgtcagtatggaaatgctggtctaactgaaatggcccttgaaacattctaccagatgaagcagggtggctttcagcctgacaaaactacttacagtcacctaataatgtacctcagccgcagaaaagggaggaaagtagatgctgcagtcaagattttccatgaaatgtgtcgtgcaggctatatacctgacaatggaatggtttgcacatatctttctgtgttatgtgagtgtgggatgatagatcgtgctgaaagctcagtagtactattatgtaaacatggattttctattcaggctggctactccatactcattagatcattgtgcaggtctgatagaatggccgaagctctcagtttgttcgataatattaagaattatggatgttcaagaagtgcatacatgtatgggagtctcattcacgcgttgttgaggagggatcgctttgaagatgcttcagctaagcttgcagaaatgaagaatttaggtatagctcaaagcacacatatgtatacctcattcatgatctattacttggggaaaagggatgtttccaaagcgatggatgtacttaaggagatgacagaaaatggatgtgagcctactgttgtcacttactctgcattgatccgtggtcacatggcaatgggtatggtttcagaggcttgggatgtcttccaacgcatgaaactgaagggacctgtgccagactttgagacctactcaatgttcatgtcatgcctttgtaaggcaggtagatcagaggatgggttgcagcttattcatgacatgctgaatagtggtatcatccccagtgcagtgaacttcagaactgttgtccatggtctgaatatggagggcaagtacaagctagctgattctgttctccagtcaaaatggcaattgcggaatcgaaggaccttctcagattcgtttattgtcaattcatctgcttaa

SEQ ID NO: 96923 - DNA, 834 bp, Oryza sativa
  Clone ID: PAT_MRT4530_94975C.1
atgtgtatgtacatgtatgaacatcatatccgggcagccgcgaaatgcgtcaaaacccctcgcggaaataaaaatgcgtcgaaccaaagccatatgtactggcaagtggaggggggaaccattgttatctcgcgtatcatccaactcggcgttttgttgagtgcatgtgcgccccactcccactgcacgtttgtacggtacgattcgccgaacggcacgatatcccccccccccccccttgagctgacttgcaacgactggacggtgccgcatgttgccgctgtcacagatgagtaccccacgcactgtgaccgaaactacttcctcgggcgccgtggacgcggtacctccaccagttccagcaccaccatggccacgagccaaactaggagatactttgttcctcacagcttagcaggatctccacctgctcagatccaggagcagccaatggccacaccagtaccggagggacgggcaggccatgctgtaccaccagaccatttgacgtactcccaaggacatgttagggcgcaagggttaatgccggtaccggctaaatcgctcaaaaccctaacgctattggctggtatcggaatcggctggaactaccccatcggcttgtcagccgatcggcttattgatctactatttgtatatcttccggtcattgctcttattcaccataatcacaccaatacaatgtttggggtagcctatctatctattgtcgacatggcggccatgaaaccatcccgtagtcgacaacagggtcaatccaaggatgtgcggattcactttgtagatcgacaatgtcaatccaacatatcatgg

SEQ ID NO: 96924 - DNA, 207 bp, Oryza sativa
  Clone ID: PAT_MRT4530_94976C.1
cccttaaacaattttaaataaatttatgaaataaaactacacacataatgttttagaaaccccacgaacaaacggaaaaaaaataatggcatacaaaaaaaccggggctaatccaaagtgcacacacccatagacaagccagcagacccaacaatttttttcggaacacgggggcccccccggggaatcccggcccggtacccgaag

SEQ ID NO: 96925 - DNA, 1068 bp, Oryza sativa
  Clone ID: PAT_MRT4530_94977C.1
cgcttaaccctccctccagcgagcgatcgcggcagtagctctgctaacacacaatggcgttgtgtgaagagaagaggataagaggcgggttggagcctgagatggcctccatatataacactcatagatcgccatggccgtggtgcaaatgcaagacgtcaccggctacgtttgcctctccctggctctcgtcctgctcactctcgtgctccacaaggtggtggcgatcgaggaaggcgagcggttgtagtggcgccggccagccgaggcttccgccggggccgtggcggctgccggtcaacgatcggagtgtgaattattacaacataagcccgcaggcattgtcttaaatcatcggaccgagcggtccggaatacaaccaaaagcagaattagataagacagcggattttaggcagcggcatgccattgccacaggcaacgaccgtactaagacctactgggcgacatcgtcttcatctccctcctgcggcggcggcacggcttaccggcggcaacggcaatggtggcggcgcacggtggctgcgacggcggtggcgcacggcggctgcgacggcggcggggaacgcggcacggccaaggcgcggcgcggcgcggcggcttcgtggcggcggcgtggcggctctatgcgacgacgcggcggcgtggaggcggcggcgcggcggcgtggaggcggcggcgtggtggagtgggtagaggagaggaggtgaggatggagggaaagagtgggaatagtggagtttatataggagaggggaagagataagggggagaggggagaggggagacgcgacggcggcgcggggcgcgaggtgggggcggcgacgcgacgggcgagcggcagcggcggcgcgcggcgcggcgcggggcgcatggcgacgcgacagcgacggcgacgtgcgagcgatggcgacggcgcgcggcgatgcgacggcgatggcgacggcgcgcggcgcggggcgcgagacgacgggacggcgcggcaggcgtacggcgcggcggggcgcgagatggcgacgtgacgggcgagcggcgacggcgacggccg

SEQ ID NO: 96926 - DNA, 351 bp, Oryza sativa
  Clone ID: PAT_MRT4530_94978C.1
atggctggaagggggtggggaatcggtgcggtggttgcgcagaaggatttcgttactcgagaggccagagcagaaggaattgaagcactcggattattgctttatgttccaagagaaggggccggcgtctggcggctgtggcatcggtcggcgtcaggcggcggcggtgtcgggtggggcggcgctaagcggggacgagcggtggcggcgtcgagcggggaccagcaggggcggcggcgagcggggccgaacgggcggcggtcggccggccggggggacccggcggtgaaagcatccttcaggcccgccgcgacccccactgctgcgattcacacgaggagaatagattag

SEQ ID NO: 96927 - DNA, 807 bp, Oryza sativa
  Clone ID: PAT_MRT4530_94979C.1
ctagcggcgctcggagcgggcggcgtcggcgcagccgtgctcggctaggcggcgtctgggcggcagcttgccttgcccttcaccggtgagagctccacgtctccaaccaaaatccatcgtcttcaacccaacccaaaccaaacaaccatcatgagcagggggagcaggctgagccggtgttcgtgccctcctcctccgccggctcgatgggagcaacagcttcgggtctgactcgcggtttggcgccgacgacgacctccgggaggcgcgcggcataggcggaggagacgtcccatggcgccgcttccgccctgtggccccgtgcgccgccgaggccccgctcccgcgccgccgccgccagtcacggtcgcttgcgccatggggccccatgcgctgccgatgtcccgctcgtgcgccgctgccgccagtcacggccgcttgcgccttggggccgagcgcgccgccgacgccctcctcgacgccgccgccgcttgcgcccgagacgtggttttgctgcccgccgagccatccacattgctccttccacttctccgcatccgctcgtcgtcctcgtcctctccgcatccgcatctcttcccaatatttttgttcttcactgtagctgcacgtacagcgagcttgaatggcatcacatactccccatcccgtcctcagcatcggcgtcccacatggcatcgcaacgtcgccttcttcttcggcatcaggtcaactcggtggctcactgctagcacagatagcgggcggggagtggatctttcagttcttcctcagcgacttgccggacgg

SEQ ID NO: 96928 - DNA, 280 bp, Oryza sativa
  unsure (1)..(280): unsure at all n locations
  Clone ID: PAT_MRT4530_9497C.1
ggaagttccaagtaattctaaattcgttatagagaaaagagtgaccgtacttaattgaacactagtgtccatacatgctatgccaataagttttatgggtttgaagaccgactgatcaagtttaaattattgaacatggacagcatattttgctaagtccatgaaagttcactcatagcattgctcacttcatgcaagattttgtttccatntctccttgcangattttgctcggatcacgcgggtttccgtaaaggacanaaccattcctcacttcaaa

SEQ ID NO: 96929 - DNA, 512 bp, Oryza sativa
  Clone ID: PAT_MRT4530_94980C.1
agccctccctctccctctcccctctctctctctttctctctctctctgaagaaggccgagcggagaagaagccggccgggaggaagggatcgtcgtcgtcgtctccggcggccgaggaggacaacgacggcactgcgtcagcgaggtcggccaaccctcggcggggtcaccctcgagctcgcctcccctcgctgcgccgctatggctcgctgccctcgtcggtcgggtgtgtgccggggagtagtcgcctcggggagggcagaagcgggagctccccttgtcctcgccctcggcctcggcgtcaccgtcgtccccgcttttgcacctccaggatggacgccggcagcttgcgtcgacctgcaacaggtatggccgtcaacctcctcctcggctcctcctcaagacttctcaaactctctggctcgggcctcgaccctcacctcgtcgtgcctcctcgacgtcatcctccgcagttgcggccctccctccctgacgtctcctcctctttttga

SEQ ID NO: 96930 - DNA, 253 bp, Oryza sativa
  Clone ID: PAT_MRT4530_94981C.1
gtgccgccgcgccgccgccttcgaagccgccacgccgtcgccccagagccgccgcaccgtgcgtcaccgccttgcgccgctgcccagcccgagggagttgcggatccaagcgaaggacaagacccgcaagactttgagcaaggcaagtcatcactattccttgaacatgttgatcccaattgcgaaattattttgtatacaaataaaaattgcatgcaatgatgaatatcctacttgcgattatgccatgcct

SEQ ID NO: 96931 - DNA, 1161 bp, Oryza sativa
  Clone ID: PAT_MRT4530_94982C.1
atgggggacgcggcggcgggcgggaggaaggcggcggcgtccggcggcggcgcgcggctgcacgtggcgatgctggcgctgcagctcgggtacgccgggttccacgtggtgtcgcggctggcgctggacatgggcgtcagcaagctcgtcttccccgtctaccgcaacctcatcgccctcttcctcctcgcccccttcgcctacttcctcgagaagaaggagaggccggccatgacggcgagcttggcggtgcagttcttcttcctggcgctgtgcgggatcaccgccaaccagggcttctacctgctggggctcgagaacacctcgccgacgttcgcctccgccatccagaactccgtcccggccatcaccttcgccatggccgccgcgctccgcatcgagcgcgtccgcctctcctcccgcgacggcctcgccaaggtcgccggcacgctgctctgcgtcgccggcgcctccgtcatcacgctcttcaagggccccgccatcttcaacacccaccacaaccaccagccgcaaccgcaacagctcgccgtcgccgtcgccgccggcaacaagagctggacgctggggtgcgtgttcctgctggggcactgcgtgtcgtggtcggggtggctggtgctgcaggcgccggtgctgaagcgctacccggcgaggctgtcggtgacgtcatacacctgcttcttcggcctcatccagttcctcgccatcgccgcgttcctggagcgcgacgccgccgcctgggccgtccgctccggctccgagctcttcaccatcctctacgccggattcgtcgcctcgggcgtcgccttcgccgtgcagacgtggtgcatccaccgcggcggccccgtgttcgtggccgtctaccagcccgtgcaaaccctcctcgtcgccgtcatggcttccctcctcctcggcgagcaattccacctcggagggatcattggggcggtgctgatagtggcagggctgtacctggtgctgtgggggaagagccaggagagagccattgctgctgcaaaagaagcttctgctgctgccgccattgctgaccaccagcagcaaccagcttctgctgctgctgctgattcttgcctgaagcaaccactcctgccggcgtcgacggtggcctcagagaatgtgtga

SEQ ID NO: 96932 - DNA, 315 bp, Oryza sativa
  Clone ID: PAT_MRT4530_94983C.1
gatttcctcgatcggcttgcttttggacgcagggatgaggaggcccggaacagccaaggaaagctcgtaattccacatgcgcgacacgcatgcatatcgatcagtggtggaggcccaggcgaggagcgaccagagcagcatgtgggtggtgcatgatgtatgcatggtccatgcatgcacggattatgatagatgatggtatctgcatgttcgtcgttacgactggaacactcgatcgatatacgctttataatacatgaaactcgcacttcactgtcttgtgcggttcgtttttttttaaaaaaaaaaaaaaaa

SEQ ID NO: 96933 - DNA, 228 bp, Oryza sativa
  Clone ID: PAT_MRT4530_94984C.1
atgtggccggtcagaccgtgctactgtgcaacggctagaaaactagccgttgaagtgctatcagagggccccatcggcctggctggtcagaccggcgttgagtgggcggtcagaccggcctcggctcggtcagaccgccatcggctcggtctgaccgactacggctccatcggctctgtatcggccacccggagcagcaccatcccggcctccagtgggccggtctga

SEQ ID NO: 96934 - DNA, 1179 bp, Oryza sativa
  Clone ID: PAT_MRT4530_94985C.1
atggcgcgacctcgtcgacgaccgcgcgctgctgttgccgcactcggcgcacggcgttgtcatctcctacgtcgaccaccaccgcccgcacctcttctcccgcccctcctcctcatcctcctcgtcggcggcggcggcgagcgacggaccaagcctctgcctgccccgcgccgccgtcagaaactggcagtggcacgtgatagaccactgcggcggcctcctcctcctctcggcaactggggcggcgagctccgcgtctgcaacccggcgacgcggcggcgcgccacgctgccgccgccgccgcagcgcgcgtgcagggacgacgtcaccgccatccccgtcggcgagtacctcgtgttcgagccggccgtgtcgtcgccgtcgccgcactacgaggtgttcttgatccccaccgtgccggggcaccccgggccaccaccaacaccaccggcgcacatcaggttgaagccaatggcggcggcggcggcgccgttctgcctggacgagcggctagcgtcgctccgcggagcctcctaccccaccgtggaggagatgatggaggacatggctgaggcaacggtggattcgccgccgccatcgccgtatgagtgggaccaacaattattttgcttgatgtgttggcaagttgagtaccaatatttgtcggcggaatggccgccgccgtcgtacaagatcgacgcgttctcgtcgaggaccgggcggtgggaggagagggtgttcgtcagggaaggcgagacggcgacgacattggaggacatgaagccttggaactatgtctatgcaggtccatggcaagggtgcagtgtgttatggcagggagcactgtatgtgcattctggaggggcttgtgttacaaggttttcactgtcaaacgataagtatcaaatgatcagagcaccaataaacattctggacaacaaatttgacaaaccatatcttggcaaatcaaagatgggtgtgtcctttggatttattcacgattggcagctatcaatttggatcctgaaagaatcgacctatcaacatgaccttcaggcaattgccaaccagttagattcaatcgattctcatattgaccagatcaatggaccttggatcgtagaagaggatgacactgatattcctttaaacacagagactctctcacaaagattttga

SEQ ID NO: 96935 - DNA, 279 bp, Oryza sativa
  Clone ID: PAT_MRT4530_94986C.1
atggctggtgatccatatgtcccacttcccacagtgcctgagatagccctcatctttaactaccccgacaagagtgcgccgcggcggtggcagcgacgacgtgacgtggagagggggccgcacggcgtagcgggggaggaaggggcgctgggaggacaccgggcggcggccacgccctgccacatccaggcggcgcgagcgctcacgaaatccctccgtcctccagcgccgcgcgacgtgtcgcaccccggccacgtccacgccagcgcaaagcgctga

SEQ ID NO: 96936 - DNA, 195 bp, Oryza sativa
  Clone ID: PAT_MRT4530_94987C.1
atggcatacatacagatgaagtccatcgtggcgtgcgtgctcgagcagttcagcctccgatggccaaatgagtcgctcgacacggcctggcctagcacaaccaaagcatggtctgagatcagtcagtcaggccgtgctcgcccactggttgcacctacgacccaatatgacacaggctgtgccatgctggtctga

SEQ ID NO: 96937 - DNA, 762 bp, Oryza sativa
  Clone ID: PAT_MRT4530_94988C.1
atggagaggacgacgacgaggcgcaccagcagcaagggcgccgccgccgcgcccgcgcccaaggtggtggccgtcctcgccggcctgctcgagcgcgccgcggcgcggggcgacgccgacgccgacgcccggggcggcagcgcggccgccgcggcggcgacagcgttccgcgggcggacgaggccggagatcagcgtgcggcggtacgcggagcggatataccggtacgccgggtgcagcccggcgtgcttcgtcgtcgcccgcgtctacctcgaccgcctcgccgggcggtcgccggaggaggagtcatcgccatcgccatcgccgccggcgacggcagcggcggcggtgtgcgtggactcgtacagcgtgcaccgtctgctcatcaccagcgtcatggtcgccgccaagttcatggacgacatacactacaacaacgcatacttcgcgcgcgtgggaggcgtggaggtggcggagatgaacggcctggagctggagctcctcttcgcgctgcgcttccgcctcaacgtcacgccggcgaccttcgccacctactgcgccgcgctcgagggcgagatggcggcggatgatggccccctgccgtcgccgtcgccgtcgccggaggaggaggggaatgaccgtcgtcagccgccgccgcgacgaaaggacggcatcaccaacaaggtcgccgccgccgtggacagatcggcgctgctcacggctgctcatcacagagttgtagtagtagagatcacccaatga

SEQ ID NO: 96938 - DNA, 2220 bp, Oryza sativa
  Clone ID: PAT_MRT4530_94989C.1
acaacactgatcattaacctcaaatcgtccatgtctccgtttcacatactttttgttctaccatggctctgcatagcggtattggcaagtgatccgccgcccagctgcgagagaaattgcagcggcatagagatcccttacccgtttggccttgagcttgcctgcgccttgcccggcttcaacctcacatgcaacaccacagagggcaagctgtatgccggcaacgtggagctgctcaacatctcgctgctagaaggttgggttcgcatgaggatgcccatatccaattactgctacaacgacactttacacagcatggatgaaaactatataggttgggggttagatttaagagatacaccatacagattatccaacgttggcaacatgttcacggtcattgggtgccgaacacttgcgtacatcgacaatttggatacagctggcaatttaacaacaaccgggtgcgtggccacatgctggcaaggtaactattcaagcctcaacgacggtgactgcttcgggataggttgttgccaaatgaatatccccaaggggctccagtactaccagatttcgtttgacccacgcttcaacacaacggagatctacaactttagtccttgtagctatgcagcactcgtggagtcatctagattcaaattctccaagaactactctacatcttcagcgttcaatgattattatggcgggcaggctccgctacgcgtggattgggccattgggaacaagacatgtgaggaagcacggcatcaggccaattacagctgcatcagcacatacagcgattgcttcaactcgctcaacggaccaggctacatatgcaactgctccaaaggattctacggaaatccttacctgaagtcagatgatcccgatatcgatgagtgcaaggaaccaaataagtatccttgctacggaaaatgcaggaataaacttggaggctataattgtacttgcccgtttggtacaagaggcaatgcctacaatggaccatgcgacggttgggctgaacgtttttaacatcttcttgccaggaatttgtgccactcttttggttgctttaacgagtttgcttgggatagaatggatcaaatacaaacaacgaattaaaaggcatgacctcatgagaaagaggggtgagtattttaatctacacggaggccaattgttgacagatatgatgaacatagagaacaacatttcatttaagttgtatgaccgagatgaaattgagttggccacaaaaggctttgacaagatgtcaatcatcggtgaaggaggtcagggtactgtttttaaagggtataatctcgatcaagtgaacaaccctgttgcaattaagatgtgcaagggatttgatgagaatagtaggacagaattcacgcaagagttgctcatactttctcgagtcaaccatgaaaacatcgtgaagctaattggctgttgtctgcagtttgaagttccagtgcttgtgtatgaatttgtcccgaataagactttgcactatctaattcacagccaaaatgatccatccatcagaacactagagatccgcctaaaagtcgctgccgaatctgcggaagcattttcatatctacactcactggaccaccctatcttacatggggatgtgaagtcgatgaacatactacttagtaacaattttattgcaaagatttctgattttgggtgctccaaaattagggcagctgatggacacgatgacgtggtgaaaggtaccattggctatctagatccagagtacctgctgaagtttgagctcactgataagagtgatgtgtatagctttggtgtcatccttcttgagcttttaactcgtcgaacaccattatctaagcagaaggtcagcctcgcatcagtatttcaagaggccatgaaggaaggcctatttcttgagctcatagacacggaaatattacatgaggataacatgggattgataggtgatctagcaaggctggcatgccagtgcttagcaatgactagtgagagcagaccaacaatgagcaggattgcagaggaattgcgacgaatagaaaaacaagtacgacaacaccgtgggatcttaggacagccaccaacgaccagagactgtaatttctgtgcatgagccagcttggtcattccaacatcactcacacgcttacaataccggagagtgagattaatcaagca

SEQ ID NO: 96939 - DNA, 345 bp, Oryza sativa
  Clone ID: PAT_MRT4530_9498C.1
atgccgggcctcgcgcccggcaacggcctcctcgcgtttcgcgagttgctcgcccagccgacgcgccgccacctcgcggcgattcacctcggcctcgcgtgcggcaagcgcggtgtcccgttctcggcacgcctcctcccgaagccgcaaccccttcgcgcgatgagccaccgaagcctctgcggcaagggtggtctgcacccgagcatgctcctccagctcccgggctcactgcgcctgttcccgactgcgcccgtcctgttcgcactggttacggtcgaggacctcaatccgtcgatggatcgtggcctcgaactcctgcgcggagcgggcgcactcgtctaa

SEQ ID NO: 96940 - DNA, 982 bp, Oryza sativa
  Clone ID: PAT_MRT4530_94990C.1
gggctgcaggatcggcacgaggctctcctcccagctccgaacccacgcccatcggtcttcttcttttttcttccggctgcacccgcgctctcccttcttcttccgcgcgcggcctctttctcccttcttccgtgcgccgggtatccaagccactgggcgccgatgcggctagatgccgccgggcgccggccacgatgtggctagatgagcgtcgacgtctcatcccgcgagcgtcggcgtggcgagatccggcagacgaggaagggcgagatccggcggccgctgcagccaccctcgtcaaggggcggttcacacaggacaaggccgctttcttcacgcaattcgtcaagtccatcgtcaagctgagcaaggtgccgaggcccggtgggaacgtcggtgagataggggatgccagatccggcctctccaacaccggatccagcccctccaagggctagccgcctcctccaaggggcaagttagagggatgccagatccaggtcaggggaaaccggatccggctcctcctccatcaccgagcagccacctccaagggctagctgcctcctccatccccaagcggcggctgccacagtgtccacctcctcctgtgtggcactacgtgtcgatgcctccaccgtcatgcatcagatgggtactgatgtatgtgtttgtattcttgtgatttgattttagatcttgcaagttatcggtgccaagtttttaatatggggtgtgttcttcttgaagccgcatgatgtgttgccactggagattaatcgcaggggtggatgactgatgtgttgccactaatttgttagttggagccgcatgatgtgtcttgtttttcatgaaggtggtgcactggaagtgtttagagtttcattgtctttggtgattttggtagaaaattggaatttgaacattctagttctcaagtagtttgcattagtttgtttttatgttcattgtaacatcaacc

SEQ ID NO: 96941 - DNA, 272 bp, Oryza sativa
  Clone ID: PAT_MRT4530_94991C.1
ggaaatagaaaagacgactttttttttatttattacacccaaaggtgcacatggcacatttgatgaaatcagggcttatttttaacctccgaaccactagactggtaaaaccggagccaatacagcccccaggggggcaaggctactcggtgcacgcctagagccaggggtggaaccctttttagagggggaggtcacagccaacaaagcttgaggttgaacttggccccaatttcgatcaaaggagagatcatcaaacggcgggagttgga

SEQ ID NO: 96942 - DNA, 255 bp, Oryza sativa
  Clone ID: PAT_MRT4530_94992C.1
atgccgactatgtgcctctactggccccgccacgttggaccggccttcctagagctcgccggccagcctccgcatggtcagcggggagaaccagcatcaggaaggcaggaacgggcaaagcaccatggggagggctgcttgaatcaagtagttatttcacgagaagaaggctctagtggcaacaactcgggtttggggatgaccggtctcatcatggagccggcagcaacaagatccagctccggacggctgtag

SEQ ID NO: 96943 - DNA, 912 bp, Oryza sativa
  Clone ID: PAT_MRT4530_94993C.1
atggagaagccccggcaggtggtgcggaagttcctggcgcggccgcagcacgagggcgtcggcgccgtcgttcgccggagcatcgggaggtttgagctgaggtacttcgatccgttcctcgtcctggacgagttctcagtgtctgctccggctgggttccctgaccatccacacagaggtttcgagaccgtcacttacatgctcgagggagccgtgacgcacgaggacttcgagggccaccgtggcacgatcaaggccggcgacgtgcagtggatgacggccggacgcggcatcgtgcactcggagatgccggcggggcccggcacctccaggggcctccagctctgggtcaacctctcctcccacaacaagatgatcgagccggggtaccaggagatacagagcaaggacatcgcgagcacgacgtcggacggcgtgacggtgcgggtgatcgccgggcagtcgatgggcgcccggtcgccggtgcgcacgcggacgccgaccatgtacctggacttcacggtccgcccccacgcggcggcgcggcagccggtgtgcgcgacgtggaacgcgttcgcgtacgtgctggagggggagggcgtgttcggcggcggcggcggcgacaaggccggggcgcaccacctgctgctgctcggccagggcgacggcgtcgaggtgtggaacaggtcggacaagccgctccggttcctgctcatcgccggcgagcccatcggcgagcccgtggcgcagctggggcccttcgtcatgaacaccgaggaggagatcgacatgaccatcaacgacttcgagttcagcatcaatggcttcgagaaggccaagcactggaagtctcaggcgctgtgccacgtcaacgtcaagtgggacaatgaacaagttaaaccattcacatag

SEQ ID NO: 96944 - DNA, 2533 bp, Oryza sativa
  Clone ID: PAT_MRT4530_94994C.1
ggagaagaagcaaagaacgtgcaggcgacagcaggaggagaagaaagaaaagctaagagaagagagatttcagagaggagaagctcgccatgatggccggtgtggtagcttggatggttaaagggaggacaccactcgtctggtaaagctcaaaggaagctgctttgtgcccttttccttccattgctttccccttgctgcctcttttctttgccttgccttcgtctctctctctctctctctctctctctctctctctctctccttcttcctctttctgggggaaagcaatgatgtgagcttcttgtcatgcctggctagatgctgcagctggctcatgattaatactggctgctgcggagctgtggtggggaagagttcatgaatttactcaaggattggggcttggtgcgtgcccggaactgaagagtggaggaggattgtgctcagtgcctcttcagtcagaggtatatgaacaagtgctagttctacagttaatatcagacaagtcattggccgtaagcttcctaaggcaacatgacagagttcaaggttgggagccttgatgcccgagcaacaaagatcagaaatgtccccattgctgtaacaccagaaggattctggtgctgcccgtcgcaggccgtgctccaaaagacaatgaagaaccaaaatcagcaggcaaagcctaaagggggtgcatctcctcttgcatcaaaggcctcttcggttcagagggcgcctaccatttcatcagagagaagagcgcattcaactccgacaaggtctagaatcaattcggatgaacagaagtgcgcgccagcggaaaattcaacacccaatccaccgaaggtagcgaatgatagaccacagaagcagcataagatatctgttggatttggtcaacttgagatgagtgatctcaaggttgtgttgtatggcaaggatggtgttgctgtaaagatgagtgttcacaggaacatccttgcagaaaatagtacctggtttgctgataagctctcaagacaatccccaatgtcaagcatggaggtgcctgattgtgaggatgtggagatctatgttgagacagttggattgatgtactgcaatgatgccaagcagaggcttatcaagcaaagtgttccacgcgttcttcggatcttgaaggttgcagaattattaggtttccaagcatgtgttttgtcttgcttagagtacttggaagccgtcccttgggtcggggaagaagaggagaatgtggtatcatctgttcagcatctgcaaagtgggaattatggtgttagcccaatactgaagagggtatgctctgacctaacaagcccaccaaatgacacatttgtgcatatcatagaattagtcttgaagagcggcgaggatagagggcgccgcgaaatgaaatccctggtgctgaagcttctgaaggagaatagcagctgtaccagtacatctgtggatatctatgctgagactctctacagctcttgccagaattgcctggaatccttgttgaccttgtttcgacaagcgactgccgacgattttgctgagcaatccttagaccttaaagagccagtttttcgacaaattgctctagaagcagataatctcctttggttaactgagattttggccgacaggaatgctgctggtgagtttgcagtcatgtggtctaaccagggtgagttggctgagcttcactccaagttaccaaccaagtcgcgccatcttgtcagctgcgtcacagcaaggctctttgtggcaattgggaaaggagacatgctcccttcaaaggacacaaggaagcttctcttggatgtctggctgcagcctctcatggatgactacaactggttacagcatggctgcaggtcatttgaccgcaaagttgtcgaggaagggatcgggcgtactatcttgacactcccgctcgaggatcagcagacgatattgctttcatggctcgggagcttcttgaaggttggggatagctgccccaatctgcagaaggcctttgaggtgtggtggaagaggactttcgtgcggccttatgttgaacaagggaatcaatctcagccgggtcggagttgaggtctcaagtggttatagactgcaagaaaaaattgtcatcttttttcatgtagaatatcactgagaaagtagtggtaatgtcttactttttagataatgggtaatgtcttactcggtttgctgttagggagaaccccaggaaatgaaaacaaaatggggatgtaaattagtacttatcttgcaaggcttgagaatatgtgcgcgttgtgcttctgatgcttcattttatcaaatataagtgaagctctctgaattctggttgcagaatttcttatctgcttgttactatcatgacatcagtttgttgcactgcaatgaatattgcagcattgtgcaatagtagctttttttttactgtaatatggattcatgtacaaactcaatgtttacaatgcaactgtaaagatttccctgagatgtgccctct

SEQ ID NO: 96945 - DNA, 304 bp, Oryza sativa
  Clone ID: PAT_MRT4530_94995C.1
atggagagtaaatggttgagattatagctggtggggagtctggctaataagctgactaaggtttcagttatcaagccgatatcgaggatcacacaggtcccgaaagctaactgtgcggcgtgctgtggaggtcaaggaaatagtgaagctccgaccgctgtacgcatcgaggcgtggggtgccaggagcagcacttcgaccttaggtttggttttgccgggctttacaaccaacggtccgacgtcggggccaatagaccgcaaacatccccatggaaggcgtaaagttccaaccggcggctttt

SEQ ID NO: 96946 - DNA, 286 bp, Oryza sativa
  unsure (1)..(286): unsure at all n locations
  Clone ID: PAT_MRT4530_94996C.1
ccccctccccccccccccccccgcncgncccccccccgnnggggggggtagcgaccctactaggggcggttgcccacctggagggcgggcgccgccgcacctgcgctcttaagggctctccttcgccatcccgaaagttcccctcgggccatggtcacccacgttcaggaggcgtatccgggcacggttccggtaaaaaggttgtcctgcatagcgcgagccctgccaccaccatatggtcaatttcccatgaaatgaggcgcgcgcccagatgctccgcataggc

SEQ ID NO: 96947 - DNA, 565 bp, Oryza sativa
  Clone ID: PAT_MRT4530_94997C.1
aataaatcggatcgagcagaacaaatcggatcgagcagagaaaatcgatcgagcaaatctaacctaacaggagaccaaaatcgactatcacaacaccgaaccgggactcacgagacgctaggacgctggcggaggcgcaaagcgggctcgatttggcggcggcggcggcggcggcggaggaagaggagagggtagagctgggatgttagggcgagaatgtgatgaaccctagcacaaatcccctctcgctatgggtagttggagggtaaatggttgagattatagctggcggggagtctggctaataagctgactaaggtttcaattgtctaagccgatatcgaggatcacacatggcccgagagctaactgtgcggcgtgctgtggaggtcgatggaatagtgaagctccgaccgctataggcatcgaggcgtggggtgctaggagcagcacttcgaccttaggtttggttttgccgggctttacaaccaacggttcgacgtcggggccagtagaccacacgaacgtccccatggaaggcgtaaagttccaaccggcggctttt

SEQ ID NO: 96948 - DNA, 336 bp, Oryza sativa
  Clone ID: PAT_MRT4530_94998C.1
ggaagctggggaacagaagggagcgaggggcacaagggtgggaagggctacaggagaagaccagtggggggcgatgcaaggagagagcggggaggggggccggaggacccgggggcgaagggacaggggcgggcctcagacggagagacagagataaaaactggaaaagggggagaaaagcttggagaagggggcaagggcgatagaaagagtgagagagccgggacggccgtgggtgagccccagtcggacgcacctgtgacgggcggcaactatggggccgtcacaggtggcctcacctgtgacgggcgccaactgtggggctgtcacaggtga

SEQ ID NO: 96949 - DNA, 396 bp, Oryza sativa
  Clone ID: PAT_MRT4530_94999C.1
ttgtcgacgagtgatagtcgtggaccagatgagttgagtattgtggtacgttggaacgacgatgagatcgtagtcgatgagttcgacgagatctcccggcgatttggcttcggtactccggcttcagtaaactatggtgggtgtgtcggcgatagaattggatgccttgaaccccttcctgggggtcccttttataccgtagatcatcttgacccccaagaaagattccgagtaggactatggaaatcgcttgacttgtagagatattttccataatttgagacaaatcccaaacggtgtgcatggaaacaatctgtgtacgtgaaggtataccttatcggcatattccataattcgtaggatagaaggtatgccttatccgcaaccctgacatta

SEQ ID NO: 96950 - DNA, 699 bp, Oryza sativa
  Clone ID: PAT_MRT4530_9499C.1
gcacgacccgcgctgctgccttctccccctcctcctcctcctcctctcctgctcctgcatcctctcccacgcgcttccctgctgctcaggtctgtgtgcttgttcctctgcttccatctgcaccttcagacttcagttcagtgtgtatgaactatcagtgttgtacagttgctgctggcgtccacaaggccagatcttcatttctgttcccgggtttttcccttttccatttggctagcatatgactagggtttttcatcattcctttaatcctacaccagttttagaggtatttcgacttgtacattcctgtttggttgcaagagcttagcgtgacgagggattggatttgaccaaattaacaatttggtcttgtttgaaagagaaatttgataatatgccatccaatgaaatgggggaaccacgacataacactatttcatctcttctcttactattagtagaatagtacaagagcatggaaaggaaatctaatttatctatgttcaatcccacatcccacctaatggatcattagtcctttttaattgcctgaatcacgaccgtttcctactcatggtaattacaaattatgtcctgattttttttaataaaaaacgatgtactagtacatcttagaaggctgacctgagctttatcaggacataataaaagcctttggtttgctaatgatgacac

SEQ ID NO: 96951 - DNA, 333 bp, Oryza sativa
  Clone ID: PAT_MRT4530_949C.1
atggagttctcggttgaggcggctgtagaagcttcagctctctcggtgatgggtttggtctctgaaaacttccttgacccgtcgacttgtgtacctccacgagcgtcggacgactcatcgttcgaatcaccagacgcctcctttgatccagaagacccgacttgcgtgctgtcaagctccacctccgctgatcgaatctctgtattgccgctagggcgacgctgtcctgcaggcggcgttgaaggtccgacgagctcaccggcggcgttcctcttgggtcccgcgagatccagcggcatcctgccaccggccggcgtgcacggcgcgaagtaa

SEQ ID NO: 96952 - DNA, 192 bp, Oryza sativa
  Clone ID: PAT_MRT4530_94C.1
tatttgggggaacacctacaccttcttcacccggggggccaatgccagataccccatgttccactggaagcccacctgaggcgtcagctgcttgatggaccacaaggccacactcgtcagcggttagaaccatcagccctcgccatctatgacctctacgactccattcgccgccagctatcttcccaattg

SEQ ID NO: 96953 - DNA, 336 bp, Oryza sativa
  Clone ID: PAT_MRT4530_95000C.1
ttttgggtttttttttattttttttgcgggtttttttttaattttttttttttttttttgaggggcaaattaaggcgatttttcgcccttttccataggggcctggccaattttggattttaaaaaaaacggggttttttttgaccggccctgggccctcaaattttttcaggggccccctaaccccagtttttttgttttccatggggggagcccttaataatacgagcccggtttttttcgccgattttaaagcccaatctttcccaggggggggggacccaaaattttccccctttttaaacaaaattaaaagggtgcctgttttggccccag

SEQ ID NO: 96954 - DNA, 390 bp, Oryza sativa
  Clone ID: PAT_MRT4530_95001C.1
atggccgcgaacaggcggtgttgtttgcttcccttcattttcttcttcttcttcttcttcttcttcttcttatctggctgcctacgcgccggagccggcgatcgaggtgctctcgatccagtgctcctgtacggcgtggacaatgctcacagcatggtatcatcagtccacagcctaccggcttggcttgcctgcgtcgtgcttgcggcaggacatactccgctgcaggatgttcctcccccgtcgcccctacacgccgaccacgcactgctgttcctgccacccagcaatggggagaaggaaaggaacaaggaagaaagcaaatgtgatggaaaactagacggcagtgacaaaaacggggtgatgggtctcttccgagacatccgataa

SEQ ID NO: 96955 - DNA, 249 bp, Oryza sativa
  Clone ID: PAT_MRT4530_95002C.1
atgggtgatgtctccactcgaaagcgagcccgtgctctcggctctcctatctcacccgagagcgagcggtggcccgggaggacgtggacggcggaaggtcggatcatgcggccggggaagcccgggaaggccggggtcgtgttccgcgtggatgtggcggataggtggattgtgtggcgacatcgtaccggacgtgcaatccacagttcaacaccactatccacagcggcgtatggacgagacggataa

SEQ ID NO: 96956 - DNA, 178 bp, Oryza sativa
  Clone ID: PAT_MRT4530_95003C.1
agagaggtggactcccaggcaccgcttgggccacgccaccagagctccgctccgctcgctgccggttggaggaggagaggtggattcctgttgccgtttaggccgctctgtgctgctcaccatctgtcgtaggaggaagaggagagatggagccccacccaccgccgatgccgcttag

SEQ ID NO: 96957 - DNA, 147 bp, Oryza sativa
  Clone ID: PAT_MRT4530_95004C.1
atggctgccactcgcatcaacgacactcgcactgggattctactgccactcgatcatggagctctccaagaagacgacggcatctatcctgcaatgattggacggatttttcagacacacgcacacatgggctgcatactgaaatga

SEQ ID NO: 96958 - DNA, 745 bp, Oryza sativa
  Clone ID: PAT_MRT4530_95005C.1
ggagtatgacagggccatcaggtgctgtgcattggacaaggacatggagaatttcccccatggcgacctgacggagatcgggcaacgaggcctgaacatgagtggagggcagaagcagaggattcagcttgcgagagccgtctacaatggcgccgacgtctacctccttgacgatcctttcagcgccgtcaatgcgcataccgctgcgacactgttcaatgattgtgtcatggcagctcttgagaacaagacggtcattcttgtcacacatcaagttgagttcctctccaaggttgacaagatcctggtcatggaaaatggggagataactcagtgagggaacttacagtgagcttctgcaatccggcacggcattcgaacagcttgtgaatgcgcacaaggactcaaaaacaatactagacaccgatgatcgccgagaaggagcaaaagaactcggcgcgtttcagtaccaggtaccactgatacagcagaacagtgaggcagagatctcaaccggtaacctgaaatcagtccagctgacagaagaggagaggagggagctaggagacattgggctgaagccatacaaggattatgtctcggtatccaagggctggttcctcctttccatgatactagtcacgcagagcgcgttcttcggcctgcaatgcctggcaacctactggcttgcagtagcaattcagaaccaacaaattcagtgctggggttgtgattggagtctatg

SEQ ID NO: 96959 - DNA, 251 bp, Oryza sativa
  Clone ID: PAT_MRT4530_95006C.1
tgatccgtttccccttcgcatttccacccctcacgagttgcgttggattcgttttttttctttccctttatttttttggacgtaaaacaggtagaggcggctctactgaattcgcatttcgtgaccaaattaaagcgatgcgcaagatgcttctgcaattgcaattactatatcaaactgtacacttcatttaatttctacaagtcggtgcattatgcgttgaataccgtggtatgaccgtttgagtgaca

SEQ ID NO: 96960 - DNA, 286 bp, Oryza sativa
  unsure (1)..(286): unsure at all n locations
  Clone ID: PAT_MRT4530_95007C.1
cgccgccgccgccgcctgccatggccgcccgccgcggcccgcacgtaatcaagctgcacgactccgccccggcgctgctcggccgcgcgccgatgccgccgccgcctggcccccgaaacgagctcccgccgccgtcggcgtgctggtcaacacccacgagggggctcggccaccccgcgtcggggctcgagaccggtcgcgtcgaacgaacatcaggagtctcgtgaaacanggtngggcacacgtcggtcanagagtatgggcagaangtcggtggttcatgcga

SEQ ID NO: 96961 - DNA, 813 bp, Oryza sativa
  Clone ID: PAT_MRT4530_95008C.1
atggactccctagcgacccccgtgggcttatctccgccacttctcagtctggtgctctgcaatgaaccatgctatacgaaaacggttcacgggaacggacggccgagatcgatccatccaaaacggacggccgagatcgatcggtccacgaccggctcacgggagagggcgacgatgacgtcggcgatgacgtcaccaccggcggcggcggctcggcggctcggacggcgcacgctcgctggcgaacggcggcgcttcggcacgaacggagagcaccaacgggtagagggcgacgcggcgaactcaccggtgaccaaaggagcggcggaggagcaacggacggcgacggcgacgaggttgaaacggcggcggagatcgggtcgacggcggcgatggtgctccggcgatcttcggcgatggcgaagcggcggacgaggacggcgacgacttggcgatcccgacggtggccttcccgagcgacaacgacgaccggaacggcggcggcgcacggctggagcgacggcggcgacggcggcgcgaagctacatggcgctagggcactacggacgatgagaggcgaaggcgagggtggcggcaggtagagaagagcttggggaaccttttaaaggggctcggaggcgacggcgaaggcccacggcggccggcgacgagaaggaaagatcggggtttgaaggaaagagaccgatccgattcgaactcgaatcaaacacattccaaaccgatttagccgatgtttccaaaggagaaaaggtagaggagatcccaaagattcaaatatgcaagtgcacaaag

SEQ ID NO: 96962 - DNA, 571 bp, Oryza sativa
  Clone ID: PAT_MRT4530_95009C.1
atggactccctagcgacccccgtgggcttatctccgccacttctcagtctggtgctctgcaatgaaccatgctatacgaaaggaaaagggaatttattgcgtcagcggctagggtttcgctgtgaaccgggtgcatggcaacggttcacgggaacggacggccgagatcgatccatccaaaacggacggccgagatcgatcggtccacgaccggctcacgggagagggcgacgatgacgtcggcgatgacgtcaccaccggcggcggcggctcggcggctcggacggcacacgctcgctggcgaacggcggcgcttcggcacaaacggagagcaccaacgggtagagggcgacgcggcgaactcaccggtgaccaaaggagcggcggaggagcaacggacggcgacggcgacgaggttgaaacggcggcggagatcgggtcgacggcggcgacggtgctccggcgatcttcggcgatggtgaagcggcggacgaggacagcgacgacttggcgatcccgacggtggccttcccgagcgacgacgacgaccggaacggcggcgtgtcacgac

SEQ ID NO: 96963 - DNA, 325 bp, Oryza sativa
  Clone ID: PAT_MRT4530_9500C.1
tgttgatgatccttgacagtgcagtgccaagactggggggggcaattttgctccctcttcccgctcgtgcccaggccggggccttgcttgctagctagctttgaagccagctcagcaacgccgtcgtcgtatgcatgaaggggagcggcgcatcgatgccgtcctccatgttctacgtgcacgaggagcacgtcgcccaaatccaccactttctctaggagtgctccctctgcggtaagttcctctccggtcgacatcttcatgtacaggggagatacgccgttctgcaacgaggagcgcaggcatgaacagatcgtggtggaca

SEQ ID NO: 96964 - DNA, 914 bp, Oryza sativa
  unsure (1)..(914): unsure at all n locations
  Clone ID: PAT_MRT4530_95010C.1
tggatcggccagcccatgccctccgggcaacggagagagggaggagaggcgacgggatcagcgctgcccaagctcaccgtagccgctgctcctaccattgccatcgcccgccggtggtagatccgcctaaccagataagtggggtgataattcttggagagagcggagagcaggtcaatcatgatggagagtggcagtgatggggaaggtagaattttgctttggaataaatttatctaccttaatgaaatgaaaccaaatcagcgagagagtttaaaaaataaattgtatatatcagcaataaccatatttctcttcagttgtatatatcaacgtcaggccctgcaatttagtagcaattgactattgatcctagaaagcaatgtcagaacttttttccagatggtcaatttcagaaacatggtcccccttcaaaaaatttctttgttcagagatcatagtacaaaagttgagtgcctgtagttaattggacagaaatggtccatcatgtaagtgaggtgataattctgcaaccaccatataataaatcgaattgtcattttcattaaggtgagtcagtgtaggcagcgccgcatgcagttcttctccatcaccaatgaattgcctgcccatgtcaattctaggtgctgcttgaactctgtgtgaacaagattaggagttctccaatcccatcgtggcctgcagcagctgcatgatgcaaaagctgcctttggtgattagctggtggatctcgccatccaggaccttgctccaggcatgtgaactgatgaagccagtccgtgggtgtctcacaacttgggcctccaaggccggtccggaaaaccacggtgcctgtcccttctcggaaacnaaagccgccggctttggtttgcccctgccaggggattggggcc

SEQ ID NO: 96965 - DNA, 562 bp, Oryza sativa
  Clone ID: PAT_MRT4530_95011C.1
cttacacaagaataacaaattattttcttatagaagaataacaaatgacatagtcttctcatcaccacaaaacaaaaaattgaatgaaatgcacaaatgttctgttcactaagatgaatttaccgaacttactcccctgtatggacatgaatgtacaatcagagtatgcagacggtatgtctgataagttgtggcatgcatgtaggatcaactttatctacatgcttgccatatttacagttttaagtccaaatgggaaaccaagctgatatgttgtaaatgaaagaagtaggaccattccagcgctagctagagtatagaaatttgtatgagcaccctcatgtccttcctagcttcaaaatatatttatatttgctccacattctactcccctgcttccaccatgtttaacattttctatcacaaataatggagtcagcatttcctctgatgatgtataaagagttgtcttcattgccactattggcattggacagtaccaaacaagtcaaagtgatattctagcatccttgcaaaaaaactgataatctagcataattgg

SEQ ID NO: 96966 - DNA, 303 bp, Oryza sativa
  Clone ID: PAT_MRT4530_95012C.1
gcttattggggtgattacatagcttgtgataataacgtatggcttagccatctggacctcgctatagatggaagtctccactacctactgtgagatagtatttttgtcacgcttgccattaccccttgccacgaggaaagccttgaagattaaaagtgtaataaggaatgcacctagtattgcactttgtgctgttcttgtatgcaggcccccctcacttttatatgatcacgccagccacgatgttggtgcacttcacctgatggctatccaccacccactttaagcccctgtacaccatcc

SEQ ID NO: 96967 - DNA, 1024 bp, Oryza sativa
  unsure (1)..(1024): unsure at all n locations
  Clone ID: PAT_MRT4530_95013C.1
gcacgcggcgccgccgcccccgtgcaggggcaggtgcaggtgaagctcctgtacattgtggtggtcgacgacgatggctgccaccttccgctacacgcgctccctcctccacagcactctgcagctgatgggatgcaagccgcgccatgccttcgagatcagcggcagggtgttcgacgagatccgaggtcacatgggcggtgacatggccatgggcggcggcggtggcgtgcagcgctacgagctggccgccgacgcggaagccgccagccccaggcagttccagttcgagctctacaagcgccgcaccacccttctcatccctcgcccgctcttcctccgcctcgtctgccacgccctcgccctctacaagtatgtcgcccccgaccagcgctctgatctccaccgagcctgcaggatccgggaaaggaaggaatcagtcaccattcttctctgcggaaccagcggctgcggcaagtctactctttccaccttgctggggagcagattaggaatcactactgtagtctccaccgattccattcgccacatgatgcggagctttgttgaagagaaacaaaatccccttctctgggcatctacctctcatgcaggcgaatgcctcgacccagtagcggtcgctgatgctaaagctaggcgcaaagccaaaaaacgctcaggcatctcaacgacctcaaccattgattttgataaaaccaggcctctcaatgacaaacctgacggcaaaccaattgggaagaagcagatggccatagaaggctacaaagcacaaagtgagatggtcattgatagtttggatcggttgattactgcctgggaggatcgcaaggaatcagttgttgttgagggtgttcacctaagccttaattttgtgatggggctaatgagggaaacatccttctataataccttttatgatctacatatccgatgagggcaagcacaccgngaggtttnccgtacgtgcaaagtacatgacacttgncccacaaaaataagtacg

SEQ ID NO: 96968 - DNA, 657 bp, Oryza sativa
  Clone ID: PAT_MRT4530_95014C.1
ggctgtttgttttttttttttttttttttttttcaagaactacatatatatatatggttatctttgagacatcgtagtgtacattggaggggccttaaatgtcccccaaaaaaactttctacagctatcattgccatctgtgcggtagaagcaaaggtttactagcatcaatgtggaccgctgggcgactgtaaaaacagtagcctgtgcaagccacaattacaatcagcaaccgttaagagcaatttgtacagcatatggcaaataacaaaaataatcagaaagaatggcgacatatataaaagaacatatactaaactaataaacaaaccaagattttacaattacatcacaggctatggtacaaagctatcaagcagatatgctggcgtaaaaccccaaccaatcaagcctctaaaaataaaaaatcaaacagcagagataacgaccagctgccttagtcgtcgcctgccgtggatatggcaagcgttcttctggagatttccatgtggagttgctttacgaggttgatccaggcaccaacgctttgcccgtctattgtcaccccagtcaacgactgttgctgctggttgttcataccatttcgttcaaccaacccccctaacacgttcgggcaattcctcaaaacacctttga

SEQ ID NO: 96969 - DNA, 177 bp, Oryza sativa
  Clone ID: PAT_MRT4530_95015C.1
tcgcacccaagggagtaactggggtcggtcgcctctgggaagacctcggagtaggtcggactgtaggatgggtatggatatggatagtagaccatcttagtagggtaggagagacgataggaaccatgggtttggtttggttgtggatgggatatgtgtggagtcattagaaccaca

SEQ ID NO: 96970 - DNA, 368 bp, Oryza sativa
  Clone ID: PAT_MRT4530_95016C.1
ataacaagggaaagagcgcggggcatacatgccgctgatgcaatcaaccatactcacatgttgaagacgggcctactaaaaaactactaccgcagtctggtatcaaatattaaaacgatcacgtttataatatagagacagaagccttatattccaacttaaaactgcccttgatatatatacctgactcacaaccctaaacatgcattcggaagatgttcaatactttatacattcaccaacttaactagatcatggctttgaaggctaggcatgaccgatctgaaaaggacccgccgcgcacacacagagggagtgggatgtaccaaagggtgtctgaagaatgacgttcttcctggtgaggaatg

SEQ ID NO: 96971 - DNA, 139 bp, Oryza sativa
  Clone ID: PAT_MRT4530_95017C.1
atattacattcatttaatttttttttttttacttgtcttaacatcataaaatcttatttagtgactgaagctaaatcagaaggcctgtacatataaccaggtttttgcccaaagccttggtgatcataatgaaactcaa

SEQ ID NO: 96972 - DNA, 702 bp, Oryza sativa
  Clone ID: PAT_MRT4530_95018C.1
gcacgaggggaggaagcagaggcagcaagggggctttgccaagggaaatgatgatgggccagatctgaattttgaaggtgacgaagggttcaagcaatcaaagaaaaagaggcctggtgtttctcctggtgataggtctggtggtcttgctaagaagggtaaacaaggaaagaacaggaaatcaagggattccaagtttgggcatggtggtcggaaagggctgaagaagcaaaacactgcggagacgacaaatgacttcagaggattcaaccagatggacaagtcacaaaacaagaggagaaaaatgggttgacgcgatattgtaagaatctgcgtctgcttccttgagctgtattactagttgtttttggtaactttattttactgcagtacatcgttgctagatgcgaacgttagttgagatagattgtaggaggcagttaaaacaaaagaccattttatgttttaactatgctgttctccacaagatatttgcatgtatctggtgatggccctttttcgttgtgtgatgtggaagaatcaatcttaccctggaattatcctaagagtgtcttaaggatgcttggtccccttcctgttttgaaaaaaacaacaaaaaaaaaaaaaaaaaaaaggggggggggaaaaaaaaaaaaaaaaaactcgagactagttctctctctcctgcagcccggggatcca

SEQ ID NO: 96973 - DNA, 366 bp, Oryza sativa
  Clone ID: PAT_MRT4530_95019C.1
ccccaaaaaaaaaaaaaccggggggaatttattcctaaacaaacccaaaaccattggagggaaaggaattgccgaaggcccaaggaaacccccctttaaaagcaactgggggcccgggaaaacaaattcatgacaaaataaaccaccccaaaaggaacagcccaacaatataaggggcctagggccaaaactaaaaaaggctctgggggggaaccccattaaaaaaaagaaggggagccctttctttctttcccccccaaaaaggaagcccccaccatttaaaggggacagctcctgggccttgccccaaaaaatcccttccatcccggatgctttaaagcccctagagaaatcgggggaaaaaga

SEQ ID NO: 96974 - DNA, 1014 bp, Oryza sativa
  Clone ID: PAT_MRT4530_9501C.1
agaaacaaggcatgaacaaatttcctctaaaggctacaatgtaacagtatccatatctcaaatgaacaaccacaacagtaaccgaccagtttatgaaacaaactatcctgtaaagtttcttcttttttgttttccagcatctaccacaacagtgcgcaatgttctagagcaaattcttcacatctgccgccaacttgggactggaagagggatggcaagtatcatttgattgatcagcttagtcagcagtagagagccacagcagcagctccatggtttttattgcctactcttcttggagctgctgcaatcagggcacttgtagtgctttatgtgttccgctttcgctggtgttatcctaacgcatttgccgtggaaccaccgctcgcaaatgtcgcacccaatccaaaactcgttggcgttgtagcggccaccgcaggttccacatagggtttcactgtgttcttcttcatcgtacccatcgtcaacaactgctggcctcgaggtttttgtctgcacgtcatttgctcgctttcctgagtgcctggatttgctgccattgtcggcaccagatttattatcccttccatgcttcctatcagacagtgcttcaagcacggttggatggtcattgatcaagctgaataagcgcttcctctcgttgccgttgaggcgcgcgccgaagaagaaggcgacggagagcagccacgagtcggagtggacggcgacgagcgagagccagtcgcggcggtgcatcccgtccctggcgaagttgatcccgagcgccggctccggcagctccggcggcacctcctccgccggcagcgccacctcccaccgcccgttcgggtgcccgtacaggcacaaattctccttctctgggtcgcagaatccgtagaactcatccacatcgacggtgagggcgcggacgaggccggcgcggcggccggagaagtccttgaagatgtcctcgacggtgcgcggcgcgggggagacgggggcggccatctccat

SEQ ID NO: 96975 - DNA, 516 bp, Oryza sativa
  Clone ID: PAT_MRT4530_95020C.1
atgaagaagatgaggaaggtggccgagttcttgaggaaggcggtggtggcgctgagggggaaggccagcgtgctcagggcgaggctcctcttcctcgcctcgctccgccgcaggacggcggtggtcggagccatctcgcaccaccttcgcgcgctcatgccgggcaacgctccggcgccggcgccggacggcggccgcctcccagcggcggaggacgacgacgagcagatggcgctcgacgacgtcgctggcctctccgagctggccaccttgttccaagaagtcgacgacgacgacgacggcgcgcgctaccccgactggacacactcgatgttcgacgacgacgacgacggcgagggcggcggcgaggaggccgtgtcggtgatggaggtgatcaggaggcggcgggagggggacggggaggagttcgacatggaggaggagatcgaccacgccgccgacatgttcatacggcgagtccgccaccgcatggccgccaaccgccggagcttttag

SEQ ID NO: 96976 - DNA, 457 bp, Oryza sativa
  unsure (1)..(457): unsure at all n locations
  Clone ID: PAT_MRT4530_95021C.1
gattccgcttgagagactcggcgccggtggtggganggaacantactacntcgttnacngtgctgacnaagaacggcggaacggcgacgaaggcngcaaagcaccagctgatcacggccaccgtcnacgacngcaagctgttncatctgcaaggcgcaagccggcgacaaanaaagtggttcaaggggcgccaggaaaattcgtccaaaagcgcaaccagctccttcagcgtccncatgatcgtccaaaatctctatctcagcttctctttnatccctaanccnaatcnaaatcaaatcaatccaatttcnttgctccanaaaaaatgccattgcaccccntgttntgtgttgcgtgtgtgtttcctcngaatngtnccntgaaaaattaanaacaactttaaggaanaaaagttcaatccatccatttccccctgcntgncanggattgattttcc

SEQ ID NO: 96977 - DNA, 330 bp, Oryza sativa
  Clone ID: PAT_MRT4530_95022C.1
cggacgcgtgggcggaagcgacattgtcaccgaaggtactaaaggcactctacgcagacgggaggcgttcagatatttgtccgtgtactacctaaagatgttcctgctaaacgtcccatctactactatggctctaggactgctcttcttcatggatgaattgactggcttcgagaccatcatatcccacctggcaaagcctctcgggcccattatcacatggatcgatgctttgcctgtaatattggtgatagcacagtcgataacttatgccataaagaacgacgttttaatcctgaaggtgccatgtgcgaattgaggcgctgaaaa

SEQ ID NO: 96978 - DNA, 237 bp, Oryza sativa
  Clone ID: PAT_MRT4530_95023C.1
atgggcttcggcctgccggccgccgccggtgccgcggtggtcgacatcgatggcgacggcagcttcctgatgaacatccaggagctcgccatgatccacgtcgagaacctgccggtgaaggtgatggtgctcaacaaccagcttggttatccctcttcttcacatttgtttgttctcagtatattcttcaacaaccagctagttctgttcatgtgcatctcatattctagaagttga

SEQ ID NO: 96979 - DNA, 2263 bp, Oryza sativa
  Clone ID: PAT_MRT4530_95024C.1
atgggcgagggcgagttcgtcgacgtcgagcgcggcgtggtctctgctacactagctctctctctcctgtgcagagctaagcgggaggcattaaccccccgcgtcacgcgcaatgggtgaggcagcggcggacgagcgcggcctcgccgccgccgccgccggggaagacgaggaggagacgtcgccgatcgaggaggtgcggctgacggtgccggccggcgacgacacggcgctgccggtgtggacgttccggatgtggagcatcggcctcctctcctgcgcgctcttgagcttcctcaaccagttgttcttctaccgccaccgagccgctcatcgtgacgcagatcacggtacaagtggcgtcgtggccggtgggctatttcctagcgcgcgttgcgccttcggcagcgggtccgcctacgccgtcatgatcgtcgacatcatccgcgccttctacgggcggtccatctccctcttccccgcatggctcctcatcaccaccacgcaggtgctcggctacgggtgggcggggctgatgcgcaggtacgtggtggagccggcgcaaatgtggtggcccggcacgctcgtgcaggtgtcgctgttcagggcgctgcacgggaagggggaagagaaggaggagaataaggagggcagcggcggcgggatgtctcaggccaagttcttcctgatcgcgctcgcctgcagcttcctgtggtacgccgtgccgggttacctgttcccgacgctgacctccgtctcgtgggtctgctggatcttctccaagtccgtcacggcgcagcagctgggctccggcatgaagggcctgggcctcggcgccttcaccctcgactggacggccgtgtcagccttcctgtacagcccgctgatctcgccgttctttgccaccgccaacatcttggccggctacgtgctcctgatgtacgtggtcgtgccggtgtcgtactggggcctcgacctgtacaacgcccggaggttccccatcttctcgtcgcacctgttcacggccaccggcagcacatacgacatcacggccatcgtgaacgaccgcttcgagatcgacatggacgggtaccatcggatggggcggatcaacatgagcacgttctttgcgctgtcctacgggctcggcttcgcgacgatcgcggccaccgtcacgcacgtggcgctgttccacgggaaggagatctaccgccggttccgcgcgtcgcagagggacaagcccgacgtgcacacgaggctgatgaagagctaccgcgacgtgccgagctggtggttctacgcgatgctcgcgctgtccatggccgtctcgctcttgctctgcaccgtcctcaggtcggcggtgcagctcccgtggtggggtctcctcttcgcctgcgccatggccttcgtgttcacgctgccgatcagcatcatcacggccacgaccaaccagacgccagggctcaacatcatcaccgagtacgtcatcgggctcatgcttccgggcaagcccatcgccaacgtctgcttcaaggcgtacggctacatgagcatgtcgcaggccgtgtccttcctgtccgacttcaagctcggccactacatgaagataccccccaagtccatgttcctcgtgaagttggtcggcacggtggtcgcctccacggtcaacctcgtggtggcgtactggctgctgggttccatccccaacatctgccaggacgcgctcctcccggcggatagcccgtggacgtgcccgaacgaccgcgtcttcttcgacgcgtccgtcatctggggcctcgtcgggccgcgccgcatcttcgggccactcggcaactacggcgcgctcaattggttcttcctcgctggcgccgtgggacccgtcattgtgtacttgctccacagggcgttccccagcaagacctggataccgatgatcaacctgccggtgctcatcggagcgacctcctacatgccgccggcaacggccgtgaactacaactcctggctgatcatcgggatcatcttcaacttcttcgttttccggtacaggaagctgtggtggaagaggtacaactacatcctctcggctgcgctcgacgccggcgtcgcgttcatggcggtgctgctctacttctcgctgtcgatggagaaccggagcatcagctggtggggtacggccggcgagcactgcccgctggcctcatgccctaccgccaaagggataaacttgggcgctgatagcgtctgccctgttgtgttataa

SEQ ID NO: 96980 - DNA, 390 bp, Oryza sativa
  Clone ID: PAT_MRT4530_95025C.1
tcaatatttcatacaaactatgttcgactaaccaattagaagagcaattcgtggggtctggtgtttctggaaagggtgaatctagatttaaggtattgtctgaggagttcagtctttttaacagcggcgaggatgggggtatcgacttcagtttgggcctttcttctttgggcaatttggtccttttcagcttgggtcttttcaacggcaccagcggcgaagaaagcttcttcggacttcttggtcttcttaaccttaattctgttgaagaattcgtcgttgagggcttcagccttaacaccggagatgtcgaccttagtggaggtggggatgacggtggattggttgactcttctgaggggaacaccgttgagcttgaagggaccggtg

SEQ ID NO: 96981 - DNA, 310 bp, Oryza sativa
  Clone ID: PAT_MRT4530_95026C.1
cactaatattttctgcttggcggaataaaccctattcggccatagaaattcccccgtgcactatgcttaccttatgttgcactagagaaacgttgcttaccccgatctgacgggcaggtaccaaactgcactttttaaggcccctgcctaccactggtttttacatagaaactctttacaaaggagggtgagatgaccaacgtgtacctttcactatgatgcaggagtttggtgaggggaccattctatgggggtggaaaactacttcctccttctatttatggcgtggggcatgatcaatgccttgctc

SEQ ID NO: 96982 - DNA, 675 bp, Oryza sativa
  Clone ID: PAT_MRT4530_95027C.1
atgactgctcctattcccgatctgcttctacttcctcgactacattgcaacctcttcgtcggcctcttcttcctctacatcaacatgccgaacactggtactggtgctattggtggaagcataggaaacgacagtggcattgctggaagagacggcactgagaacgacaacaccaatggagacaatacaattgctttgtcatccactggagcgttctccaaattaaaaataccaatttatgaccatattttcaacacagtattgatctacaacagctcagcctgcgctggccgcctgcgggctgcggcctgcctcccgcggccgccgcaccgctgcccagtgcggccgcgggagatcaagtcttcgttaaacctccgttacatgataattacgtgcggttaccttgctacgtgcggtgcggtgccctgcacggctgcacctgagccgaactggtactacaagaggtcgacgcgacgcgctgtgcagaggaggcgccaaggagagccgcgtcgcgtcagggcgtgcaacaccggaaccaggacgaaggcgaggaaacgcggttcccttccctttctttggatggactggacggaggagagttgggcttatgggcaggatttcaacagtgaggacgtattgggcattggtaacatgggcctgcggccgagatattaa

SEQ ID NO: 96983 - DNA, 447 bp, Oryza sativa
  Clone ID: PAT_MRT4530_95028C.1
atggagggcaacgggatccgtggagaggcagaggtggatgacaacggggaaggaaccgtgggagatggtgccctagcgacggggacggagtcatcgtggactcgtggtgcacatccccttcgaagaccagccccgttgctgcctgccgccctccacccaacaccctccggtgaggaggttgagttcgccgtggccaacgacggtgcgatgcacattgcctgcactgccgtcacacgccctgatgccgtgcgagacaacgtgcggagtgaaggctcgaggctggagctgacgatgacaaccgcgagctccctgctctctcccatcgttgttgacgagaccgtgtcggcggtcaaggaggctgccgtcgccgttgcttcttcaaatccgacggcccccacttcaaatctactcaagtggcatcagcgctcgttcgaggtgtggggctag

SEQ ID NO: 96984 - DNA, 1128 bp, Oryza sativa
  Clone ID: PAT_MRT4530_95029C.1
actagtggatcccccatctccatctccatctccatcttcttcttccttccaccaccaaccccccatctcctccatctccactccacctcacacgcctcatcgacctcccaagaaccaccaccgccttctcccatggccgccgccaccgtctccgtccgcttccacccggccgcatccgccgcgcgctgcggcggcggctcgcgccggagcaggcgcctgtccggggtcatcagggcgcagtcggcgccggcttcggcggcggcggcggcgctgacgcaggacgacctgaagaggctggcggcggtgcgcgcggtggagcaggtggagagcgggatggtgctggggctggggaccgggtcgacggcggccttcgccgtcgcggagatcggggcgctgctggcgtccgggaagctgagcggcatcgtcggggtgcccacctccaagcgcacgttcgagcaggcgcagtcgctcggcatcccgctctccaccctcgacgaccacccccgcatcgacctcgccatcgacggcgccgacgaggtcgatccagaccttaaccttgtgaaagggagaggtggtgcccttctccgggagaagatggttgaggcagcatcagacaagttcatcgttgttgttgacgagacaaagctagttaccggcttaggagggagtggtctagccatgcctgtggaggttgtgcagttctgctggaagtacaaccaagtgagattgcaggatctgtttaacgatgaaggatgcgaggcgaagctgagattggatgaaggcggcaaaccctacgttaccgacaactcaaactacatcgttgatttatacttcaagacgccgatcaaggatgcgttggcagcagggaaggagatctcagctttggaaggcgtcgttgagcatgggctgttcctggacatggcgacttcggtgatcatcgctggaacagatggcgtcagtgtcaaaacaaagtgagttttggggttttgttgttgccggtgttgaatttacgattttttgttgggatgtataagctattggggtgtaaaagcaggcaataagatgcttcactaataataattgaatatatttccccactctttcattgctaaatggtagaaaaaaaaa

SEQ ID NO: 96985 - DNA, 1164 bp, Oryza sativa
  Clone ID: PAT_MRT4530_9502C.1
atggcgctcccggcggcgacggcccgcgcggcggcgctgtgccggatcgcggcgtgcgcgtcggcatcgtcggcggcggcggcggcgaccggggggaggcgcggggcggagaagctgccgttctcgctggcggagcgggggatggtggtgggggggcaccgcgggatggggatgaacgcggtgggggcgccgccgggggcgcggatcgaggcggtgagggagcgggagaacacgctgctctcgttcggccgtgccgccgcgcacgccgccgtcgccttcgtcgagttcgacgtccaggttacaaaagatggctgcccaataatcttccatgatgacttcatcctaacacaagaaactgatgcagtctatgcaaagcgtgttactgatcttctcttggaagaatttctttcatatgggccgcaaaagaattcccatgagatctccaagccattgcttagacggaccagcgatggtagagttgttaactggagcgcaaaagatgatgattccctatgcacattgcaagaagtctttgaacgtgtcagtcctcgtctaggatttaacattgagctaaagtttgatgatgacatcttctatgaaaggagtcaacttgaccgtgcgcttcaagctgtattgcaagttgtttctcagtatgcaagcaataggcctgtatttttctcaaccttccatcctgatgcggcaaggattatgagggaacttcagagcttatatcctgtactcttcttaacagaaggaggaacagctcaacacaaagattcaagaaggaactcacttgatgaagctatccgggtctgcctagagtacgagttgcatggacttgtatcagaggtaagaggggttttaaagaatccctctgcagtccttagagcaaaagagtccaaccttgcacttctgacctatgggcagctcaataatgtgtgggaggctgtgtacatccagtatttgatgggcgtaaatggcgttattgttgatctagtggaggagatctcaaatgctgtggcagatttcagtaaaccagtcctcaatcagagcatgctagggagtggtgtcgacttggttggagcaaagcatcaggccttctcacagcagcagctgggtttcttgctctggcttatacctgaactgatccagcaaccacactga

SEQ ID NO: 96986 - DNA, 386 bp, Oryza sativa
  Clone ID: PAT_MRT4530_95030C.1
gagtattatcagtcttttgtttgttttttttttatgggggggggaagcagggccctttgccaattaaacccttatctagaatttcaataaatcgcaagaaaaaaaaaaaaaaatggggcgcttgggaccttctaaaacggaaacaaagaaggtgttttttccgcccctggggccctccccgggtccaaaggaagagcattccgagggaccaacctggaaataagaaaaacgagaccagagcctgcacaaattcccctttatacaaatgaaaaaaattctaaagataggggggtaaaagggcgttcctgggggaaaatgtaaatgggtacctatccccaaggaccaacaagcgaggagcccaaagcaaaaaaggcggggggcggggg

SEQ ID NO: 96987 - DNA, 517 bp, Oryza sativa
  Clone ID: PAT_MRT4530_95031C.1
gcacgaggccgatctcgcgctcgggggggtggaccctccacattaccacccgcgtgtctcggatatggtgacggggctagagggaaccgcatatgcatgttacgagacctataacttattgagtggagctgacaggctatatgctaaggttcttagagagggggacatctttcgagttccacaaggtgtcgttcgactcttactcattgtaagtagatcacctgctgtgagtcaagatgcatttgtgagcgcacaaccactatttagccaggcgtagaggggctgtatttaataacatgaattccgactgaaggtgttaccaaaggcttgcaagtgaatgaaagagatattgtgttaacttgagctcaatatcaagttaatcaaagtataaacttcgagacataatgagaggctactacaaatcataaatcctgtcggcagactaatagttgctcatgtgactgatcttttcggatacaggagtagttgttgataaaaataatctcgagagagggga

SEQ ID NO: 96988 - DNA, 129 bp, Oryza sativa
  Clone ID: PAT_MRT4530_95032C.1
ctctaccttacggccattgagattggtcatatgatgagatctgatgtcatgtacattggacctgagaaacttgtcgagatagcacactctcgagagttcaacctcgatagggctgaggctgaggctgag

SEQ ID NO: 96989 - DNA, 1217 bp, Oryza sativa
  Clone ID: PAT_MRT4530_95033C.1
atggcggcggttagggcgacgggagggacacaaggtggagtcaaggaaggaactcaaatgggaatcgggaacagggcgtggtggacgagggagacggtggccgtggtgaccggcgcgaacaggggcatcgggctcgcgctggcggcgcggctcggggagcacggcatcaccgtggtgctcaccgcgcgggacgccgagcgaggggaggccgccgccgcggcgctccgtgcccggggcctccacgtcgtcttccaccgcctcgacgtcgccgaccctgcctccgtgcaggccttcgccgcctggctccgcgacgccatcggcggcctcgacatcctggtgaacaatgcagcagtttcattcaatgaaattgacactaactcagtggagcacgccgagacggtccttagaacgaacttctatggggccaagatgctgactgaagcactcctgccacttttccggcgatcaccagccaccagccgaatactgaatatcagctcccaacttggactactcaataaggtgagcgacccggagctgaagcggctgctccaggacgaggagaggctgacggaggcggaggtggaggggatggcgtcgcggttcctggcgcaggtgaaggacgggacgtggcgcgggcaggggtggcccaaggtgtggacggactactcggtgtccaagctggccctgaacgcgtacgcgcgggtgctggcgcggcggctgcaggcgcgcggcgaccgggtgagcgtcaactgcttctgccccgggttcacgcggacggacatgacccgcggctgggggaagcgcaccgcggaggaggctgccgagatcggggcgcgcctcgccctgctcccgcccggcgagctccccacgggcaccttcttcaagtggtgcacgccgcagctctactccaagctctgacggccgccgcgccgcgcgagccgcgaggcatccgtgtagtgcggtgcggtttgtaattgtgcggacaagcgcctcgcgccctcgccgtcctgtgccgcgcggtctcagcaacgagctcaattactgtgtatacttagtaggtgtgtgaccgtccagctgaatatatgttcagaatcagatccaacattagcagagcgaaatcggtagctcggccgctttttcctaaaaaaaaaaaaaaaaaaaactcgagactagttctccctcgtgccgatcctgcagcccggggatccactagt

SEQ ID NO: 96990 - DNA, 178 bp, Oryza sativa
  Clone ID: PAT_MRT4530_95034C.1
tacccattaccaccccttggcggtgtccttgtaactgacgtctcttcacaccacgtattagtggtctcggaagttaaaaattacacgcctcagactatcatcatatgtcgaccactgtgaaactttcggtgatataaatagaaataaagttgtctttcatatttaaaaaaaaaaaaaa

SEQ ID NO: 96991 - DNA, 309 bp, Oryza sativa
  Clone ID: PAT_MRT4530_95035C.1
atgagacaggccagaactggtttggccgacccctggttctggtttgagccaatccagggccaccatctcttcaccgaccttctcccagagattgacatggatgatctttatgaagattatggaaacaccctgaattattccagcaaaaagaagcctcgtcccaagcataagacgttcgaggaggggatattgaacgttgttattgtttatcatcaagaaacaacctggttcttgcacgatgcatctcttgagaaggagaaccttcaggttgatattaagaacgagggtcatgcaatgcctaagaacacg

SEQ ID NO: 96992 - DNA, 273 bp, Oryza sativa
  Clone ID: PAT_MRT4530_95036C.1
atctccagtaagattcaagggttgtacgcagccatcatctcaaaagtacaacattcagtgggtgggggtcttggggaaatataaacatataacaaaacaagtacgtacaagaagagagtccacaaaataacagacatcgttcctaagataccctactaaaactatggggtgcaggcacaccagaagctgggcttggaccaatgatccaccaacttaaatgattgtagacgcagccacataagtttttttggttgccatggacagttattgggc

SEQ ID NO: 96993 - DNA, 3547 bp, Oryza sativa
  Clone ID: PAT_MRT4530_95037C.1
ggcaagtttgtttttgcttgatgacagtgttggcaaggagatagatttgcagatcgaaagaggtggtacacctttaacagtaaagttggaggttgaggatttgcactctatagctcaaaaacctttggtggaggttagaggggctagatcgatggagagccccgcgaaggaggaggcgggaggggagctggcgatggagatcgagtccaccgtcacggcggaggactggcgccgggcgctggcactcgtggtgccctccgtcgtcgtcctccgcaccaccgcgccgcgggccttcgacaccgaggtcgccggcgccagctacgccaccggcttcgtcgtcgacaagtccaggggcatcatcctcaccaaccgacacgtcgtcaagccagggcctgtcgtcgcggaggcgatgttcgtgaacagggaggagatccccgtgtatcccctgtacagagatcctgtacatgattttggtttttttcgctatgatccaggtgctatcaagttccttaagtatgatgagatcccgctagcacctgaagcagcatctgttggtctggaaatccgggttgtcggcaatgacagcggcgaaaaggttacgtctcttcaactagttggctcagaaactgtagatatgtgccaatcaatggtgtcaattttggcgggaacacttgctcgacttgatagagaagcaccttactacaagaagtgtgttcgcaacacttcttcggaactggtgtagtaatatatcattcggactgtctgggatctggtggctgttgataggaatacagttgctgtatttatctctcataaaatgctttcttttgctgcatatcccattgaaatacctgcagaagtcgtttttctgcatcccgttcacaattttgcattggttgcttatgacccttctgcactaggagctggagcatcagttgtccgggctgctaagcttcttcctgaacctgccttgcgccgaggagattctgtctacctagttgggctaagtagaagcttgcaggctacatcaaggaaatcaatcataactaatccctgcactgctgttaatattgggtcagctgactgtccacggtatcgtgcaattaatatggaggtcattgagctcgatactgattttggtagtgcattttcgggtatattgacggatgagcaaggaagagttcaagcattatgggcaagcttttccacccagctgaaatatggttgtagcagttcggaggatcatcaatttgttagaggtataccaatatatgcaataagtcaagtccttgagaaggtaatctctggtactcctggaccatttcgtattatcaatggagttaggaggccaataccattcatcagacttctggaggtggaactctatccaactttgctttcaaaggcaagaagttatggattgagtgatagctgggtgcaggctctagctaagaaggaccctgtgcgaagacatgttttgcgggtcaaatgttgtttggctggatattattcaaaaaatcgcaggagaggatattgaaaatttaggggaccttattgcatgtatttcaaaactatctagaggagcaagagttcctcttgaatatgtaaagtacaccgaccgttataggaataacttagtactggtgaccattgatcggcatgaatggtatgcgcctcctcagttatatactcgaaatgatgcaactggcttgtggactgcaaaatcagctataccgccggaatctccttttatagcttcagctcatcatgctggtcctattgatgcaaactccaattctgtttcatctttaccagaatctagtcctatggatctcaagtgccagcatgagtctgagaatttgacagatggatgcatcaaaacacaaactgatgatgagattaatgtagatggatcccactcgagtggggattggcaaatggtgaatttgttagggtgcggaccgtccatttgaatggcaaacctcgtgtgcttactttgaaacaggaccttcactactggccgacctgggagctcaggtttgaaccagagacttccacatggaagaggggaataataaaagcgttgcaatcaactgtagcgtgatcaactatgtttgtgtttgaactcttcatgctctcagagggtgttccttagggagcctaagcatggaggtgcggaaatggggaatgcgtgcccaactgcccatgttggtaagctagaatcctgcgtaatgcaggatggaatggttggcattaggataggatgcttgaagttgaaggatatagttattcatagaaaaatatatggattcattgcctgtggataattagaccgcagcatctgctttttgtataatctattctattgctacaatttttgcagtaataataaatctttagctctttagcgaccatataaaaatatatctacataaaagggctaagtagaagcttgcaggctacatcaaggaaatcaatcataactaatccctgcactgctgttaatattgggtcagctgactgtccacggtatcgtgcaattaatatggaggtcattgagctcgatactgattttggtagtgcattttcgggtatattgacggatgagcaaggaagagttcaagcattatgggcaagcttttccacccagctgaaatatggttgtagcagttcggaggatcatcaatttgttagaggtataccaatatatgcaataagtcaagtccttgagaaggtaatctctggtactcctggaccatttcgtattatcaatggagttaggaggccaataccattcatcagacttctggaggtggaactctatccaactttgctttcaaaggcaagaagttatggattgagtgatagctgggtgcaggctctagctaagaaggaccctgtgcgaagacaagttttgcgggtcaaaggttgtttggctggatccaaagcagaaaatctccttgaacagggagacatgatccttgctatcaataaggagccaattacatgcttcctagatatcgagaatgcttgccagaaattggaccaatctgttgattcagatggagtccttaacatgacaatattccgtcagggaaaagaaattgatcttattgttggaaccgatgtaagagatggcaatggaacaacacggatggtgaattggtgtggatgcataatccaggatcctcattcagcagtgcgcgcacttggttttttgcccgaagaaggtcatggagtttatgttgctagatggtgtcatggaagtcccgtacatagatatggtctctatgctctgcagtggatagtggaagttaatgggaagccaactccagatcttgaaacttttatacaagtggtgaagggattggaaaatggtgaatttgttagggtgcggaccgtccatttgaatggcaaacctcgtgtgcttactttgaaacaggaccttcactactggccgacctgggagctcagagggtgttccttagggagcctaagcatggaggtgcggaaatggggaatgcgtgcccaactgcccatgttgtaa

SEQ ID NO: 96994 - DNA, 198 bp, Oryza sativa
  Clone ID: PAT_MRT4530_95038C.1
atgtcgaacaaccgtggttcgacaagcggcgtgactgtcctgttcggggcctctagcagcgtgccatggagtgccgagctatgcccgttcccccaccgatgtgtctgggatcacggtggcgtctccggctacctgcaggaggagggacaagatgtagtagataccgatctggtcatggcgatgctctggtctacttga

SEQ ID NO: 96995 - DNA, 213 bp, Oryza sativa
  Clone ID: PAT_MRT4530_95039C.1
atgaagattgaggtggttcctgttcgcgagtacggcaactacaggttcccaggcaagcacgcccaggcccagcacctgctgcaagcgggcgtcgtcgtccggaattatccttacccacacggggcgacggccgcggcagcttttgcgtcgccgtcgtactcgtacgagcggactgttgatcaacgcggcgtggagaacgagggcgatgactga

SEQ ID NO: 96996 - DNA, 239 bp, Oryza sativa
  unsure (1)..(239): unsure at all n locations
  Clone ID: PAT_MRT4530_9503C.1
ttntgggactgaggccacaggnactccagancttantngagcantcgttntngacaacaagggnnacagtcttgctgnttgctantaccanaaggtgagcaaaacaagtnctgttngagcagcnctggctcacagcttctngagcaacgagnacactttttaccttcggggacanaagtatgngccttggacgaacttcactacctgtttaggncggtgctttcaaccaagttttgggc

SEQ ID NO: 96997 - DNA, 339 bp, Oryza sativa
  Clone ID: PAT_MRT4530_95040C.1
cctttcctcacatccacggttcggggtaatttggtatgcccgtacaaatgtaccgtgtaagtagtaagcatcaatcactgagctcaagggtaagaccctcgaggagctcattgagagcggtaagaagaagctctctgccagtccccaccggtggagctgccgcccccgctgcaggagctgccccagctgccggtgcccccgccgccaagaaggaggaggctaagcccaaggaggaggagaagaaggaggaatccgatgaggatatgggtttcggacttttcgattaagattattgtcaccaataaactgtccccaagttcacacaaaaaaaaaaaaaaa

SEQ ID NO: 96998 - DNA, 1869 bp, Oryza sativa
  Clone ID: PAT_MRT4530_95041C.1
atggcttccggtgcggaggtgagagtcgttgccgccatccgcgtcccgctcctccgccgctcgccgccgcacctcgagcagatcccgctctccctcttcgacgtctggttcttgccgcagccgccgatccaacgcctcttcctctacgacgacgacggcggcggcggtggcgccgacgactacttcccgtccctcgtcgagtcgctaaggtcgtcgctcgccgacgccgtcgcggtcttcttccccctcgccgggaagctcacgtacgtcccctccactggcgacgtcgtcgtcgactgctcgccgtccgccgtcggggacggggtcgcgttcctggaggcggagagcgacggcgacgcgcgggcgctgtcggccgccaagcggcacgacgtcccggcgttcttgcggctcgtgcccagcctggaggcccccgagctccccgcgccggtgctcgccgtgcaggtgacgcggttcgtcggcggcggggaccggggcggcgtcgcggtcggtgtggccgtgcaccacgccgtggcggatggcctgagcttctggcggttcatggacgtgtggtcggcggcggcgcgcggccggccatctccccccgcgccggtgttcgaccggtcggcgatcgtgcaccccatggccgctgacgtggcgcggcgcatcctccggaaggtgacaccggagctaccactggtaatctccatttttgtatctccccaccgcgaattggttgaggcgaacgtggcaacaccacgacacgaccacgcgccgtccgccgtcgccgacggggtcgcgttcctggaggtggaggtcgacggtggcacgccggcacggacgcccaccgagaggctcgacgtcccggcgttcttgcggctcgtgcccagcctggaggtccccgagctccccgcgccggtgctcgccgtgcaggcgacgcgcttcgtcggcggcgggggcgggggcggcgtcgcggtgggcgtggccgtgcaccacgccgtggcagacggccagagcttctggcggttcatggacgcgtggtcggcggcggcgcgcggccggccatctccccccgcgccggcgtttgaccggtcggcgatcgtgcaccccatggccgctgacatggcgcggcgcatcctccgtaagaaggcaccggagctaccactgatccccaccgcaaatctcttgagacgaacgtgggaacgtcacgtcgtgaccacgctagaactggacagccaccgcatcggccacatcaagaaccgcatcgcggagctcgacgaggcaaccacggcgagccccgggacagagcgccgcccccgccggctcccctccacgttcgtcgccgtcgcggccctcgtctggtcgtccgtcgtccgggccagggcgtcccgccagccggacgacggcgcccgcgcgcacctcgtattcccagccgactgccggcggcggctggatccgccggtcgacgcggcatacttcggcaactgcgtccggtgctgcgtcgccggggcggccgccggcgacctggccgacgcccaccgcggcgtcctgcacgcgcgcgaggcgatccgggaggcgatcgacgggttcttggagcacccgatggtggaggcgttcgacgcgtggatcgacgccgtcgccgcgctggtccggcagcccgggttcgtggccgtgaccgcgtcgccgcggtttcaggtgtacgaggtggatttgggctggggcgcgccgagccgggtggagttcgcgtcggagagtttgcccaatggcatggtggcgatgaccgccgggcggaaggaggcgagcgtgcaggtgatggcgacgctccgtccggagcatatggaggcgtttaggtcgcaacttctttactggtga

SEQ ID NO: 96999 - DNA, 1035 bp, Oryza sativa
  Clone ID: PAT_MRT4530_95042C.1
atgggcagtccagtctcggctgtagtggccaacctatacatggagagtttcgaagaagaagcgctggacacatgtcccctctcttgcatacctcgtgtttggaagagatacgtagatgacaccttcatcatagttcccatctctgaaacagataagctgcttaaacacatgaatagccttgaaccaaccatccagttcacatcagagatagagtgtgaagggaagatagcattcttagacactctagttcatagacacgacaaccataggctctccacctcagtctataggaagcctacccacacagaccagctaagaggtctagtgaaatgtctatttgacagagcttcacgcattgtgacaagtccacaacagccatgcaaagaacggacccgtgttcgcagcgccctgagtctcaacggttacccacgccgttttatacacaataccaagaatagatcgtcggaacccagggatcagaaggtatacaagacttttacagtcttgccgtacattgatggggtctcccaacaactcaagcgccgcctagagagccatggcattcgaacggttttcagatcagataccaccctacgtcaacaacttacatgccccaaggatccaattcctccacatagacgggacggcattgtgtacaacatcccttgtatggcatgcgatcgatcctacatcggtgaagctgcccgtccgataaaagaaagaatcactgagcataaaagggacgtcagactccgtcgaactgacaactcagccgtagccgaacatgcttgggataaccagcatcaaccagactgggacggggttcagtgcctttcccaggaaaggcattggtatacacggagggtgaaagaagctatcaatatccgtctcaatcctaataatttcaacagagacaacgggatcgatatccccgaattttggatgcggacgatacgccgccatgacactcgccgtcctgccagccaacactggtcgattccattcagcagacggtccgatccagcggcccgttga

SEQ ID NO: 97000 - DNA, 550 bp, Oryza sativa
  Clone ID: PAT_MRT4530_95043C.1
tagaggggtaacaaaccaccaaacgtggatgaaagccccaaaagacatcgaaacagctattaccggtaaagggggtgcttgggtttactccccaacagcaccaacaaatccggctgttggtttaatctgggtggactcttctaaaactccgaaccaaccaaaacgttgggttggtggagaaactgaatgggttgccttaaccccagaagaagtaaaagatttcccttggggtgaagatggttctagccttgctgactgggtagcacaagcagaacaaaagatttcttctgattcaatcattaatactgtattgggttctgaggactttacaggtatctttgacaaaaaggctaacacagaagacttaaacacccttgcttcttacgatgacttagatgctatgcaagctgagtatgaacgtttgctaaaagagggtattgcaggaattgacttctccccatatgtaactaatacggaattagaacagttgaaagatagtttcactttctctgttcaacaagccggtggggttaacatgttgaagaaataa

SEQ ID NO: 97001 - DNA, 352 bp, Oryza sativa
  unsure (1)..(352): unsure at all n locations
  Clone ID: PAT_MRT4530_95044C.1
nccacgcatacgagtaaatctagcttgctgtaaacactacctagtctagtacttatacgcataggccccactggggaactacagtgtggctctcctagattcagggttgccggcccttgctctctcgaccactgctctggctgatacacatggtgaagctcactccaacggcaggcacttcttctgcgtcgcttggtagctgccctgaaggaaggctctttactgatggtgacactctcgttctctactacaaaccgcgcgcacacaacctgatggatctaggtcaccctgacttacatgatcatgaccgcggacagctcctcctgactccgtggcggcggccactgagacc

SEQ ID NO: 97002 - DNA, 2813 bp, Oryza sativa
  Clone ID: PAT_MRT4530_95045C.1
cccccgccgccggatcgccgcgcgcgcccgtccgattcaccctccgccgcctcgtcaattccacgcgaacgcgagagctctcggaaagcaccaccaccagcacagagccagcgcgagagagagagagagggagaccaaaccccatcccggatctctcgtcgtcggcggcgtctgcgatggcgctctccgaccgctcccgcgagtcgctcctcccgagcttcctctacacctcctccgccgcgaggtccttcgccaccggcgccacccgcttcccctccccggtgtccccagcttccccggctccgggtgccgtcgggggcggcgcgcccatctcgatccaggctcccagggagaagatcgagatgtactcgccggcgttctacgccgcctgcactgccggtgggatcgccagctgcgggctcacccacatggccgtcacgccgctcgacctcgtcaagtgcaacatgcagattgatccagcaaaatacaagagcataacatctgggtttggcgtcctcttaaaggagcaaggacctagaggcttcttcaggggatgggtgcctaccttgcttggttacagtgctcagggcgcgtgcaagtttgggttttatgagttctttaagaagtactactcagatattgctgggcctgagtatgctcagaagtacaagaccctaatttacctcgctggatcagcttctgctgaggtgattgcagatgtggctctctgcccatttgaagctgtgaaggttcgtgtgcaaacccaacctggattcgctcgtggactgagtgatgggctccccaagttcgtcagatctgaaggcgctcttgggctttacaagggaattgttcctctgtggggtcgccaaatcccttatactatgatgaagtttgcctcctttgagaccattgttgaaatgatctacaagcacgctgttcctgttccgaagtctgagtgcagcaagtctttccaattgggtatcagtttcgctggtggttacattgctggagtcttctgtgccattgtctctcatccagctgacaacttggtctctttcttgaacaacgccaagggagctacagtgggtgatgctgttaaaaagcttggtctttggggccttttcactagaggactgccccttcgtattgttatgattggaactcttactggtgctcaatggggtatttatgatgcttttaaagtcatggttggacttccaacaaccggtggtgttacgcccgcgcccggtgcagcagagaaagcattgcaagccagtgcttgattcttatgcagagataatggcgatgtattcctgaagatccatctttgttgtggctggaattgtatcaattacttgagtttagcacctaaatcttaattttagtggatgattcttgtgtcatccttttgatgagaggaactcattaatcaggtgaagtaggtcttttttgcccccgggaaagtttgatgcttgatacataataaatttttggacagcaaggctgttagagctcaggttttggcatcacctgtactgaggaatactcacatctttgtgttccttaaaagcatacataccttgaatcaatgctaccctattttttttgttgcaagtcaaaaaaaaaaaaaaaaaccccataagaagcggttaacccccccacaggccccacgtaaaacgcgggggccgggaccctcccggccccccttcttcccccctcgctcccctcccttgtgcctttgcgtaaggccaaccccccccgcccccttccctccggtcgaccggtcccccggcccccctttcgccggggccggggccccggggcccccttgccgccctcgcgcctttcccttcttctttcgctgggtgcccctggtttcgggtccttgtcccttggtattccggccgcccctaaatataattttggttgaatgtgatcctaatacaacgaatttggacagacttcatgtccacattcgttgtaataggatatgccatatccaagcaaaatataagggacggagggagtataaaattaagatttaggaacccagatggttagcgcacaggttgtgttccatttcctttacccccatattcataaatttaattattttatactactctacatgtatctttggggcattccccattttacgatgtaaattactccttgttcagttattcatcttctgttcccctcatatttctggaggcaatccctgattccccgtgcaaatgacgacagggataaagctgtcccttttttttctcagtatgagttgattgtggaatcctgattgtctggactgttgaaatagtatttggttattgttgccaactactggtggagttgctccaacaccagccattggtgaagagcagctgaaggcctgatgcttgattctatacttccgaacttctaacaattccgtgccaacttggatgatggcgaaataggttcttagtttagaaacaaaaaggattttgttgacgaatgcttatagttcattaattcaatcgctgctaaaaaaaactgagataagcatgctcagggcttacaaattataagggtattgcggtacagagtttaggatagtagtatagatggccattcgatgaatgatgcttgcgtgaatgaccgtggcatccttcaatttttgtaggtctattttttttattgcagtagaaatgttgattacgccttgggccttggctctatcttttgctggccggttgttatcgttgtaactctccgcggtattcgttcttttcttcagatgtcaataatgcaatctgtgtagtgttccattc

SEQ ID NO: 97003 - DNA, 102 bp, Oryza sativa
  Clone ID: PAT_MRT4530_95046C.1
atggatcacgagatgagatttgagatggagactgacagtttggctggatctcagattcagatcgtgcagccgctgattctccagactattgccgactattaa

SEQ ID NO: 97004 - DNA, 222 bp, Oryza sativa
  Clone ID: PAT_MRT4530_95047C.1
gaaataacatgatgaaacacacaagtttgcctgttgattatttcctgtaatttatttcacagggtgaaatttgtagatctatcctgatcccgtaagagttgtattattttgttacccagtggaagatctcattgccaatcctgaaagcaaagaatggctattcatttcaacagagctgtgtggcggttcacacattaaaaacactatgcgggcagaagcatt

SEQ ID NO: 97005 - DNA, 2925 bp, Oryza sativa
  Clone ID: PAT_MRT4530_95048C.1
atggagctcctgagcggggcggcgctggcgtggcagcagtaccgcgccctcctccgcaagaacgccacgctcacctggcgccaccgccgctccgcctccctccagctcctctcctcgctcgtcttcatcttcctcatcttctgcatcgaccgcgccatccgctcccgcttctcctacaccaccgcctaccgcaacgtccccgacccggccgccctcgtcgccccgcccatcccgccctgcgaggacaagtacttcgtcagggagccctgctacgacttcctctggagcggcggcggcggcgccgggagcgcacgcgtcgccgggatcgtcgaggccatccggaggaacaaccccggcaggcggtcggcccccttcgctgtctcgtagggcctcagtgggccgtggaaaccctgttgggtacatcattgatccgaatgaggtcacagcagcaagatgagtgccaaagaaagaagaatattctgagagtggatgaatttagatttgtcttcatgtaaattatctctaggtgtaatgcaactatagatatgtttgtactagaacagtgtattttttctgttttgtggtaaaggaagtgcttgatgatagatacaacaaaattacatcttcactttggtgtctgacaaatagcttgacgattacacagaaaacaactatactattgcccaagctgggccaactttcttccttgctattgctatgttcggattcgtttttcaaatcagtgcgttggtgacagagaaagagcttaagcttcgtcaggctatgtctatcatggggctctacgagtcagcgtattggttgtcttggttaacctgggaggctttcgtcacattactttcagcacttcttactgtgctctttgggatgatgttccagtttgacttctttctgcacaataactttgggatcctattcctcctcttctttctcttccaactgaacatgcttagttttgccttcatgatatccacatttgtaacaaaagcagcatcagctactactgttggatttgcaatattcattattggcttcttgacacaacttgttacaacctttgggttcccatattcaacttcctaccagaagtactaccggacaatatggtccttgtttccacctgatgtttttgcccaagccctcaatattctgggcaaggcaacggccactcctgaagacaaaggaatcagctggaatcagcggggacaatgccaatcttttgagacagattgcgtcattactattgatgatatctacaaatggctcatctccacatttttcttgtggtttgtcctggcgatctactttgacaacataattccaaatgtcaatggtgttcgaaagtcagtgttctactttctgatgccttcatactggacaggaaaaggaggaggaaagttgcaagagggaggactctttagcttttttggttcgaaccgcccagctgatgatgcttctcctactgatgaggatgttattgctgaggaaaatctagtaaaacaacaagctgcaaacaatgaagtagatcctggtgttgcagttcaaatatgtggtttgcggaaaacatatccagggagttttagtatgggttgctgcagatgcaggacaactaaaccgtttcattctgtcaaaggtttatgggtgaaccttgagaaggaccagttattttgccttcttgggcccaatggagctgcgatgatttatgggcattctgttcgaagcactgctgggatgtcgaatattcggaggatgataggagtctgtccgcagtttgacatcttgtgggatgcgctaacagctaaagagcacatggagctgtttgctagcattaagggactgcctccatcaacaatcaagtcggtagcagaacaatccttaatccaagtgaagctcagccaggcagctaatgttagagcaggtagctacagtgggggaatgaaacgccggctaagtgttgcaatagctctaattggtgatccaaaattggtctttcttgatgaaccgactactggcatggatccaataacaaggaggcatgtctgggacatcatagaggaagcaaagaaaggaagagctattgtcttgaccacccattccatggaggaagctgacattctgagtgacaggatcgcaatcatggctaaagggaaattgcggtgcattgggacttcaattaggctgaagtcgaaatttggaacaggatatattgctaatgtgaatttctctggaaatggtcacacacaaagccctaacatcaacggcaacactgaagtcccggttaaccctaacatagaatctgtcaaatggttcttcaaggaacggcttgatgtggacccaaaagaggagagcaggacattcttaacgttcgtcatcccccatgagaaagaaccacttctgacggctaatatattttccattaagcagaggttctttggggaactccaagacagggaacgggaattcggtatctcagacattcaactcggcctcacgacgctcgaagaagtattcctgaacatcgcaaagcaggcagaactggagagctctactgctgaaggcaccctggttactctgaacctatcatcaggttcatctattcagaaaactctgaatatctctttgatatcacttccattttctatggcaatgcagataccaaagggggctcgttttgtcggaattcccggaaccgagtcggaggatcacccaagaggcgtgatggttgaagtttactgggatcaagatgacaatggatcactctgcatttctggtcactctgatgaaatccctgtcccagccaatgttcagctgggtcggcccccttcgctgtctcgtagggcctcagtgggccgtggaaaccctgttgggtacatcattgatccgaatgaggtcacagcagcaagatga

SEQ ID NO: 97006 - DNA, 438 bp, Oryza sativa
  Clone ID: PAT_MRT4530_95049C.1
cgtttcgaaaaaaaaaaaaaaaaaaaaaaccaaaaaaaaaaaaaaaaaaaaaaaaaaaaaaaaaaaaaaaaaaaaaaaaaaaaaaaaaaaaaaaaaaaaaaaaaaaaaaaaaaaaaaaaaaaaaaaaaaaggggggccgttttaaagaacccaattttacgaccccgtgcttgcaaattattattttttttttgggggcccctatttttttttttttggccgggtttttaaaaagtcgggatgggaaaaaccttggggttccccaatttattccccttttagaaaatcccctttttcccggttggggtattaccaaaaagcccccccccaatggcctttccaaaaattggccaaccttaattggcaaatggaaccccccttgtaggggggctttaagcgcggggggggggggggttccccccagggggcccgttcctt

SEQ ID NO: 97007 - DNA, 657 bp, Oryza sativa
  Clone ID: PAT_MRT4530_9504C.1
caccgtgcccacaaacgccctggagcgcacaacgacgaccgctgtcgggttctcggtgtcgttctgaccaaaccgaacccttgtgccaccagaatcgcctagacgtcctcttcaagatgctccaagaacctcatggatcggtgaatcgaggagggagatcggcgtcatcttctccaattccggccgccggcgtcgatcttcgattccttgatcccgggtgagcttcggcgcaattcctgactcgtgtagcatctttagatggtctttgagccgttccactctttttcttggcagcccggagtccggatggtggttgtcaccgttggcatgccgatttccgccgccgtcgggacatcctctgcatcgtcgtcgctgtccaggcctacccgtaccgcgtccgagcttcgatgattgcttaaacggtgaagaagtggtttaggtgctgatattttcctgattcaagcctcctcctcctccttctcctcttgtacaacaatcatcaagtgaccagactccatcggctgtaggaaatcaccatgttgaagaagaagaacaactagctgcccctgctatcccagccttagccgatctgttttccttcgatattaaagattatcttgacgatgaaacagaagaagatacaacagcaaatctctg

SEQ ID NO: 97008 - DNA, 1614 bp, Oryza sativa
  Clone ID: PAT_MRT4530_95050C.1
atgccgtgggacgaatcgagaaacacggatagctgtgcgccccagcgtcagtccgccgcacggccgccgagcaacgctgtgcattcctggcccaatatgcggcgattgagcttgggctgcagggaggattccaatccttcagatcaggctgtcagcgctgctatcttgccgagatgtagaacaaggtcctcaggttcccaacaacctgataattcttctaatttggatgagatattggctggcgaagaaacagatgaggaaatgttttttcgtggtcccacacggatgccaccacgacctacccgagatgaggacaaacctgtgctgactccaaaaggagataggcaatggcaggctaatgattttgggggcaacattagggtccccactggcatcctgaccgtgattattaagcattttttccctggcattgtcaattttaaaggaagagatgagccagcatggagttggaaacattacaggattgcaccggacgatccagaaagcgctatactgaatcgcttgccaagccgtctccatcgtgttgaggaagatttctggctttacttcaggtgggcagagagaacggaacaagatgctagaaaggttgtccgcaattgtatcaagcaccttttttcggacctgatttatgaaactcgtatcctggccgtgctcaattaccaaaggaagattttaaaggtagaaccatggtggttcctaaaggcaaaaaatgcgtggcgggagttgatacgattgaagtggtgtaatcctgaatggcaggctagctcacatgctcataggatacggagggagaaaatgacatggccatctcaccgccaaggcagtgctaacttgagtcgtttccaaaaaaatttgaagaagaaaaagcgggtagtgtctcaaatggaggcctacacagaaggaaggggggaatatggagaggatggacgattcagatgtaacacacatgcaactgggaagcttgaggcctataatgaagcttatgttcagctgcatggagcaggaagtgattggcgcaattctcccattgatccaatggctgtgcacatggctggtggtggaaagaaacatggtcgattcatgatcggtgatgggcacattgactcatcagcaatctttggtgacagttcacttaacgatccacgtcctcgcaggagactgcggacaaatcctgacaacacaaaccaaattgaagaccttgagcggcaactacaagaggagcgcgaggcaagagaacgagagcgtgaagaaagggagcgtgagaaggagagggagcggcaggagtgggagcaggagaaggagcgtgagtgtgaagagagggcacgagagaaggagcaagatagaaaggagagggagctagagcgcaaggaaagggagttggaaaagatagcgtttgaacagaaatcatcgttctttgaagttgctttaagagctatacaacttaagctgaacattgacttaccttcagcctcaggtcctcctcccttgcctgtcatgttgactaacccagctttgtctgtatcttcggctctgaatggaaacccattctgtgctgaccatggaggggctgctattgtttctggtgcaatttag

SEQ ID NO: 97009 - DNA, 2214 bp, Oryza sativa
  Clone ID: PAT_MRT4530_95051C.1
atgggcaacatcggtggatctggcgtctcgctcaatcgaagactgggaaggagaggtggagtggaggacgcctccggcttcaagcagccgacggacccgcacatgagggatctctaccgcactttccgctgcttctgcacgcgcaaagacatccagtgcaaggacgtgctgctcgacgaccacgacgtggccaagtccatcaccgagttctgcgcggtcgccgccatcgagaagctcgtcgtcggcgccacggcgaggggcgggttcaggttcaaggccgacatcccgaccaccatctccaagggcgcgccggacttctgcacggtgtacgtcatcaacaaggggaaggtgtcgtcggtgcggaactccacccgccaggcgccgcgcgtgtcgccgctccggtcgcagatccagaacatggcggccgccgcggcgaagcccgagccggcgacggcgatggcgcccacgccgcagaagtggtcgtcgtcgtcgaggggccacgaccacctggagacgcccaaggtggacagctacatccgctcgccgttcgcgcgcggcccgatgggcggtgccacgcgcaagtcgtacgccgacctcagccacctctccatgccggactccgccgacatctcgttcgtcagctccggccgccgcagcgtcgagcacaaccccgtcccggcgcgcctgtccgccgcctcggccgaaagctacgaccacagcttcgagacgtcgcgcacgccgtggggcggagactccttcggcggcaacgaccacacctccttctcccagagcagcacctcctccttctgctccatcggcatggacgacgtggagacggagatgaagaggcttcggctggagctgaagcagaccatggacatgtacagcacggcgtgcaaggaggcgctgaacgcgaagcagaaggcgatggagctgcagcggtggaaggcggaggaggagcagaggacgcacgacgcgaggctgacggaggagtcggcgatggcgctgatcgagcgggagaaggccaaggcgaaggccgccatggacgccgcggaggcgtcgcagcggatcgccgagctcgaggtgcagaagcggatcaccgcggagaagaagctcctcaaggaggccgaggaccgcaagaaccgcggcggcggcggcggcggcatgtcgcacgagatccgctaccgccgctacagcatcgaggagatcgagcacgccaccgatcgtttcaacgacgcgcgcaagatcggcgagggcggctacggcccggtgtacaagggccacctcgaccacacggcggtcgccatcaaggtgctccgccccgacgcggcgcaggggaggtcgcagttccagcaagaggtggaggtgctcagctgcatccgccacccgaacatggtgctcctcctcggcgcctgcccggagtacggctgcctcgtgtacgagtacatggcgaacggcagcctcgacgactgcctgttccggcgcggcggcggcggcggcggcggcggcgggccggtgatcccgtggcagcaccggttccgcatcgccgcggagatcgccacgggcctcctgttcctccaccagacgaagccggagccgctggtgcaccgcgacctcaagcccggcaacatcctcctcgaccgcaactacgtcagcaagatcagcgacgtcgggctggcgcggctcgtgccgccgaacgtcgccgacaacgtgacgcagtaccggatgacgtcgacggcggggacgttctgctacatcgacccggagtaccagcagacggggatgctcggcgtcaagtcggacgtgtactcgctgggcgtgatgctgctccagatcatcacggccaagccgccgatggggctcacccaccacgtcggccgcgccatggagcgcggcgcgctcgccgacatgctcgacccggccgtccccgactggcccgtcgaggaggcgcagtgcctcgccgagatggcgctccgctgctgcgagctccgccgcaaggacaggcccgacctcggctccgccgtgctcccggagctcaaccggcttcgcgcgctcggcgaggacaacatgcagttctgcggcgccatcagaggcggcgttggcggcggcttgtacagctcgtccctcctcagcaccccctcgcgctcacaagcagcagtaactggactaacctttcttcctcccctaaattctttcaattcagaggaattttaa

SEQ ID NO: 97010 - DNA, 3713 bp, Oryza sativa
  Clone ID: PAT_MRT4530_95052C.1
tggatccccgggctgcaggatcggcacgaggagagagagagagagaactagtctcgagttttttttttttttttttttttaagggttatgattagcaccacaaatatttaatgcatctacaacgaaatagtggacatggggaaaatatcaaatacatattgttaaggattgttctcttcttctccataacaaaatggaaacactaatttacttactaaacaataataagctgatgcgactgaacattttttgtagtatagttactactgaatactgatgagttaagaatcatcctgatcgtgatgtggatgctccgttgactgtgaagtctggccttataaggggcaacgaaacgagtcagcacgtaccaagtagacgtcgtggaacatggcgcggttgatggtctccaacgaggcgtcgcggaacaccgccgccacgtggtcgccggtgctcgccgtaccctccgccgccgccgccgccgccgccgtcgccgctgccgccgcgtggtccgggaacatgagcggcaggtcgtgcttcaccttggaccagtaggcaagcctctcctcgatcatgtccatctccacgcacttgcgcttcgtaccgccggagacgacggcgacgccagcaacctccttcacgtgcccctcgccggctgtgatagcgtccgccaccacgttggacgacgacggtggcgccggggaaaccctcgccgtcgcggcggcggcggcggcggtgtgcagctgaagcttgtggcgattgagccaggagagcatggtggacagcccggtgcaccggaccaggctggcctccatctcctcgatctccctctcgaggacggcgaggctcgccgcgccggcggcacgcgcgtcctcggaggccttgacgcggcaccacccctcacggagctccatggcggcggcggcgctccccttgtccttgaacctgtcgagcacgacggcgaccatcttgaccgtgtcgacgcggaccagctccgccgcgacgtcgcgggacacgtcggggaccttgtcgcgcctctgcaccacggccatccgctcgtccaggtgcacggtcgtctccttcctcctcgccgcgtccatgtacgtgccgtgcgcggtgagcagctcggtgacgccgccgccgtcggcctcccggtcgacgtcgacgtacacgaggaagttcttgacgtcgccggcgcagagcgcgccggcgtagatgaacccggacctccggtcctcgtcgacgtgggccctgtggtccccgctcctctcgacggccaggagcgacgccctggagtaggcgccgcaggtgaggtcgacctgcgcgtcgacggcgacgacggaggtgacgcggcggacgcacgccgcgaacgcgtcggtgaccctgtcgtgctcgtcgtcgaggacgccgtacacgccggaggtgtggtcggcgacgtggtgcacggccctcgcgtcgtgcgcgccgcggaagccgaaggcgtggacggggtacctggggttgatggcctcgcggaagatggtgcggtcgtcgccgtcggagatgaggacgacggcgccgacgcgttcgcgcttcgcctcccagcaccgcgcctccaggatctcgacggccgcgttcaacgccgggaacagcttggtgccgccggcgacggccagcgactgcaccttccggctcgcgacgccccgtccctcgacggacatctcgagaaggccggtggcgtcgacgacggaggagtggaacggcacgatggcgaggcggtcgtcggcgccgaggtttccaatgacgaggtccatcgccttcctcagcaggtccagcctcctcgccggcgcgccgccgccgccgccgcagctgatgtcgagcagggtgacgaggtcaaccggtgcacggcgcgccgccgtcgccggcacggcgacgcgcaccagcaccgggagacgcgggtggcattcccgacgggggatcgcgtccaccctcgggaaagtgctcagctgtaccttgtcactcgccagagctgacactggagccaagaagacgtcgtggaacatggcgcggtcgatggagtcgcgggaggcatcgcggaagatggtggtcatgtggtcggggcactcgccgtcgtgatgcatcggcggcagctcgcacttcaccttggtccagtacgccagccgctgctcgatcatctccatctccgagctctggtacttgcgcttcctctcgccgccgccgccgccgccgccgtgatgagctccggaccacacgaacttgcccatcgccgccgcccctcccgccgtgaagctctgccgcgctgccgccgccacagccgacgcgccgccgttccccttcgccgccgccgccaccgacgtcgtcgccgacggcgacgacgacgaacgcgcgtgctgcaggtgctgcagggagtggcaggtctgccacgacagcatgtacgacatgccggagctccggcgcagggtggcctccatctccgacatctccgcgtcgagcgcggagacgaagcacgccggggcggcctccttggcgaactccgacttcttcaggaggctccactgcttgtgcagctcgtcggcggcgccggcgagcgccctcccgttgtcgccgtaatttttgatgatctcgccgacgatcctcatcgccgcgacgcggacgatctccgccgccaccaacctcgagtgctcgtcgccgtccctgacgacgacgacctgggcggttcgccgtgccatctctcgcccggcctggttctccgccgcgttctgcgacgtcgtcgtcgaacggtcctcgtactgcacgccgacggtgagcatgctcggcaggtgttcgagctcgtcgtcgccgacgttgtccacgtagacgaggaagctcctcaccgcgccggcctggagggcgccggcctggatggtgccgcgctttccgccaccattgatgtcgtgcttgaacctgccggactcgatggccgtcagcttcgccgccgtcgactccgcgccgctgcaggagacgctgacctccgcgtcgacggcgacgatggaggtgatgttgccgacgctggtgacgaaggcgtcggcgagcccgtcgtggccgtcgttgaggatgccgtaggtgccggccgaggtgttggcgatgcggtgcatggcccttgcgttgtgggcgtcgcggaagccgaaggcgtggacggagcagttgaggttcatggcatcgttgaggacggaggcgtcgtcgccgtcggagatgaggacgatgaaccccggtcttttcttgtcatggtctttccgaccttccaatatcgtcgctgccttcttcaaggccgttgacaacttgttttcgccggtgaccgtcaacgacgactgcaccatcctagtggcctccttccgtccctcagcgttcatctccacgagatcgtgcttctcggcgatggcggcggaggcctggacggggacgacggcgaggcggtcatgctcgccgagcttgtcgatgacgaagcccatggccttcttgaggagatccatccggttcaccggccccagcccgccgcagcagctgacgtcgagcaccgcgacgaggtcaatcggggcgcgctccgatgacgccgccgccggcggtggcgcgacgacgcgcaccagcacggggacgcccggccgctgcttcaccgcatcgacatggacggcgtcgaccttggcgtaggccgtcacttgcacagtgtttgcagcttgagc

SEQ ID NO: 97011 - DNA, 1866 bp, Oryza sativa
  Clone ID: PAT_MRT4530_95053C.1
atgggcaggggcagagggaaacagcggaaggaggccgaggcggcgcgcgaggaggaggagcggcggtgcctcctcgaggcgagccccctgcgcaaggaggccgtggaggcgatgcggctggatcgcgagggccgccacgacgaggcgatcgcgcgcgcggacgagctcgcggccaagcacccggagtccgccgtcgtgctccacctcgccgccggcctccaccagaacgcctccacccgctccgcccgcgacggctccgacggccaggcttcggtgatgcacctcgtctacgcgcgcgacctctacgcgcaggccaagcgtctcgcccccaactgcgtccagatcgccaccggcttcgccatggcgaaggtcgccagcgccaaggactacgagccggatcgcgagatcatgcgtgccctagccatctcctcccccaccgacccggcggagaacaacgtcgcgttcgacctcgaccgcaccctgagcaccaccatggacaggttggcgaaagcgagggaggccgcgctcttccactctcaccatatcatgtcccacatgtccgccaagatcattcccgccgtcgtcgtcgacatgctcgacatctccaagcgcgagggcgcggccacggcgaagaagcaagcgaagaaggcgctcgtcgagcgattcggctactcggcgcgcgcgcacttgacccacgcaaagatcagcttggatttcgcgcgcggcctcgacccaaacattgacaagaagccgtttctgaatagcatcctcgacgcattgaacaatttggttgaagagttcagcaattcgcttgagattgccatgttccgcgcgaagctctggtttgtcatggggaagtattgttctgtggaagtggagtgtgaccgggcaatccgtatggaggagcctactgatcccagggaggaggacgtgcctcctggatctatccccggagagaagcctgaggataggaaatcttatatccgcacagagctcaaacgtttgcttcagaagcttgtcttggtgtgtagagattactggtgctcactggcaagcgagaagcaggacagctttcgattggtgggactcaagtatttgcacctacactttgttactttctatcaagatgaccatgaagctgcaaagaccatatctgatgcactcaactttgtcaagaaaaacaagtcatggaggttctggatttgtccctattgtgttggcaagaagatcccagacattgattcgctcttgcaacacatgcgcagcaagcatcccgaagggggtttctggacgaacctgcggcaagtttttgatccagaatcgatctctgatacatatcagggtgatcatttctcggacaatgcaacaatctgtcaagattcagaggagaattatgtcttacatttcaaaaggatggatgatattttcaagtacttgtttcttcgagcagctgataatattgaagaaaagccattttctcaaatacgagaggaaaaatgcagaaatggagtttttatccttgagaagattaagctaaagctgaataatgtccccacagatatttcaagctctgagttcaatgaggcttgtgctgaaatccgagacctgtggcgttattttcttgaaatctctcttatggattatcgtgtagccatctcaccgctcgcaatgtgtttcatatcggaccagttactaacatgcatgactgaagataaagaggctgccagtaatagtattgatgttgctgctattaatgcagtatttccttttgttgatgtctgtcctgatattgatgcaatatttcctaacgttgatgatgcccctgacggcaatgatgctgatacatcaacatcagaaaccttatag

SEQ ID NO: 97012 - DNA, 351 bp, Oryza sativa
  Clone ID: PAT_MRT4530_95054C.1
atgactgatgcgatgcgaccaggcgtcgttcgccaccaaaccccgtcgccgagcgccgttcgccgccaatcccgccgccgggcgccgccaaccccgccgttcgccaccacctggacgagcgccgccaaccaaccgccggcgggttctaggccatgcgccgagcgccaccagcgacgaccaccgtgcgccgagtgccgctcccagctcaacgcccccaacgccgagcgccgcccgcaacgtcgagtgccgcgccacgaccccaacgccaagcgccaccacaccgctgccgcccccgccgacactgtgcaagatggaggcgatgagcagagctggatttgtgcaaagttgtag

SEQ ID NO: 97013 - DNA, 210 bp, Oryza sativa
  Clone ID: PAT_MRT4530_95055C.1
atggaggaggtggtagacatagacgagcacgacgaggaggcgatcgtctaccgcacgggtgatggtgtccgctcccgcctccgccgcaaggtccgggaggtgcggttcgacgccgtcgaccttgccaccaaggattatgatccgaggcgccgccccctcccttccggagatgaccggggagacacccccggagtgagggggaacgattag

SEQ ID NO: 97014 - DNA, 442 bp, Oryza sativa
  Clone ID: PAT_MRT4530_95056C.1
atcagccgaagaacaagacaaaacaaaaagttcaagatttctgccgtcttctgcccaaggatgattacagttttagttggaggcccacgacgtgcacagcacgctcaatgatcgagagcatcctgtgctcatggggtacaggcattcagcccaacccacaacatatatttttcttttttcttttattcagtagcagcagcttgatgcatacactacattctacaggtacaagtacaagctctcagaaaaaaagaccatagcgcaaggcactgtgttgaaggaatacacggatccatgttcatggcattttgatagtagtaacagcactgggcacattattttctgaagcgactgatgagatgacacgctggtgctcacgttcatagctgtctgtttgtacaacatcagcagaacttgacagcttccagctttctatttctca

SEQ ID NO: 97015 - DNA, 273 bp, Oryza sativa
  Clone ID: PAT_MRT4530_95057C.1
atggagcgggtgaccaatgaggagatgatggcgaggaccacatcagcaacctcccggacgaccagctacgtcttgtcctgcgctggctcgacacccgcacggcggtcgccacgggggcgcttctcttttcttctcctcttcctctcggtgcgagctggcgaccgggccaaggcgacgacggtcggcccagcacggtggcggcctgagggcggccaggcggcgtcgggtggatggggagagaaggttggcgtggcggcgtcccagcgccgatga

SEQ ID NO: 97016 - DNA, 192 bp, Oryza sativa
  unsure (1)..(192): unsure at all n locations
  Clone ID: PAT_MRT4530_95058C.1
cgtttacaatttnttgggaatatgcatgtttaatgttttcaattatntcttacagatttcttgatacnccatgggaaaaaatnttgncgatgccttttccaatcngngtaataaagcaatntgcaaggcagtaaaaaaaaaaaaaaaaaaaaaaaaaaaaaaaaaaaaaaaaaaaaaaaaaaaaaaaaaaaa

SEQ ID NO: 97017 - DNA, 1320 bp, Oryza sativa
  Clone ID: PAT_MRT4530_95059C.1
ccggccggatccttctcacaactcaaacattacagcgaaagcataacaactagaatcccaccacaatgaagatcattttcttctttgctctccttgctattgctgcatgtagcgcctctgcgcagtttgatgctgttactcaagtttacaggcaatatcagctgcagccgcatctcatgctgcagcaacagatgcttagcccatgcggtgagttcgtaaggcagcagtgcagcacagtggcaacccccttcttccaatcacccgtgtttcaactgagaaactgccaaggcatgcagcagcagtgctgccaacagctcaggattgatcgcgcaacagtctcacggccgggacactactactacttctactactcttttattatcgcctccctgctcgccctcctcccactctctcgccgccgccgccacttctagaagcttccatcgccaccaccgcagcgccccgcgccgccatggccgccgaagccaaggccccgtcgctcgccgaggaatactcacttcctccacaggaagccccagttgaaaaggcagttgaggataagccccaggaggctgaaagtatctctgtaacgaatgatgaaacccctcaagctgatgagactgcaacagctgtggaagtgaaccctgaaacttctgaagtgcaagaagttgctgacaagtcagaagttgaagacaccaaccctgcagcagaggaaacgaatgagactgctgaggaagaggctgaggagaaaccagagattaagatcgaaacggctccagcagatttccgtttcccaacaacaaatcaaacaaggcactgtttcacacgctatgttgagtatcacaggtgcgtagctgcgaaaggggaggatgctcctgagtgtgataagtttgcaaaatactatcgatctctttgcccaggcgaatgggttgagcgttggaatgagcaacgggaaaacggcaccttccctggacctctgtaagcatgtgcaaaggggagaacatacgttgttgtccgggctctcttcgttggtaactggcgtcatgttatcagaatcggagggatcgtccttttttttggagagatttacaaataagagatttctttttttatttgaagaatgacatctgttgactctacctaaacgatcatcctctgcactgctgagaaactcacattacagctatgatcttcctcccttgactgatcttccataactgttttctcaggataatgtggttgctcgcttgggaaaatgtgttgacataaatcttaagttctttaaaaaaaaaaaaaaaaaaaaaaaaaaaaaaaaaaaaa

SEQ ID NO: 97018 - DNA, 1655 bp, Oryza sativa
  Clone ID: PAT_MRT4530_9505C.1
acccaaacactcctttaccccaatctcgtgagccggcccggaccacatcgcaatccaaaccttcgtcttcgtcttcctctcgccgctgattcgattcgatccgatccgatccaaggggaggggaagcaatggcgacgaagaggagcgtggggacgctgggggaggcggatctgagggggaagaaggtgttcgtgcgggccgacctcaacgtgccgctcgacgacgcccagaagatcaccgacgacacccgcatccgcgcgtccgtgcccactgtcaagttcctcctcgagaagggcgccaaggtcatcctcgccagccatctgggccgtccgaagggtgtcacccccaagtacagcttgaagcctcttgttccacgcttgtctgagctacttggagtcgatgttgtgatggccaatgattgcattggtgaggaagttgagaaattggctgctgctttgccggaaggtggtgttctactcctagagaatgttagattctacaaggaggaagaaaagaatgatcctgagtttgccaagaagcttgcagctgtcgctgacctctatgtaaatgatgcttttggcactgcacacagagctcatgcttcaactgagggagtgaccaaatttttgaagcctgctgttgctggcttcctgatgcagaaggaacttgactatcttgttggagctgttgcaaacccaaagaagccatttgcggccatcgttggtggatccaaggtctcaactaagattggggtgattgagtctctgttggcaaaggttgatgtcctcatccttggtggtggtatgatcttcacattctacaaagcccagggatatgctgttggaaaatctcttgtggaggaagacaaacttgagcttgcaacttcacttattgagaaggcgaaggcgaagggtgtttctctcttacttcctaccgatgttgtagtggctgacaagtttgccgcagatgctgaaagcaagactgttgctgcctccgctatccccgatggttggatgggtcttgatgttggcccagatgccatcaagacttccagcgaagcattggacacctgcaacactatcatttggaacggacctatgggagtctttgagtttgagaagtttgcagcaggcactgatgcaattgccaagaagttggctgatcttactaccacaaagggcgccacgaccatcatcggtggtggtgactccgttgctgcggtcgagaaggctgggctggccgacaagatgagccacatctccaccggcggtggtgctagcttggagttgctggaaggcaagaccctcccaggtgttcttgcccttgatgaagcgtaagctaattcggcttgtctccatcagcagtctgcacttttgtttcagacctctcggtgtaactttgcaatgtcaatgcttgtatgaagaacttgagataggcttatcgtcaagttttgctagatgagtcgtgaataagcttttcgacttcctcgctgccgcgagtgaagtggttcgaactgacatacatactctcatggatcgatattttgatatgcggttatcacatccctatgatggcatcatctgttgataaaaaaaaaaaaaaaaaaaaaaaaaaaaaaaaaaaaaaaaaaaaaaaaatccactaaaaaaggaggg

SEQ ID NO: 97019 - DNA, 249 bp, Oryza sativa
  Clone ID: PAT_MRT4530_95060C.1
ttaatgcgccatcggctcagccgacggcaccattaccagctcctgcatctgctgcaccaccttcggctccaggaaccagatggcacggtgatacctcaggttatttccgagcatttggtgcgcaacatccagccggatctcaagttcaataccagcaggcagaatcggctcaaccccagtttgttccttagtacaaccaatttgagcccatgccacagcagcctcaaggaacgcctcaacaacaaccat

SEQ ID NO: 97020 - DNA, 166 bp, Oryza sativa
  Clone ID: PAT_MRT4530_95061C.1
tcatatcacaatgctatggcttcacgttgcagcctattcgcaatctatccacccccaacgcactccatccaccactgggagacggtagtatgacccaagatggcgcggacgctcacggggacgaccttgagggtgcgcgagctcgccggcgaagacggcggactga

SEQ ID NO: 97021 - DNA, 426 bp, Oryza sativa
  Clone ID: PAT_MRT4530_95062C.1
atggagaaacagcgagcgggcgagagtggcaaaaaaatgagaaagaaagaggaaatcgagagcacggccgacgatccgaagactggagaggaggagatgagacaaggtcacggatccggcgaggcggcgaccctcgatggtagatccggcgaggcgttcatcagagacggcgacgagatggaggcgtggtcgcgtggaggtggaggcgtggatcgacggaggcagaagcggaggcggagcgcggcctttatatatgaggtgcgagtgcgcggcagcggctcccgatgggcctcgtcgggccgtgcctaccgttatataggcctgggccgtgctagcccggtcgtgccgtgccggcccagcgtgctgctgcgggagcccaggcatggcccggctgtcgggccaggccggcatgggtacgaacactga

SEQ ID NO: 97022 - DNA, 365 bp, Oryza sativa
  Clone ID: PAT_MRT4530_95063C.1
cggacgcgtgggcggacgcgtgggaaaaaaaaaaaaaaaaaaaaaaaaaaaaaaaaaaaaaaaaaatacaagctacgggtcattttgtaacagaccgactgaatgacatgaagcctcgtggtcttcctgatggatcactgaagcgtgcgcccaagaggaaggcggttatttttcatatacggcgatcgaaagaactttgacggtccgcagtttaacaacgttgaacctgggaaaactttggctttccgaaacttaatcgctttggaccctaccgacttttctacatatggtgtactaacgaagaatcccgaatgggtcgccctttcaaacattacatcaacctgaatgggaaaggtgactccccc

SEQ ID NO: 97023 - DNA, 1497 bp, Oryza sativa
  Clone ID: PAT_MRT4530_95064C.1
atgatggtcgaggtcctggaggaggaggcggtggtgtacacccctactccgcctgggagtgaggatgctagcgagagccgcggccctcgtcaccgccgccgcaactctccaactcctccccgccgcgatccctcgcggagggaggaccccacccagtcgggtggttcggccctctccccgcccccgggcggagggaggccacgacgcgtcagggcacggcgccgcctcacttacggtgacggcggctcgcctcgaggcgcacttcaggcagcgggtgcccttctggggcatccccccgtgaactcggagccggagacccctgtccagcgctggttggacgacgtggccaacttggtcaccactgcccaacgggagctggccgcgggcagccgacccgtcgtcaccggtacgtcgcgtacccccattaccctctcctcgtcagcgaggaagagggcctgtcgatcggccacggcctcaaggcggtccacggctccaacatcgtcggaggcctcgggaagccggaggcgtcacgatggcctctacggggagcaggacgctcgaatcaacatcgagcgacgccgggacgagcgtcgagctgctcgcatgggggaaggcgcctcctcatctggagtgctgcgttcctcctcacgaggcggccctcctcccacgctcacccctagagggactagttgtagggccttcgtggcgagtctccggaatgtttggtggcccccgaagtttcgccccaacctcacggagaagtatgatggcagcatcaatccctccgagttcctccagatctacaccacgattatcgtggcagtagggggcgacgaccgggtcatggcgaattacttccccatggccctcaagggtcaggcgcggctggctgatgacctagccccccgactccatcaactcctgggttgtcccccggatggtcattcggagggcggccaccacaagtcttcacccattaatgagggaatgacaggattgtcccccgtgtcaggcgagggacggcgctgggccctgctcaaggacaagctgtggtttagcttccaggcgaaggcacgggtcgagttccggtcaagggacgggcggcggcgcgctggggcggacgggcagtcggcttgcgggggcgatgggtggcggcgtgctagggcggacgggcggtcggagcgcgggggccgacggtgggcaacgggcgatggcgtgctgaggcggacgggctggcgacgcgcggggagggcgcagcggacaacaggcggtgccaaggagggcgttggaggcgacgggctacggcgacaagtccatcatcccctcgagctccgcagctatggcgacgaggcgatgagtcctcggctcaggccggcaccgtcgaggtcatccttccaggcagaggtggcagtgctgctaagacgacatgaggtagcccttgtcgtcatcgtccttttggatctcaaagtctgggaggaaggaggagagaggggatag

SEQ ID NO: 97024 - DNA, 547 bp, Oryza sativa
  Clone ID: PAT_MRT4530_95065C.1
gtgtggggtgttttttttttttttttttttttttttttttttttttttttttttttttttaaaaaaaaacttctccattttatgccccgctcattaatccttggtcatggaaacagcatggattaaaaaaacattcaacaagggggcccccacaggagggggggtgggaacaaggcaccagggcattcttattttgttaaaaaaaggaaaaaagggtcttaaaaacccagggggcatacctcacaggggacaaaaagaatttccataaaaatccccttaaggctcttcctcctcttcctcaaaagcataatgccccccaaacaacctgttaaaaaaggcctggttccatcctaaacgccaagctgagcttgagggcaaaaatcttgggggaaaggtgccccacttaaaggggggggggggaccataatcccctgaggacccaccatggcacaccccaaatctggaagtatctggataggacttgaggaccacaccgttcttggaaggatctactcctaattcccgggggaggggaaaccccactatt

SEQ ID NO: 97025 - DNA, 890 bp, Oryza sativa
  Clone ID: PAT_MRT4530_95066C.1
cgaattcgagctcggtacccccttgagggccatggggaaataattcgccatgacccggtcatcgccccttgccgctacgatgatcgtggtgtagatctggaggaactcggagggattgatgctgccatcatacttctccgtaaggttggggcgaaacttcgggggccaccggacgttccgcagactcgccacgaaggccctacaacccgtccctccaggggtgagcgtggggggagggccgcctcgtgaggaggaacgtggcactccagatgaggaggcgccttcccccatgcgggcagctcagcgctcgtcccggcgtcgctcgatatggattcgagcatcctgctccctgtagagaccgtcgtgatgcctccggcttcccgaggcccccgacgatgttggagccgtggaccgcctcgagaccatggccgaccaacaggccctcctccttgctgacgaggagagggtaatgggggtatgcaacgtaccggtgacggcgggtcggccgcccgcggccaactgccgctgggcagtggtgaccaagttggccacgtcgtccaaccagcgctggacaggggtctctggctccgagttcacggggggatgccgcagaagggcacccgccgcctaaagcgcgcctcggggcgagccgccgtcaccgtaaggaggcggcgccgtgccccgatgcgtcgtggcctcccttcacctgggggcggggagagggccaaaccacccgaacgggtggggtcctccctccgcgagggttcacggcgggggggagttggagagttgcggcggcggtgacgagggccgcagctctcgctagcatcctcactcccagacggagtgggggtgaataccacctcctcctcctccaggacctcgaccat

SEQ ID NO: 97026 - DNA, 1251 bp, Oryza sativa
  Clone ID: PAT_MRT4530_95067C.1
aggcttggactcaggtttcagggtagaattaatggtgatgtgaaaaggcgcaaatcaccacttattttggccctcgtgaagcgtcttctttaacgttagatgaaagccaaataagtgatattccacaggtctctcaattagaaaataaagctttagtacaagttttttctgaggaggaaatttaagatgcgatttttcaaatggaacataataaagctcgggtccggatggattctcagctgagttttatcagattttctgaaatgttcttaagcccgatttggttgatttatttgatgattttcatagtggtaatttacctctttactctcttaagtttggtactattattttactacccaagtgcaatgaggctttgaaaattcaacaatatatgtctatttgtttacttaatattagttttaaaatttttactaaagttgctacaaatagaatttccggagtggctcagaaggttattagtcccacacagacaacttttatacctgagaggaatattatggagggtgttgttattcttcatgaaatgatacatgaattgcactgataaaaaagagtggtgtactttttaagattgattttgataaagtttatgataaagtaaaatggtcttttgttcaacaaactttgagaatgaagggtttatcacaaaaaatagtgtgattggattgcgtcttttatcaaggtggacatgttggcattaaagtcaatgaccaagtgggatcaaattttcaaacatacaagggtttaaggcaaggggacccgttatctccaattcttttttatatagttgttgatatgttagctatattaataaagagagcaaaagatgatggtcaaatttctagagtggtccaacatctgattgatgatggtttatctatgttacaatatgccgatgatactatcatttttttagagcatgatttatagaaagctaaaaatatgaaattgattttaactgcttttgaaaagttatctggcctgaagataaatttccacaagaaaagctttgtaataaagattggttagcaattgagcaaagaattgagaaaaaacttagtagttcgaagggttctttccagggcaacacagtggctccgggaatgggctcaactacaacggcatgatgatcatatcaagctaataaaagatgtgtgtcgtaaacttgagtcgacgatcatgctgctctttgccaacttcgggtggagattcaccaatagaattcag

SEQ ID NO: 97027 - DNA, 377 bp, Oryza sativa
  Clone ID: PAT_MRT4530_95068C.1
cgcattccgggtcgacccagcttccggagccagccaacttcaaaaagaaaagttttttctttctttttttgggcaagttgaatcatggatgggaacacgcatgacagcgccatttcattgcattatacaaaccgaaacgctgcaatcatgtatggactctgcctgcacaggcccagctgggcaccattcctctgcttcttgcataccaaactcttctcttatcttcagagttcatcactgaattaaaatactctgttgatagtgctaaccattttctcctgtgaccaaataattgtttctgaatttcttctgcttgctaactgcccagggactagtaagggcctgtttggttcgtgaaataaaaaattttggatgtc

SEQ ID NO: 97028 - DNA, 681 bp, Oryza sativa
  unsure (1)..(681): unsure at all n locations
  Clone ID: PAT_MRT4530_9506C.1
gttcatgtcaatctggggacaacttcattgaatcgactctttcagaataaatacagtactatgatattatcgtttggacaccacatcaaattgccggtttctgagcaacaactatataggtcacacggtgtaactaacatggattattaattagccggtttatcctgtctgatcatgggcagcgcaacatactggggatgatgtccaacccaacataattcagaaagaattacatgtaaatacgctcctcgatgtgccaaattggatctctggcgaatgttacttatgattgagaagctgtgtctttatttttttttctttttgattcggataagctgtgaaattactggtatagtattgctgcaaacttgggtgattagtaaaggctagcatgcgtggaagggcctcaaatcagcatttcccatggcttctgctcactgatgcccttccggcgagcttgtggttaggagttacatgatcatccatatataacgaggctgcggaatcagatcgcatagcatgattntgagcttgaccaagagattggaatgtgtcaagtgcatcaactgttaattgccagccagaaagtggggaactacttgagcttgattcagtgttgctacagcaagctgctggcacagttccatttacccatgggcagtaactgttgtgatgcttaac

SEQ ID NO: 97029 - DNA, 1062 bp, Oryza sativa
  unsure (1)..(1062): unsure at all n locations
  Clone ID: PAT_MRT4530_95070C.1
gcaaaacattattttattattagcacacgtactgcgtgcagtgcacaggcttatagaaccgcacttcacacaagttggtcgtcggcacaaacatgacgaaagcatagaacataacacaatacatacagacaggtacatactaattccaaatatacgttcatgttataacaggagacaggcagccgtccagacgactggatgaaatacgtttctacaataatctttgtgttgcgactcctgtccagttcagactatttttgagaccaggnacttttgtaattttgaacagcatggaaaacagatttactcggatttccaagacgacaagggaggggtctcagagtcctgccaagtagtgttagccatcatcagaggataccggtcgccatggacattgctagcataagactcgagttcagccatttctgcaggggtgagtttcacagatagtgctgcaacattttggttgaaattctcgatttttgttgtcccgggtatggggcacacatcacgcccctgatgatggatccaggccaatgcgagttgtgacggtgtgcatccttttctggctgccatttcgttaacacgctcaaatatttcagcattcttctcgatattacctggttgaaatctagggataagcttgcgaaaatcatggtctggtagagaatccactagtttagctccactagaaaaaaaccctttaccaagtggactgtaagctactattccaattccaagttctgccgggtcgccgcggatccccggcttgccgccggcgaagaacttgccgaacttggtggccagctcaaccctgtcgcgcacgccgccgccctgcagcgccttgccgaggaggacctcgttggtgtgggggccgtagaggtcggaggtgtcgaagaacgtgacgccggcggcgatggcgtggcggatgagcgccaccatgtcggcctccggcttgggcggctcgaaggccgggcacatgcccatgcagccgagcccctgcgccgagacctccatcccctgagagcccagcttcacccgcggcaccgccaccgtcgccat

SEQ ID NO: 97030 - DNA, 404 bp, Oryza sativa
  Clone ID: PAT_MRT4530_95071C.1
cggacgcgtgggctccactccagtgtaccgctcgaccgggcgaggtccatggagcagcgtcacgccagccacggcggcggcgagcccgcgagcgcccagcagaagcagaggcagcgatcttgcgacgacagccaactgcctgcttcttccctcaacccgacggcggcgaggctgctccgggaggccatcgtgtccgcgccggcgggcggcggcgagaagacggccgccgagggctcgtcggacatcctggccttcgctcgcgccgtcgaccgggtggactccccactcgagtgaccccttactctgcttctttcttcttattttttttcctctctcttctcttcagcgtgtttgtacctgtaccgtgaagaatccgaaataaaaatgctctcgacgactcgttt

SEQ ID NO: 97031 - DNA, 2373 bp, Oryza sativa
  Clone ID: PAT_MRT4530_95072C.1
atggccaccacctctccctgcgccgcgccatccccatcgctacgatgccctctcgcgctctcccaccccttcgcctctcctcctcctcctcccgccctccgtctcgccggcccgaagcttctccccggccgcctcgccgtgtccccgcctcctggaatcccagcggtagcgtcagcgctggagtccctaatcctggatttggacgacgacgaggaggatgaggacgaggagaccgagtttgggctgttccagggagaggcgtgggcggcggccgacgagagggaagcggtgaggtcgccggagctggtggtgcccgagctggaggagctgcccgagcagtggcgccgctccaggatcgcctggctctgcaaggagctccccgcctacaagcactccaccttcacccgcatcctcaacgcccagcgcaagtggatcacccaggacgacgccacctacgtcgccgtccattgcctccgcatccgcaacaacgacgctgccttccgggtgtatagctggatggtacggcagcactggttccgcttcaactttgcactagccaccagggtggcagattgccttgggagggatgggaaggttgagaaatgccgggaggtgtttgaggcgatggtcaagcagggccgtgtgcctgcagagtctaccttccacatactgattgttgcttacctcagtgtacctaaagggcgttgccttgaggaggcatgcactatctacaaccagatgatacagatgggtggttacaagcctcgccttagccttcataactccttgttccgtgcgcttgttagtaagacagggggaactgcaaagtacaatctcaagcaggctgagtttgtgtaccataatgtggtcaccaccaatcttgatgtgcacaaggatgtctacgctgggctcatctggcttcacagctaccaggatgtcattgatagagaaaggatcatagctcttaggaaggagatgaagcaagcaggctttgatgagggtattgatgtgctggtgtcagtgatgagggccttttccaaggaagggaatgttgcagaaacagaggccacgtggcacaatattcttcagagtggttctgacctccctgttcaggcctatgtctgccgaatggaggcttatgcccggactggtgagcctatgaaatctctcgatatgttcaaggaaatgaaggataaaaatatacctcctaatgttgcatcatatcataaaataattgagataatgacaaaagctctggaagtagatatcgtggaacaacttatgaatgaatttattgagagtgatatgaagcatttgatgccagccttccttgacttgatgtacatgtacatggatctggatatgcatgaaaagttagaattaacattcttaaaatgcatagccaggtgccgtccaaacagaatattgtacaccatttatctggaatcactagtaaaggttggaaatatcgagaaggctgaggaggtatttggtgaaatgcacaataatgggatgataggtactaacacgaagtcgtgcaacattatgctaagaggttatctttctgcagaagactatcagaaagccgaaaaggtttatgatatgatgagtaaaaagaaatatgatgtacaggcagactctttggaaaagctccaaagtggtctccttctcaacaagaaagttattaaaccaaaaactgtgagcatgaagctggatcaagagcagcgtgaaattttaattggtttgcttctgggaggcactcgaatggaatcttatgcacagcgaggggtccatattgtgcactttcagttccaggaagattccaatgctcattcagttttaagggtgcacattcatgagcgtttctttgaatggttgtcttcagcaagcagatcattcgatgatgggagcaagataccctatcagttttcaacaatacctcaccagcatttcagtttctttgttgaccagttctttctgaaaggtcagcctgtgctcccaaagcttatccataggtggttaactccacgtgttctagcatattggttcatgtttggaggctccaaactcccatcaggtgatattgttcttaagctcagtggtgggaatagcgagggtgttgagagaattgtgaactccctgcacacacagtcgttaacaagtaaagtgaagaggaaggggagattcttttggataggttttcagggtagcaatgctgaatctttttggagaattatagagcctcatgttttgaacaattttgcgagtttagtaacacaggaaggtagcagcataggctctgatggtacccaagataccgacactgattctgacgatgatatgcaaatgtccgatacagaaagagacgagtga

SEQ ID NO: 97032 - DNA, 2516 bp, Oryza sativa
  unsure (1)..(2516): unsure at all n locations
  Clone ID: PAT_MRT4530_95073C.1
atgcggtccaccgccgccgccgccgatgtgatcgatctctccagcgacgacgacgacgaggtgcccgtccccagcaccagcgccgccgcagccgcagccgcgcgccgcgtcgcgccctccacgtcccctcgcgacgtcacgccgtacgcgctcgtcgatgtgaagcccgcgctgctgtacccgctccagccaccgggcgtcgtcgtcggtggcagcggcgcgctcgtgcccgtgaaggaggagctcccggtgctgacgccggtgcccctgctggccgcgggctattccccgtccaccccctccaccaaggtcgccctcccggcgccgcgcctctgccgccagttctggaagtcgggcgactacgtcgtcgcccagcgcaaccccgacgccgatgcacccggtgggcggaaccgacttcggattaatcccaggttcctgcactcgaatgctacttcccacaagtgggcttttggtgccattgccgagcttcttgataatgcaattgacgaggttaacactggggcaacatttgttcgtgttaatgaatttacaaacccacgagatgggagttcctcattgttaattcaagatggtgaagggttaaagaatagcacaatacggctaggagcaaatgtgattgtttttacacaaaaccaaaataactgggtgccaacaagaagtatcggtcttctttcatacacatttttgatggaaactggctgcgatgatgttttggttccaacagttgattatcagtatgatatatcaacagcttcgtatactcagatgctgcgtcatgatcagaagctcttctcttcaaatttagcgatcctcttgaaatggtccccttttgctagtgaagctgagttgctcaaacaatttgatgatatcggagagcatggaacaaaaataattgtattcaacctctggttcaatgatgatggggatatggagcttgatttcaactccgataagaaggatatcctcattactggggcacacaggaaggcatacacatctgtcttgtaccttcacattcctgataatttcagaatagtcttgcgtggacatgatgtggaatcacataatgtaataaatgatttgatgtatcctgaatgcgtgttgtataaaccacaaattgctgggcttgcagagctatctgcaataaccaccattggatttgtcaaaggcgccccagaaattgatgtacaaggctttaatgtgtaccacaagaatcgtttaatagcgccattttggaaagttgcgaacaactcatatggcaaagggcgaggagttgtgggcattctggaggcaaacttcatcaaacctacccatgacaagcaagattttgaaaagtcggtcctttatcaaaggctggagagccgcttgaaagaaatgacatatgaatactgggacctgcattgccatcgtattggttatgacaacaaaaaattacctaaatcttcccgtgcacttaatcgtgctaatcagatgaatgctggcagttccccgccaattgttccacgtcagctattggctgctgatattccgacaagcagctgtgctgtccctacatttatggcccctgcattaaggcaaaaacagatgggattgaagagaaatattgatgcccttggatccaagacagacagtgctgaccaagatggatctcacttggacgtttctcaacggagacggtttaacgaatacaggactttgacactagagaatgataagttgcgtggcgaatgcttgcaatacgaggagtcagcaaaacaacttgctctgaaggaacaaaagctccgatctcaaattgctttggaaagaaagaaatatgaggaattattacaagagctcaggtcgttggatgtgaagacagagaaatagcaaactgtttctgcttttgtccgccatgatgcttctcagcttgcttcttgcctgactgttcatgtgaggattacaattaacttgctgttggagttctgccagtcgtgattatggaagaattggacccttggacaactgaggtcgtcagcttaactttcatttggtagagatgtacaattttggtttggagttgagcgtgtacaactgttgtaacattatctgtatgtacccccgtgatatcatgaccttgacctgctgattcacatttttttacagttaatacacatctgttacttaaaaaaaaaaaaaaaaaaatgttagattttgatctgctagttgcatcttagtgtttcgagcaaactattacatttatattgttatgcngtagatcagttgcccgacctttgtngtgccaaagtttgtggagtggcacgtcattattctttccataaatcagngggtatcaatgtagatgcactgcattgtaatttcagatatagccgaaagtatccatcctttttatagcctttgtattctgtaattttgttggtgctgtgattaattggtaatctgcttttacangnttcaaaaaaaaaaaaaaaaaaaaaaaaaaaaaaaaaaaaaaaaaa

SEQ ID NO: 97033 - DNA, 626 bp, Oryza sativa
  Clone ID: PAT_MRT4530_95074C.1
gtaccgtcctaattcccggtgcaccacgcgtccgtaaaatttgaacacctttaatatacaaattactaacaccgttcagcacctaaatcggcagtagcatcatatgcgccggctcatcattctccacttcaatacgctcactacctgtactaaccatctatctgcttctaccacgaatatgcacgttcatcccttcttttttacgtccctccttcttcactttcctctactttccctatccccatttcatctattacattcttcctcttcttttcctctctcctttatactgtttcaaattctacgtatttcttttaatatatatttttactatctttcccatacagtatttttaacttacctcatcattatttcttttccctttttctccttccataatcttttcttcattctaaaatacttttttttcatttttcttctctttcaccttctctcttttttccctctttttcctttttcactcctttttccctcttttctttcttactttctcctcccacacctcttctttttcctccctatcatcactttttctctctccaccctttttaccctttacctctcttctctctctttctcttcctcctctttctttttccctcttt

SEQ ID NO: 97034 - DNA, 754 bp, Oryza sativa
  Clone ID: PAT_MRT4530_95075C.1
aagtaaaaataacgagaacaagaacataaagaaaagacgaaaaaaaagagcagagagaagaaagtaaaaataaagaaaatgagaaaaagaaaaagagcacggacaaccagagagaaaaacaacaataaaagaaagagacaaagagaatgtcaaaaaatcggagggaaacaggcaacatacaaacaacgactggagtagaggaacggcaaaatgagagacgtaacgggaagtatataaaatagaataaaagaaaagaagaaaaaggataagaagataaaggatgatagaataaatagagaacagagaaagaaaaagaaaaagagaaaaagaaataaaggaaaacaaggggtcaaaaagaaacagaagaaggatgaaagaaaaaggagaacacaaagagacaaaaatagaaaataaataaaagagaactaagaagaaaaccagataaacaaggacaagagaggaaaagaaaaaaaaaaagaacaaaagaagaagaagaaaaaataaaacaagaaagagcagagaaaaaaacgaagcaaagaaaaaaaagagaagaaaaagagaaaaaaaaatgaaaaaagaaagaaaagaaagaaaaagaaagaaaaagaaaagaagaaaagaaagaaagaaaaaagaaaaaaaaagaagaaagagagaagagagaaaaaagaaaaaagagaaaaaaaagaaaaaaaaaaaaaaaaaaaaaagggggtgggggtacgtgtccatgcgcgcgggacgagagaccgac

SEQ ID NO: 97035 - DNA, 534 bp, Oryza sativa
  Clone ID: PAT_MRT4530_95076C.1
atggtgcaggggaacccgtgcccggcctcccactaccgcggcggcctcgacgtcttccgcaagatcgtggccgccgacggcctgtaccgcggcttcggcatgtccatcctaacctacgccccctccaatgtcgtgtgctcttctacactctcccccgatgtcggcggctgcgccaggtccaccctcagggcttcccctaccttgtcattctccacccagcgccaggaggtcggttcggcggtggtggtggcgaagaaggctgcactacttgcagtttgcagccatctcccggctagagcgggcctggaagacgacggtgggctcgccgaggtcgtcgtcctgaagctccccatccacgtgtcatcgtcgtcgatcgtcgccgtctgtggcgtacgtcgagcagggtcgcgggtgcgacgtgatggggcgaaaccagacgctgtggtggggacgacggggatggcaggagccgaggaggagctgtgctcgccggcggagaccaaggaggagctgcgtgccggcggatgcggatga

SEQ ID NO: 97036 - DNA, 471 bp, Oryza sativa
  Clone ID: PAT_MRT4530_95077C.1
tcccacacattcgctcacatttaagctgagcactgcttgcttgggaagaggaggaggagcttgcagtagcagagagacccaatgtcgggtcacgctcttctctctggcaggcatgctctggccaggccataacattttttatagagggggtgtacttcctccacaaaagcacagcttgatggtcagggcatacggcactcccactgtcaagcatggctctggcaagcacctggagtcgtgatccgaacagtccctggagtacctgttatggacacctgcgcggcacactcgcgatcgggacaagttgggctagaaccggcagctgtagccgtcgactccctgtgggcaacgctgcgtccgcttgcgctgagtgttccacggagcttctcgcccgaagcggcgtcaagttcggtgaggcggtatgggttaagggggggttgtagatcttcaaggagggcgggctggagtacc

SEQ ID NO: 97037 - DNA, 375 bp, Oryza sativa
  Clone ID: PAT_MRT4530_95079C.1
atgtcagtggctcaaggggagagaggggcgccggcaagtggggcccccgggtcagcggccgaaggctgccggtccaccgtggaccgggaccacgcgggtggtccaccgccggtccacgggaccgacggcccagatcgccccggggctgatcggacgggcggtggcgacccggctcagctcggctcaaggccggccgaccggccgcggcgatggcgacggcgcggtgcggcggcgagtctagcggcggctagcggctgccggagtagcgggagcggcggcggcgggtggttgcacggcgcgggagcgatggggagcacgagggagttcggtgaaatggggaaaaagagagagggggcgacggcggagcttaaatag

SEQ ID NO: 97038 - DNA, 4881 bp, Oryza sativa
  Clone ID: PAT_MRT4530_9507C.1
atgcgggaggaggtgaggagctcgtcgggggcggcggccgagccgcctcctacgccggttgcaaggtacgatcgcgggggggcgctcatttttggcggtagattcgcaggggtcgcggtgggcgtggtcggtgaatcgggctctcggtgcttggatcgattgtgtcgtggttgggttctcgaggtgttcgttggatttgttactggggcggcgattgctcgaagggattttggtcttgtgtacggcgagcgtagtgaggcggtgagtgtagatgtttggttaaaccctagggcgggagcgagctactggcctgcatccatcacggttttgctctcgggcgagatatatatccctctaggtggaaaccgggcgatatttggaccctcgtcacctgctatgcaagctaatgttgccagcatagattggtcgggtagcagacaagcttccagagttgattcctcatcacatgttgctccgcatgcccatcagccttctcatagtttcgatgccactggaactgctttggattctgcaccgtcatgtaggccatgggaacgcggagacttacttcgtcgactggcaacatataagcctacaacttgggcttctaggcctaaggctgctagttctttggcttgtgctcggagaggttgggttaacgttgacatggacaaaattgaatgcgagtcatgtggtgcacatctcatattcagtacattgacatcctggtctccagctgaagtttcaaatgctggagaagcctttgccgagcagcttgatgcatcacaccataatagctgtccctggagaggcaatagctgtgctgacagcttggtgcagctccacctaacacaatcagcccttattgggggttttaaagatcgatgtgatggacttctgcagtttacttcccttccagtgattgcttcatcagcaattgagcacatgaggctgaccaggagttcccagattgaccgcttattatcccaatcaattacctttttatctggagagcttagttacaaagcagagagcacaacaggaattgatatccagcaagattcctcttgtagctactcaaaagctaggaagcttataagcctttgtggatgggagcctaggtggcttccaaatgttcaagactgtgaagaaaattcaacccactcagctaaaaatgcagattcggtggaaccattttttccccgttttgctgaacatcaaaaaaattcattctctgggtcagccaaaaaagataaaggaaaaggcaaaaggccactcaaagactctggatgtagcatgagatcacctttgttagattgtagcttttgtggctctacagtcaagatctgggactttagatctgtgtcacgtccttgtcgttttagtccaaataacattgatgcacctgaaacaggcaagaagcttgctctgacacgtggaattagcgctgccagtgggatcaatgaatgggttactgatgggatggaaagagatcctgctgaagggcgtgatgaagaagcaacaaatgagggtaaatcattatcaaatgctggagtggacctgaatctaacaatggctggaggattaccatcaattcaatcttctataccaattgcatctgagcgtttcaacggaggattgggaagagatctgatgattggacaacctactggaagtgaagttggtgatcatgcaacttcatacgagtcccgaggtccaagctcaaggaagcgcaaccatgaggaaggtgggagcacagttgacaagccacaggacaggcttcagcatgctgatagcatagaaggaagtgtgatagatcgtgatggtgaggaagttgatgatgctgcgcaagattcggacatcccgaataaaaggtcacgtgggtttgatctatttggttcctatcttccatcttcttctggagctggtcccagtagaaacttttgctttgatcctgatgcggatgctggtaaattcagtcatgctagagctgcaggtctagccgctgttgacagagattctatgagggaatcttctgtagctgcaatggatactgttcatagtgctgatgaagactccatggagagcgttgaatactatccaggtgatggtaatgatattgacatgccctcatctagtgcacacagaaatattgaaatggatgatgtcttgggcctgaactatagtaaccaagcacagcaaagtgcatgtgtacagcctgcttctggaagtgatggaagggaaataggaggaagcagtacaaatgaaggggaggaagtccttgatgcagtaacagcccctgcttttgcaagggatcaacttagtgtaggaattagcggtggtagtgttggcatgggtgctagccatgaagctgaaattcatggaattgatgtttctttgcaaagggctgaaagtgttgtaggtgatgcagaacctaatactgagctaacagagacgatgggtcatactggtgaatcagttcctggacctggactaatggatgagtttgtacctgacgaagttgatcggcaagaacctcatggagatagccaagatatggtgtctcagtcagtcggccaagctgacagtggctcaaaaatttatggttccactaaagctgattctgttgagagtggagaaaagataggagggcatgctgttggtcatgcaagcaggatgcatccttctctttcttgcaatgcagggatgcagaccggtttggatgtatctaaagaggaagtgacacaggctggcaaactattgatcgctggtgatgtgccaatggggttagattatgaccctcagaatggattaggttctattcttctcaatcttgttatttgtttctcaggagcaacaaatggagaaaatgattttgaatcaggacttccagaatttgatcctgttaagcatcacaacagttactgcccatgggtaaatggaactgtggcagcagcttgctgtagcaacactgaatcaagctcaagtagttcaccactttctggctggcaattaacagttgatgcacttgacacattccaatctcttggtcaagctcaaaatcatgctatgcgatctgattccgcagcctcgttatatatggatgatcatgtaactcctaaccacaagctcgccagaagggcatcagattattactgcaaacaggctcggttcctggcttgtgggcctgagggcctctgcttccatgcattgtgtgatcttttcctcttgcccgaatccgaccatccaatgagcgccgcccagacgtccggggaagacgacgacgaggtcgcccgcgcagcaatgccgctctgcagcttctacgcctccacctccctccccgtcgccaagccccactccctcccctcctcctcctcctccaagccctacaccgccacgccggcgccggcgccgacggcggcgtcggcgtcggcgtcggcggcggcgctgtcgctgcacctgcccgagctgccgtcgcgggtgaaggacaagatcctgagccttgagctgatgggggtggactacgggcgcgcgctggcgctgaacccggcgctccgcgacgcggcgccggagtccatccacgccgtggtgacgttcctccagtcgcgggggctccacttcaaggacctcggccgcgtgttcggcatgtgcccgtcgctgctcaccgccagcgtccgcgccgacctccgcccggtcttcgccttcctcaccgacgacctcggcatcccggacaccgcctaccgccgcgtcgtcgtcaagtgcccccgcgtcctcgcctgcagcgtccgcgaccagctccgcccggcgctcctctacctccgccgcctcggcttccgcgacgcccgcgccctcgccttccaggaccccatcctcctcgtctccagcgtcgagcgcaccatgatccccaagctgggcttccctgaagcgctcggcatgcaatctgatgccgcagtctcgttggagctccattgtccggcgctttccaccctcagcatcgagagcaactcctaacccaagttcgagtacctcgtcgccgggattggcggcggcgtccacgtacatcacatgcgttcccacagtacttcaccgttcagcttcgacaatcgtatcgcaccgcgccagccgcgccaccgccagacgccggcggtctcgctgccgctgccggacatgctcacggccaccgacgaagagttcatggagatgctcgacaaggagatcgagctgcagaagcaggcagcttaataagctagccatttaattagcggcgagtgtacatgcatttaatcatggtagaattaagctggattagttgcatgatttgtacaataacttattgacatatattatttggtgtcaccctttgtgactcgtactaaaaaaaaaaagaaatgtctcgattctaaaaaaaggagaccccgtgatgtagtcggcacgaggcctttctgagcagaagccatgggaaatgctgatttgaggcccttccacgcatgctagcctttactaatcacccaagtttgcagcaatactataccagtaatttcacagcttatccgaatcaaaaagaaaaaaaaaataaagacacagcttctcaatcataagtaacattcgccagagatccaatttggcacatcgaggagcgtatttacatgtaattctttctgaattatgttgggttggacatcatccccagtatgttgcgctgcccatgatcagacaggataaaccggctaattaataatccatgttagttacaccgtgtgacctatatagttgttgctcagaaaccggcaatttgatgtggtgtccaaacgataatatcatagtactgtatttattctgaaagagtcgattcaatgaagttgtccccagattgacatgaac

SEQ ID NO: 97039 - DNA, 848 bp, Oryza sativa
  Clone ID: PAT_MRT4530_95080C.1
gcgtggcgaagtagatggcgaggtacgcctgcgcgagcagcagcgcgcggtggaggagcggcaggtacggggccatgcgccgcaccagcgccgtgagcatgaacagcggcaggagcagcagcgcaatggaggccgccgacgcggcggccgccgcccaccggccccccaggatcggccgcacgccgtcggcgatcccggcgttcgccgcggacaggtacagcttggaggagtgcgacagccgcgccaggtccggcatgagcgtctcctgcagccgcgccgggaggcccttgaactcggagatgaggtcgtccgtcccctccgccgcctccgcgaacaccacatcctcttccacctccgccgcctcattgctcgcggtggcattcaccttgccaccactcgcttccccatcaaccaccgcctgcgccgcctatttcgccgtcttcaccggcttcaccggcttcaccgccttggcactccccgccttcgccaccttcgccggcttcgcggtgtcggttcccttggacttcgccgtcgccgccttatccgtcttcgggaccttcgccttaacaacggccgcatccgcagaagctttcgccgccgccgccgccgacaacttcttggtcgccttcaccgcaccagcgggctccgatttcttgcccttcacaaccttggtctggttcttgccgtccaccccgacgaccttcttcttgatcttccccaccgcagccgcggcacccttcgccttcttcaccggcggcggcaccaccaccacctcctcctcctccccaccatcatcagccagcagcgccttccgccccccgacacccttccccttgggcttccccgac

SEQ ID NO: 97040 - DNA, 909 bp, Oryza sativa
  Clone ID: PAT_MRT4530_95081C.1
atggcctccgatggtgacaccgtagccaagctcgcgcaactctccggtgccaaccttgtgtgccacctccaaaccacaaatcgcatggctgattacaaggtggccgcacatgtgcttggcgagcgtgagcgtcgggctgccgagactgaggcatgtctacaagccaagattgatgtgcttcagatgaagtgtgatcttctagccaaggagggcgcatatagtgaaggtggcaagaagactaacattgactccaacaaaaatgagcaacctccttccatggggctgatatccacgggtggttctccaatagctccagcactagtagcaactagttgtgcctctgtacccgatatgagcccacacttggttgaagaatcaaataagggaaatatagaaatgcagaaccaattatctcatttgcacttgaataatttgatgaaccaactttcttttgatgcttggatggaagaaagtggaggcccctttatgagtgagcaagtacccttctctttggtgctcccatccagcagtaaaagtgcatctctgctgtcaaaaatcgaaaccagcttgtgggagtctgaggaaaatatggttatcagattcatggaaaatgtggagctttgcatgggagctatttgcgctctttatcgccaaaagaagctaatggttgaatcgacatgtgaagaacgaactaagtttacttcactcaatgaaagtcaggcttacagggcaacacaattggcagaatttcttttggatggtgatattaatgggccaatgaagaagaacaaagaagacctagtgaaccatgatgctacagggcccaaattcatccaggaatatgcaatacagtgctctaagcagttgtttgacatttacaggaataaagaggatctatacttttgttga

SEQ ID NO: 97041 - DNA, 1930 bp, Oryza sativa
  Clone ID: PAT_MRT4530_95082C.1
gcacgaggccccttttttttttttttttttttttttttttttttaacaatatcactcggattatgcgtatcagcatgtgaactgaagaccattttcttcagaagtgaacacctcaatttttcaacaaaattctagtacattagcacgctgcctcgggagatttttctcctccgggcaccacaatttcttgatccttatgtaataatatctcgtgaataataataacttatcccttattttgccaccattgtggcaatttatccctctgtactaaaaccaatcaatatgaaaaaggaaaacataataatgctagtgcaagggagaaaaaaaaaagaaaaatggcagtttttttttttcatcttgttttccttttctgaatatttgtttccaccaatcctaaatcttcttacaaccatgcccttcggcttccaccaaattgcgaaatttgcagatgagaccctgaagtttgtgtgtattttgctcagctcttcttccactcctcggcgccgccgtcggtgccgccggcgaggtaggctttcttcctcctctcggcgcgcgcgcacgcgcagacgacgacgaagcaagcggcgtacacggcgtacacgcgccagttcgcgcggggggcctcgccggccgcggcgcggtggaacacggcggcgtagtagtgcaggccgacggcgaggccgacgaccatctgcgccaggccgagcgccttggtggcgtccccgttgccgtcctcctccggcgaggcggcgccggagaagacggcgacgaggtccaccatctggagcatgaggtagcccatgaagccgagcgactgcgcggcctgcgtccaggcgtacgccgccggcgaggcggcgtggaagaagcggagcggctcgagccccgtggcggcggcggcgagcgcgagcgtggcgaagtagatggcgaggtacgcctgcgcgagcagcagcgcgcggtggaggagcggcaggtacggggccatgcgccgcaccagcgccgtgagcatgaacagcggcaggagcagcagcgcaatggaggccgccgacgcggcggccgccgcccaccggccccccaggatcggccgcacgccgtcggcgatcccggcgttcgccgcggacaggtacagcttggaggagtgcgacagccgcgccaggtccggcatgagcgtctcctgcagccgcgccgggaggcccttgaactcggagatgaggtcgtccgtcccctccgccgcctccgcgaacaccacatcctcttccacctccgccgcctcattgctcgcggtggcattcaccttgccaccactcgcttccccatcaaccaccgcctgcgccgccttcttgctcgatttggcctgcttggcaccaccatccacggtcgaattggacgctttcttcgccttggcggcgacaacggactcagatttcgccgtcttcaccggcttcaccggcttcaccgccttggcactccccgccttcgccaccttcgccggcttcgcggtgtcggttcccttggacttcgccgtcgccgccttatccgtcttcgggaccttcgccttaacaacggccgcatccgcagaagctttcgccgccgccgccgccgacaacttcttggtcgccttcaccgcaccagcgggctccgatttcttgcccttcacaaccttggtctggttcttgccgtccaccccgacgaccttcttcttgatcttccccaccgcagccgcggcacccttcgccttcttcaccggcggcggcaccaccaccacctcctcctcctccccaccatcatcagccagcagcgccttccgccccccgacacccttccccttgggcttccccgacgccgcggcggaggagcagagcgcaatgtgggagaggagcagcacggcgacgagcagcagcagcagcgctggcctcggccaccgcgccat

SEQ ID NO: 97042 - DNA, 376 bp, Oryza sativa
  Clone ID: PAT_MRT4530_95083C.1
atggcgacgcctcagctcgattccttcgatgggcttgctactggcatcttggcaactctcgtggcgcgacgcctcggcctgagatccaccggatttgacgggaacggcggcgcgatccacggcggcgctccgggcttgctccagaacagcgatggcgaggtccgcgttcccgaacatccactgcatgaaatcgactgaacttaagggggatggaaccagcactgagaggagacaagggaacgaacaagagatcgagacaaccgcggctcaatcggcgatggcgacggtcgtcatccttgcggccggcggcaagaacttgagcggcggagaggcagaggctctccctctcgagctgctcggttttgggagggagtag

SEQ ID NO: 97043 - DNA, 656 bp, Oryza sativa
  unsure (1)..(656): unsure at all n locations
  Clone ID: PAT_MRT4530_95084C.1
acctctcatgaatctnatgccctagtgcaagtntgcaaactgaagccaacccacacaccacacacacatatatatacagagttccttccatttttcttttgaaagccgcggggggctcctcttcttctctaggttgatcttatatcatctgagagctccaaactaaagcctgcagccatggatctgatggagaagtccagacgagcaaatttcttgttcgacgacaacgacgacggagatgaggatcaaaacgaacaaactaatggagaggctaatagggaggtgatgaggactcctgttaatcgagctggggagaagaataacaatgagaacttcacaactcgtggactaccaaacgtcactagtaaggatcgctcctccgggttgctggcaagcttgctgtgttgttgtgggccgcggcgggtttgcctaggtcgtcggtcgtagggtgtcccacatcctagtcctacgtgtcggggtttgaggacgtcggattttgaaccagctgtgatttgatcttatatgtactagtggcaccgccagttaccggtgattaccaattactctcatgtgtgttaagttaaccatgcatacatgaatgtagagactgggatgaatatgtcgattattatcttataaaaaaaaaaaaaaaaaaa

SEQ ID NO: 97044 - DNA, 1388 bp, Oryza sativa
  unsure (1)..(1388): unsure at all n locations
  Clone ID: PAT_MRT4530_95085C.1
cccacgcgtccgcccacgcgtccgcccacgcgtccgcccacgcgtccgctcaactccacttgctgttgttgattctcctcctcctcctcatctcatctcccgaaatactaatccagctcgatcgtgtgggaaagagatcacagaaggtacttggctagctcactccatcaatcgatcgatcggtacagtttagcaacagttaagcttcacctttttgtattagctagtggcagtcgctactacgtccacgtccttttgtgttacggattggttcgcgagcgagataactggtgagtagtagtagcttttccactgacctggacctgtacattcggcgcataatttgccgggaagcttagcgtgttgttctaagttctagtaagttggggggaggccatgggggtgcacacgaagtcgatgagctggtacatggggacgccggcctcgccgtcgccggggagcgccggggaggcgcagcacgcactgagcagcggcgggggagggggcagcgacgccagcttcgacaccaacatggtgatcatcctcgcggcgctgctcttcgcgctgctgttcgcgctcgggctcaactcgctcgcgcggctcatcatccggtgggcgcggcgggcggcgacgggggaaggcgccggcggcggcgtggagggggcgggcgccggcggcgggctcaagaagcgcgcgctcaggagcatccccatcgaggtgtacggcggaggtggtggagggagccccgccgccgcggcggaggtctgcgccatctgcctcggcgagttcgcggacggcgagaaggtgcgcgtgctgccgcgctgcggccatggcttccacgtccgctgcgtcgacacgtggctcgtctcccacgactcctgccccacgtgccggggctccgtcctccacggcgccaccaccaagcacaaaccaaccgccgccgccgccgccgcgggcagccggcggccggggagcgaggtcgacgcccccgccgccgccgccgtgacggtggtcatcgcgtgaccggggcaggtgggcccccgcttcccccagccgctgtgggcccagtgtaacatacccatgtaaaaaatctcctttcttgttttggacctatgtaaaaaaatctctccttgggccaggccatggcccatggccgtgagatattttccgacgttggtgctgtgagaggatgacgggtgggcccgctcgtctgttcagtttgtaggttactcacagtagtccaccgtccattcgatttcgatcttggctagcaagggcagttgttgtggaggttaggaggtacaggacgcttacagttacgtacaggcttgtaatattaccgtataagtagtatcattttgcgaggaaataccgntatatttgttggt

SEQ ID NO: 97045 - DNA, 585 bp, Oryza sativa
  Clone ID: PAT_MRT4530_95086C.1
gtaccgtccggattcccggtcgacccacgcgtccgggcatgcgctcctggcgttgctcgcctggcgacgcccgtcagacggttcggggagggtgcagccggcggcggctgcgccagggttggcctcggcctggaggcgtgcgcggcagggaagattaagggggttggtggcgacggattcgggacttcggtgacttggctccagagcggtaaaaatggagtggtgaatcgctgaggaacttcacggttcccctggcgttagctgctgcctgacttgctcggcgagcggcgcggacggtgcctaactccagcggagaagacggagacgacgccaaactctcactgtgtactggtaggacggtgcctaaccgtcggttttacacggagcttaggaaagtaaacggggcaaagaaatgtgtttgaacgggtgttggatggacctaattaacttgcctgacttaatgaaaatgtaaagaaccacgggtgcagaaaaatgacagataatcgccgggcggtagaattccaaaaatatttcagaatatttgaatgggaaggaaatgactgttaaaaaaaaaaaaaaaaaaaa

SEQ ID NO: 97046 - DNA, 1578 bp, Oryza sativa
  Clone ID: PAT_MRT4530_95087C.1
atggcctcctcggcctccgccgcggctctcctgcccctcccctctccttcctgctcctcctcggaggactccgacgacggaaagcacctcccgtctcctcccgcaccggaggcgaacaccccgcctacgcagcagcagaagcggcggcggctggagcgagactacaacgtggccatgaaagccctggcgctcgccggcgacttggacgaggtggtcgctgtctttgctgagctaaagcggactgccgccgacggtggtgatggcggcgcgccgcccaacgtgctgtgctataacacgctcgtcaatgcgctcgcggaggccggtcgcgagggggaggccctcaaggcgttcgatgaaatgctcgcgtcgggtgtagcgcccaacgcgtcgtcacaaaacatcctgatcaagatgcacgcaaggcggtcggagtttgaccttgcttgggagcttatccacaagagcggggtggagcctgacgttggtaagatcgttgaggcgtggggcgtgcttgactggatgctggagaagaactgccgcccgatggtgcagacttacacgcccatagtacaagcatattgccgcgatggccgcatcgtggaggccaagctgctgatggccgagatggaacgtcttggctgccttcccaacgtcgtcacatacaatgttctaatcagggccttgtgtgatgatgacaaatttgatgaagttgaacaggttttaatggaaagtagtaccaaagattggaagcccagtacggtcacgtacaatatatatatgaatggcctctgcaagaaaggtaaggctaaggaagcacttgagctgttggatgttatgttaggtgagggattggaacccacagcttatacttggagtattcttctgaattgcctttgccattcctcaagacttttggatgctatatacttgttagagaggagcacagagttgaaatggtatgctggtgttgttgcatacaacactgtaatgagcagtttgtgtgagatgggcaaatggaggggtattatgaagctattaacagatatgatcaaaaaaggtatcgagccaaacacaaggacgttcaacattttgattcgtagtctttgtgttgggggaaagtcctccttagccaagagcttgatccatagtctaggatttgctgcaaatgtggtgacatacaatatactccttcattggttttactaccatggaaagttaactgaagcgaatcgcttaatttcagtaatggaggaaaagaatattgctccagatgaagtcacctatactataataattgatggattatgcagagaaaggaaatttgatgcagctactgcttgttttcttaaatcacttacaagtgggctatcgatggatgttcttactgtccttctcaacaggcttgtttatgctgataaaatatgggaaatcaatcgcatatttgatggaaaagattttgtccctgatcatcatgtttttgaccttacaattagaacattctgtagggttggctattgtcactatagaactttttataagctaaaccttattctggatgcgatgttgaaaaggaagtaa

SEQ ID NO: 97047 - DNA, 2493 bp, Oryza sativa
  Clone ID: PAT_MRT4530_95088C.1
ttagaggttgttcgcgggatattgtcagaatcttttgatgaccagagtcgtctgggggcccttgtatactcagctatttatctgaagtggatttatacaggtcagatatcgtgctttgaagatggtggccaccatcggcctaacaaacatgctgagatatcgaggcaaatattccgtgaacttgaaatgatgtattatgggaaaaccacatcagccaagcaagaaatcaagcatactatacaaaacaaacttcatcgtaatgctggacctgaggatcttattgctacagaagtcatgcttgctaggattactaagacccctggagaatacagtgaaacatttgttgaacaattcacgatattttatagcgaactaaaagatttcttcaatgctggcagcctatttgagcaactggagtccatcaaggaatctctgaacgagtcaggcttagaagttctctcatcctttgtggaaaccaaaaggagtttggaccaagtggatcatgcagaagatttggataaaaatgataccattcaaattttgatgactaccttgcaatcattatcttctctaagatcggttctaatgaagggccttgaaagtggccttagaaatgatgcgcctgataatgctatagcaatgcgacaaaagtggcgcctttgtgaaattagtcttgaggattattcatttgttctgttaagcagattcatcaatactcttgaagccttaggtggatcagcttcacttgcaaaggatgtagctagaaatactactctatgggatactactcttgatgcccttgtcattggcatcaatcaagttagcttttcaggttggaaaacagatgaatgtattgccatagggaatgagattctttcctggaagcaaaaaggtctatctgaaagtgaaggttgtgaagatgggaaatatatttggtcactaagacttaaagctacactggacagagcacggagattaacggaagagtactctgaagcacttctttctatattccctgaaaaagtaatggttattgggaaagcccttggaataccagataacagtgtatctaaactatgcacagtacttcagaaagcaattcgagaagtacttggatcaactggctgggatgttcttgttcctggagtggcccatggaactctgatgcgggtggaaagaattcttcctggatcattaccttcatctgtcaaagaacctgtggttctaattgtagataaggctgatggagatgaagaggtcaaagctgctggggataatatagttggtgttattcttcttcaggaactacctcacctttcacatcttggtgttagagctcgtcaagagaatgttgtatttgtaacttgtgaatatgatgacacagttacagatgtgtatttgcttgagggaaaatatatcagttgctcttacttatttttcattccgtgggcattgccacagcaaaaaagcaaatcaggagtgaatggtagttttgctgctcttgagctttcagaagcttcagtggaatcagctggtgcaaaagctgctgcatgcagaactctttctgttcttgcttcattgtctaataaagtctatagtgatcaaggagttccagcagcctttagagtcccttctggtgctgtgataccatttggatcaatggaggatgcgctcaagaaaagtggatcactggaatcctttacaagccttctagaaaagattgaaacagccaaagtcgaaaatggtgaagttgatagcctggcgttggagctacaagcaataatttcacatctttccccaccggaggagactattatatttctcaaaagaatcttcccacaggatgtccggttgattgttagatctagtgctaatgtggaggatttggctggtatgtcagctgctggtctctatgattcaattcccaatgtcagtctcatggacccatgtgcctttggagctgcggttgggaaggtttgggcttctttatacacaaggagagccatcctaagccgtcgagccgctggtgtttatcagagagacgcgacaatggctgttcttgtccaagaaatactgcagccagatctctccttcgtgcttcatactgtttgccccgctgaccatgaccccaaggttgtccaggctgaggtcgcccctgggctgggtgaaacgcttgcttcaggaacccgtggcaccccgtggaggctgtcatgtaacaaattcgatggaaaagttgccactcttgccttttcaaatttcagtgaggagatggtggtgcacaactctggtcctgccaatggagaagtaattcgtcttactgttgattacagcaagaagccattgtcggttgatacaacctttaggaagcagtttggtcagcgactggctgcgattggccagtatctggagcagaagttcgggagtgcacaggatgtggaaggttgcctggttgggaaagatatttttatagtgcaaagcaggccacagccatag

SEQ ID NO: 97048 - DNA, 891 bp, Oryza sativa
  unsure (1)..(891): unsure at all n locations
  Clone ID: PAT_MRT4530_95089C.1
gtgttagtttatccacgcgtccggggaaatatatttggtcactaagacttaaagctacactggacagagcacggagattaacggaagagtactctgaagcacttctttctatattccctgaaaaagtaatggttattgggaaagcccttggaataccagataacagtgtgagaacttacacagaggcagaaattcgtgctggcattgtttttcaggtatctaaactatgcacagtacttcagaaagcaattcgagaagtacttggatcaactggctgggatgttcttgttcctggagtggcccatggaactctgatgcgggtggaaagaattcttcctggatcattaccttcatctgtcaaagaacctgtggttctaattgtagataaggctgatggagatgaagaggtcaaagctgctggggataatatagttggtgttattcttcttcaggaactacctcacctttcacatcttggtgttagagctcgtcaagagaatgttgtatttgtaacttgtgaatatgatgacacagttacagatgtgtatttgcttgagggaaaatatatcagattagaagcatcatccatcaatgtcaatctctcaatagtttcagaaaaaaatgacaatgctgtctctacagaaccaaatagtacagggaatccatttcaacagaaactccaaaatgaattctctctaccatcggatatcgagatgccactgcaaatgtctaagcaaaaaagcaaatcaggagtgaatggtagttgtgctgctcttgagctntcagaagcttcagtggaatcagctggtgcaaaagctgctgcatgcagaactctttctgttcttgcttcattgnctaataaagtctatagtgatcaaagagttccagcag

SEQ ID NO: 97049 - DNA, 268 bp, Oryza sativa
  unsure (1)..(268): unsure at all n locations
  Clone ID: PAT_MRT4530_9508C.1
gatccanatcgagcagggtcagcgccttcatccggcggacggcgcccgtcgccagggtctccgggaaggtcgccgcctttnagccggggttgagatagctagctttagaattttttttgtttcggtgcccccgcgtcgctcccagggcaggggcgacacgggaggcgactcacccgccgccgccgcaccacccccaccgccctttttccacctcgccaccggaaaccgcacggccgcaaggacggccggcggcggggnctcctccccc

SEQ ID NO: 97050 - DNA, 147 bp, Oryza sativa
  Clone ID: PAT_MRT4530_95090C.1
tattatactgtgagacttgcccacgaaagatgactggttgaaattcaaatgactaggacacattgtgatcctaatgagttggctatatatgatagatatgagacaaaagtgcacatggcgaataaagcctgagagaggtcatacaag

SEQ ID NO: 97051 - DNA, 1228 bp, Oryza sativa
  Clone ID: PAT_MRT4530_95091C.1
ctttacaagccttctagaaaagattgaaacagccaaagtcgaaaatggtgaagttgatagcctggcgttggagctacaagcaataatttcacatctttccccaccggaggagactattatatttctcaaaagaatcttcccacaggatgtccggttgattgttagatctagtgctaatgtggaggatttggctggtatgtcagctgctggtctctatgattcaattcccaatgtcagtctcatggacccatgtgcctttggagctgcggttgggaaggtttgggcttctttatacacaaggagagccatcctaagccgtcgagccgttggtgtttatcagagagacgcgacaatggctgttcttgtccaagaaatactgcagccagatctctccttcgtgctttatactgtttgccccgctgaccatgaccccaaggtttgtccaggctgaggtcgcccctgggctgggtgaaacgcttgctttaggaactcgtggcaccccgtggaggctgtcatgtaacaaattcgatggaaaagttgccactcttgccttttcaaatttcagtgaggagatggtggtgcacaactctggtcctgccaatggagaagtaattcgtcttactgttgattacagcaagaagccattgtcggttgatacaacctttaggaagcagtttggtcagcgactggctgcgattggccagtatctggagcagaagttcgggagtgcacaggatgtggaaggttgcctggttgggaaagatatttttatagtgcaaagcaggccacagccatagcatggatgtgcgccaatatcagtatggttaggtaaataaagtttgccgcatggatcgactgttgtaatgcgaatagccttcacgcaaaactcgaagggttgtcattagtgtttctttactattttttttggaagcaaggggaaaaaataatgcctaaattctaaaggaaatagaagtttaaggcctaactaattcaaaaaaaaaaaaaaaaaggctgagaatgctaatattagcacaaatcgtatggaaatgtaactagtattcaaacacaaacaaaaaaataaataaaaaactcaagggggggcccggacccaatttgcctataggagtcgtttacgccgcttatggccgtctttacaacgcggactggaaacctggcttacccactaatcccttgagacctcacctttcccgctgggtaaagcaaaagg

SEQ ID NO: 97052 - DNA, 300 bp, Oryza sativa
  Clone ID: PAT_MRT4530_95092C.1
atggcggagctacattatgagggtgtggtgcccaggaacccggttaaaaacagcaactaccttctaaggtcaacctccgccggctcagccaacgatatcggtttcgtaattccatactgcttctgtggctgctcggcgacggcagccgctgcggcggcgttacaggccgccatggaagcccctcacaagagagcacgaaaaccgattccgcaacagaaccaacctcactggaggaacccgaaccagcgcgcgcagatcggcgattccgcaacagaaccaatctcactggaggaaccctaa

SEQ ID NO: 97053 - DNA, 724 bp, Oryza sativa
  Clone ID: PAT_MRT4530_95093C.1
gcacgaggccggatccgataggggaggggttggccatggaggctatggtggaggcggccgggggggagtgcatcgtgcccgggcagcaggcgccgctgcggctgctgggcctcaaggtacgaaccgatctctcgatcgcagtgtatttttgcaatccccccggctcccgcatgtcggcgcgagagcccttagttaaattgaacgttattagaggttacttgtgaggggatgtatgcctgattgtgggttaatcatgtatcttggttggatagttttgttatggttggtaattcggtgcttggtgcctgaggctcgctcaattatgctttatggttggtaattcggtgcgcggtgcctgtgattggtttgagcttttcttgatcattaaatattcattgggctatgcttgttaattgccaggtttagtgggttggttttgtcaatttcgtagtcatacaaattacagaagacaaaattttatccatgggattagggatagtcgattaaacagttacgcaattgcgcagcaatgatttgtattatatttttcgtgttgtccaatagtgtttcagctttatcttttgtcaaaaaataggaaatacaagggatactaggttaaggttgagcctttgaggctactctgatgctgtggtactattcatttcgtgctctcgtggtattcattatgaaagtttgccattgctaggcataatatagctcaaaa

SEQ ID NO: 97054 - DNA, 1410 bp, Oryza sativa
  Clone ID: PAT_MRT4530_95094C.1
atgtcgccgacgccgaggccgcacttcctcgtgctcacgttcccgctccagggccacatcgcgccggcgctccgcctcgccaggcgcctgctcgccgccgcccccgacgcgctcgtcaccttctccaccgccgccgccgcgcaccgccgcatgttcgccgagggggagggcggcgacggcgacggcaggctcgagctcctcccgttctccgacggcaccgagaacgggttcgtcaagcgcggcgacgccgcggagctcggcgcgtacatggcgtcgttccacgcctcgggccggcgcagcgtcggggagatggtcgacgcgctcgcggcgcgggggcgccccgtgtcgagcgtcgtctacacgctcctcctgccgtgggcggccgacgtcgcgcgcgaccgcggcgtgccgtccgcgctctactggatccagcccgtcgccgtgctggccatctactgccactacttccacggcctcggcggcgtcgtcgacgagcaccgccgcgaccattcgttcgtcctggagttcccgggccttccgccgatggcggccggggacctcccgtccttcctcaccgaagccaccgacccctccgactacttccacagcatcttcaccacgttccgcgacctgttcgacgccctcgacagggagacacccaaggccaccgtgctcgtcaacgtgttccaagaactcgaggcggacacgctcgccgccgttggggcgtacgacgtgctccccatcggcccggtgctcccgtccggcgacgacgccgcgctgttcaagcagaacgacgccaagtacatggagtggctcgacaccaagccggccggctcggtggtgtacgtcgcgttcgggagcttaaccgtcatggcgaaggggcaggtcgacgagctgctccatggcctcgaggagagcgggaggccgtacctctgcgtggtgcggaaggacaacaaggccgccgtggcggagacgggcgacgcgacggcggcggcggcggcgcgcaggaacggcgtggtggtggagtggtgcgaccaggtgcgcgtgctgtcgcacgcggcggtggggtgcttcgtcacgcactgcggctggaactcggtgctggagagcatcgcgtcgggcgtgcccatggtgggcgtcccgcggatgtcggaccagcagatgaacgcgcggctcgtcgagcgcgactggcgcgtcggcgtgcgcgcggaggtggacggcggcgacggcgtgctgcgcgcggcggagctgaggcggcgggtcgaggaggtgatgggagacggggaggcggcggaggtgcggcgctcggcggcggcgtggaagcgagcggtggcggaggctctagggaaaggagggtcgtcggatcgtaatctgacggccttcgtggagggtgccagaagtgtcatttga

SEQ ID NO: 97055 - DNA, 1166 bp, Oryza sativa
  unsure (1)..(1166): unsure at all n locations
  Clone ID: PAT_MRT4530_95095C.1
ggcgacctacgagtnnttttnttttttttttttgttttttttgtgtttgtggggcgggaggaacataataaaccaaaccacggttaatatattgcatcgacttggatctggggataccaccattacacagcaaagggctgtgttgggtgggaaccaaaaacatgggcacaancagggagaggacccggggcggaccgcccaaccgaggaagggaaccangagcgggaggccgccaagctgggaaaacgggagagaggaaaggaaagagaagggggcggggagcggggcaaaaagaacagagggcagggggcggacgggggggagcccgaggagcggcacggcgcccgggagaggcagggaggagaagagcgaaccccgcgccgagagccggccgccggccgcggcggaacgaaccagaggaagagaagaggaacggccgcggagcccgaacccaccggcgaggcgcgggcaagggcagaaaagaccggcgggagagaccgcagcgccagcgacgccggcaggacgaagaaggcagcgggccgacacgagggaggcgggggagacgcgggacgaggacaaacggccgagagaggaagcgaggaccgagagaggaccccgaggcagcaggcggaagcacgcgaagacccgggagcggacggcgcgagaacgacacggagaccagcagcgacagcgggaanccgaccgagccgagagcgcgcacaccgaggcggagacgaaagcggcnacagccgagggcaggaaccagccgcagaggaacagggcgaggcgcagcacagcaggaaagaccgagagagcgggncggcccgacacgcgcaccgcgcgacaagaggccagagcacgaacgccggccgccacggccacggcacacacaggaacgaggaacggggcgaggaaggagacaagccgacgagagggaagaagacaagagcgagacaaggggacggacgcgaggcacgagacgcagagcggagaggcgacgcgagggcgagccaccaacacacgacacgcgaaccaacgcacccacacgcaaaagaccgccgcacgccccagccccaaacggcaagnacagaaccgacggaccagcgcgccggagggagagagagagaggcgagcagggaacgacgagggcaacgccgagcggagga

SEQ ID NO: 97056 - DNA, 336 bp, Oryza sativa
  Clone ID: PAT_MRT4530_95096C.1
atggaggccatggacaagctcgtccagctcgccgagtccatgtgccaggccgcctccctcctcctgggtgacaacgacccctccgacgagtccagcccgcgccgcccctccaccttcctcaacgccgtcgcgcttggcaacgtctggtggtcgcgtccgccgtccgcgtcgcctcatgctcccaccgcgttggacgccatcgacgaagccgtcggcaagctcaaatccgtcctcgacaacggcgaaggcgacctcgacgaggcagcgctgcgggcggaggagctgatggcgccgctggagagccactgcggtgggtggtggcggcggcttcagtga

SEQ ID NO: 97057 - DNA, 489 bp, Oryza sativa
  Clone ID: PAT_MRT4530_95097C.1
ctagctctagatcgcgagcggcgcccttctttttttttttgggcaagaaccggaggcattaccatacaggcatagactaaaaagacacatcattaatcagagagttgtagacacttaaccaatccatccaaccaaggaggcagaagatggcctatcgatactactattactgtggcactaccaactatgtccagtatgatacacgaagtaacgtacctgccactaatacagcggggcaaccagggctgagcgaacgactgtcacccactaagaattgaggttccccaagtccaccggtaaactactatgtattctttgccaatactatcacgatcacattataaagaaaaaatggacgctcattctctggtactcttgttgctgcagccaggacacttgaaatgcttgatgcgctccatcctggcaggggagattcggacacatttgacgtggaaccaggtctcacaaatgtcacagcaaatgcagaac

SEQ ID NO: 97058 - DNA, 351 bp, Oryza sativa
  Clone ID: PAT_MRT4530_95098C.1
atggagaggggttgcaatggcaatggcggcgtgaaggtgaccttcatcgagacgcagttcgtcacctccgacgccgccgggttcaagtcgctcgtgcagcgcctcaccggcaacgacgcagccgttgcgaccgcgccgtcgctcgagagcccgcggccgtgccggcggggggtcgacgggtggaggggagccgaggcgacggtgggggtggggctgccggcggcgccggcgccgtggatggatgagattgagatgatgatgctgtacgagacttgcgacctcgccgatatgctgtgcgtcgatgtcgccgcgggcggaggagggtgccacggcggcggcggccggcgatga

SEQ ID NO: 97059 - DNA, 2664 bp, Oryza sativa
  Clone ID: PAT_MRT4530_95099C.1
aacgactccgccattcttcccttcaaatataaagatacatatttacagtaattgtttatgacaagaacataaaatataatcctcactttatctgtactatcactggtccaccccgaaaaccgtcacagacacgtccatatcttcaagattgtgtgacattttcttataggttccaaactgtggtatgaaattcaaaacgtcgtaataaacatcctcgcttgcggagaagaacccatcattgtcgtaatcactaacaacaccatctggagagcaatcgccatgtccaatctgactactggagtagccgtacacgaacagcttcagatgcatctctctgttgatgcacaccgtgaaaggcagtagcttgcctacgctaaccttgccatcgaaaaccaaatacatacccttgattatcgataatgcgacaacaatggcaagcgaatcgtagtgagttcctccgagacgaatcacctcgatctccactgtggccagcacggcgtttggtacagcagccatcttcagatcaatggcaccacagtggccagtgtcaatgtgccagtggaaccttgaacgttctttgtagaaagatggacagtagatggagtaaccatctaccaatactctatcttcttgttcttcttgacctttgatcattaggtgatactccattaccactggccctattgcgtaaatgccgcgaggaggctgaatcaggggttgcaccttatcagaacccggcttaagtgtaaatggtctgtctcttgggtattcaaagatgaaattgcgttcttggctgtttcgtatatctctgaatgcaaacataccatagatctcctgaacaacattgtcaggagaagatacagtcagaccaaacacctggatggctcgacggcaaggctcctcattattcttcttcttcattctcagtggtaactgaggcatgaaattgttcatagataagaggtttggatcgagagattggcacggcccgtcgacgtgcagagaccccttccaaatcgtcctgatatcaaatggatcagcagtggagacagagaatttcatctgttccatgatttggctctcccacttctcctccgaagcgaagcggacatcccgattttccattgagaagtaatcgttgtcttcatctgaagattcatcatcatcatcatcatattcggtttcgtctgaataatcgtcttcctctccatctcctgcttcctcccattcagattctttcttcacccatgaatccacctcattgtcatcctctcctagcttctctttcgaacgcaggcaatggcgttgcaacgatagctcctgcatctcctctctgaagcagtgcgtcgccatcgccggcaccgcgacgaacaccttgaacccgcgccgccgcctctcgtcggctgcgccgtacggcacgaagaagcacggctccgtgctcccgagcagcctccacgagagcggcagcacggccgccggcgagccccacccgaagtccacctccgagtggccgaggcggcgccagtcggtgaacgcgctcacgccgcgccccgccgtgacgccgccgccgcggtggagctcgtggaagtcgatgtaggatcggacgtactcgtcgtccacctcctgcttgctcttcttgaccatggcggctgtgtccgcgagcggctgggcgacgagctcgccggcggtgagggcgacgtacactgggacgcacacgttgccccagtagccgtccgggagaggcggcgtgaggagcttgctgatgttcatggagtacaccatcttcacgacctcgtcggggctcgtccttctggctttcgtcctggcgcgccagatgaacgcggcgaggaactcgaacgttgtgagcttgatgccggcctcgccggcgagctgcgccctgagctcctccacgcgcgcgtcgctcacgtggaagcactccctcgcgatctgtccttgtgcgtcgccggccgcgccgtacggtccgtgcaccgcggcggcggcgtcgtcgagcgagaggacgcgttcgaacggcttcaccacgcgcggcggacgcctcgggccgagacggtcctcccgctcccacaccggcgccaccgccgccggctcctgcgccccgcgcgcgaaccgcgccgcggcggagaggaacttggtggcgccggcgccgtcgcagagcgcgtgcgccacccgcatccccagcgcgacgccgccgcaggcgaaccgcgtaacctggagcgcgagcgccggtgaccccgccacgccgtcgccgtcgccgtcccccggcacgagccgctccagcaaatcggagcccgggctgtcggtgtcgacgtcggccaccgacacgtcgtccgccgcggcgagaacaaggggcacggcgtcggcggccgaccagacgacgcgccctccgtccccaatcctcccggcgagcgggacgaacatgcccagggcggcggcgaacgcgcgcgggaggacggcgagcgggtcgagctcgagcgacggcggcgggaagaagcgcagcgtgcggaacgtcacgtcgagcacgttgcggtccgtgtccagcccggacagcgcgaacgacgccgcgtcatccgccggaggcggacgcaggtgcacggtctccatgacgcgcacacgcatctgcggcggcggcggcggcgacgactccat

SEQ ID NO: 97060 - DNA, 1629 bp, Oryza sativa
  Clone ID: PAT_MRT4530_9509C.1
atggcggctctggtgcaggtggtggcggtggcgcttgcgctgtggtgctgcggcgccgccgtcgtggcgtccgccgcggcgtcgagcccgccgctggtgtcgccgaaggcgaagcccggcgtgcggccgaagctcccgcccaagacgaagctgaccaccatcaccttcagcccccaccacaagcgcgactaccaggtcacctgcaccaacaccggccgccgtccctgcgtcgtctcctgcccttccaactgccccaacaagtgcctcgtcgcctgcgcctactgcctcaccttctgcatgtgcgatctgttccccggcacgtcgtgcggcgacccacggttcaccggcgccgacggcaacaccttctacttccacggcaagaaggagcaggacttctgcatcgtctccgacgccgacctgcacatcaacgcccacttcatcggcaaccacaacccggccatgaagcgtgacttcacctggatccagtccctcggcatcagcttcggcgaccaccgcctctacatcggcgcgcgccgggccgccgagtgggacgacgacgaggaccacgtccagatcaccttcgacggcgagcccgtcaacgtcgacgccgccaagggcgcccactgggtctccgccgccctgccgtccctctccgtctcccgcaccgacaccgtcaacgccgtcgccgtcgagctcgacggcgtcttcgccatcaccgccaacgccgtccccatcaccgacgacgactcccggatccaccactacggcaagaccgccaaggacaccctcgtccacctcgacctcggctacaagttccacgccctctccggcgacgtcgacggcgtgctcggccagacttaccgccccacctacgccaacaggctcaacatcaccgccaagatgcccatcatgggcggcgccgacaagtaccgctcctcgggcctcttctcgccggactgcgccgtctccaggttccaccgccgccgcaccgccggagaccatgtcgccctcggttttgcctcgagaggagaggcgcggcgccgctacagcggctgcagcggggaagcacggcggctccgaggcctacggtggaggccaacgagcgagcgagcgagcaagacacggcggaggcgcggggaggccggcgagctccaccgcgtggaaagggaggagtcggggtggccgcggtcgtcggcgaggagctcgcaggtagggggcccagaggaggccgtggctcggcggctgccgccctcgcccatctcctccccccggcggaagacgccgcagttccgctccgccggccgctgcgccctcgcctgccgccctgcgcctccgctttgctccgccctccaccacgcactcgccaaccgccgcgcgctcgcacgccgcctccgccctccgccacacactcgcccaccgccactctgctccgctggccgccgcgcgcttgcacgccgcctccgccgaccgccgctcagccccacttgccgccgccagtcgatttcgagcgtgcacggcgtgctcgtcgctcagcgcgccgtaggccttgttcgccagcgttcacggcgagcttggaccgcccggcctcgccgccccacgcgccggccacgtcgcgcaggtaccacttga

SEQ ID NO: 97061 - DNA, 264 bp, Oryza sativa
  Clone ID: PAT_MRT4530_950C.1
atggtgcactgggaggttggggcccacggttcccctctcttcctctcccccagctactcaaaccgacggcagcgcatggcgagagcaaagtcggcgactttgccaccgtcgttgacctcatacatcttcgtctccgacctctccaccatcggatatgcttctatctccaacgggtgcactagccatggccatgttgaggggaaagggagagatggctggtggcggagtggaggtggagggggatggccatggtggccaggctaa

SEQ ID NO: 97062 - DNA, 228 bp, Oryza sativa
  Clone ID: PAT_MRT4530_95100C.1
atgatggttgttgtccatgataggttagtttcgatcttgctggaagtttggcagactgaatatgtctttttcataaatctagcaaatggcaatgggatgtctgagagcttgtttgagatgatgaatgcatttcatgatatatgccgcaaggacattaagttcaagacatcccattattacttgaattttcttagctcaagttatcaggtttacatagctgttgcttga

SEQ ID NO: 97063 - DNA, 523 bp, Oryza sativa
  Clone ID: PAT_MRT4530_95101C.1
ggaacacatccaccaaagccaaaattactggggggtataaaaaagcagggtatatatgttaaaaacaacggaaaggatctgggcattaccacaataaaagttaaaaaattggccccggggaaagaaaaaaaaaaacccttggtgggaagggtttattaacaggagtggaaagcgatattgctgcccccccaaaagcaccccaaaggggttccccccactgggggccagggaaaggaacccaccccaacccttgttccccccgaaaatgggggacaaaaaaacagctggggggggaaaagtatttttaaaaaaaaaaaaaattgttttttaaggacggagcttgacccgtttccaaaaaaaaaaaaaaaacggcccaacggaaaaaacaggagggaccaggtccttttttttggggagggaaggaaaaaaacttttttaagttttctaaaaaaaaaaaagaattcgggcactggacttttctcggaaacggaaagcctaagccggcctcctttggagcgggggg

SEQ ID NO: 97064 - DNA, 1842 bp, Oryza sativa
  unsure (1)..(1842): unsure at all n locations
  Clone ID: PAT_MRT4530_95102C.1
gcggcggcgtcgccgccccgtgcatggcggtgtccctcctcgcggccgcgctgtcgtcggcgggcgccatgggcaacctggtggtgtatctggtgaaggagtaccacgtgcccagcgtggacgccgcgcagatctccaccatcgtctccggctgcatcagcgtcgcccccgtcgccggcgccatcgtcgccgacgccttcttcggctgcttccccgtcgtcgccgtcgccatggtcttctccgtcctggcgttggtggtgttcacgctaacggcgagcgtgcgggggctgaggccggcggcgtgcgtgcccggggcgacggcgtgcgaggcggcgacggcggggcagatggcggtgctgtacgcgggggtgttcctgctgtgcgtgagctccggcgggggcgcggttcaaccaggcgaccatgggcgccgaccagttcgacgccgccgccgaccgcgacgtcttcttcaacttggtacttcatcttcttctacggctccgccgtgctcggctccaccgtgctcgtctacgtccaggacgccgtgtcgtgggagctcggcttcggcctcgccgccaccatcgccgccgccggcctcgccgcgctgctcctcggcgcgcgctactaccgccgccccgccgcgcgggggagccccttcacggggatcgccagggtcgtcgtcgccgccgcgaggaagaggaagatcgacgtcgcggcggcggcggcggcgtcgggcgacttgaagttttactacggcccacgtagcggcgacggtgacgacgacggtggcaagccgagcgacgacaataatttcgcttcctgaaccgcgccgcggtgatcaccgacggcgacgtggacgcggcggacgcggcggcgccgctccggccgtggcgggtgtgcacggtgcggcaggtggaggacctcaaggcggtgctccgcatcctgccgctgtggagctcctccatcttcctcagcatctccatcggcgtgcagctcaacttcaccgtcctccaggcgctcgccatggaccgcgccatcggccgcttccacgtcccggcggcctccatggtcgtctcctccttcgtcgccgtcgtcgtctccctcggcctcatcgaccgcgcgctcctcccgctgtggcgcgcgctcaccggcggccgccgcgccccgacgccgctgcagcggatcggcgtgggccacgtgctgaccgtgctgagcatggccgcgtcggccgccgtcgagcgccgccgcctcgccaccgtgcgcgcccacggcgaggcggcgcgggacgacccggcgtgggtgtcgccgctgccggcggcgtggctggtgctgccgttcgcgctgtccggcgccggcgaggcgttccacttcccggcgcaggtgacgctctactaccaggagttcccgccgtcgctcaagaacacggcgtcgggcatggtcgccatgatcgtcgcgctcgggttctacctcagcacggcgctcgtcgacgccgtgcgccgcgccaccgcgtggctgccggacaacatgaacgcctccaggctggagaacctctactggctgctcgccgtgctcgtcgccatcaactttgggtactacctcgcgtgcgccaagctctacaagtaccagaacttcggcaagtagacacagccatggctgccatgaccatgaacatcttcagagctctgtacattacaaaataaactgctgacatgatcaagatcatactatctcagaggttgtgtgancaatgtattagcggtagtgtatntccatccttcntcgttgaggagaattgtgcaagctaatttgcctaaaaaaaaaaaaaaaaaaaaaaaaaaaaaaaaa

SEQ ID NO: 97065 - DNA, 2262 bp, Oryza sativa
  Clone ID: PAT_MRT4530_95104C.1
gtttccacccgggcttggggcagagacttttgttcgctgaaatgtagcaagagttcattagcctgaaagtgggtggaaagtacagatttatatagtattcctgaatgaaaaatggctgttggaaaatggaaacccaaaatgaaattcataattgatacctattttgactatctggctggactattgaccctcgcctgtatccactcaaattttagaaagagagtaatggtagagctatctgtaaaacaatctaacaaaaatgatcgcatgtaaaatctgcttgaaattaacaatacaagcaagggtgcagagcacttcttccacaccccatgtgttgcctactctgtatctcttacccgagcataggtgctattgttgaatctttaggactggaaaggcaataacatcccttatactcgccgagttggtcaaaagcattactagtcggtcgattccaaggcccattccggaagcaggtggcattccgtactctagggaagtcaggaagtcttcatctaaggtaacttcatacgaaaaatcatcttcctcgtgtttaccctcagtagatttgacctccttggtcattgcagcacgcttagcattgtgctgcttaatttgattttcaaaacgacccctcttctgcatgttaaccaggtctggcctctgcatttcaagtttatcaaaccctccaaatacaagctgatcaattgggtctgtgagctcagaaaatgcattaccaatctcacgaccacatatgaaaagttcaaatcgctcggtaagaccagcatacctcctatgtggtttggccaatggtgatatctcaactgggtagtcaagaacaaatgttggctgtaccagacttgattcaacaacagtctcaaagacctcattgagaacatgtccaacagatgaacaagcttgcaatgagatattctcattgctctctgttttgatccctcttgcagcatttttggcggattcaagatcttctccaaagctattaaagtcaattccagttgcttctttgacaagagaatgcatggtttccctcctccatggtctttcaagggagatttcagttcccattgccagccattggcactggcagtggccataagaaatggcatctgtaagtacaagccagggcacaggaggtgtcttcacccccttcttccttccaatcgcctttgctgtagcgctctccatttccactccaggtctggaggcctcacactgggttgaccttaccgtgtactcctgataatcaaccctaagtttgccatgagtagccattgcacatctagtaacaatttcttcagccaaattcatcatgctttcatagtctgaataggcttcatacatctcaattgtggtaaattcaggattatggcgagtggaaatgccttcattccgaaatattctcccaatctcataaactttctcaagccctccaaccacctgtagaactggcgtttcaacttctatgaagccaaatgattccattgtcttgcggatttcagatacagcctttgctcttgttcggaatacatcagcaacctcaggatttgcaatcatgtcaacatacctttggcgataccgcttgtccacatcagttaagccatggtacttatcaggtagtgggagtaaggattttgtaaggatttcaaagtttttcacgtaaacagatagttcccctttttctgtcttctttatggaaccatttgcacctattatatcaccaatatcaataattgtcttcagttgttcaaactgttcctcagtaaggctgtctttctcacagtaaagctgaatagtcccggaatcgtctcttacggtcataaaaacaagctttccaaacgctcttcgggcgacaatcctcccagcaatggacaccgccacgtccgcgcagacctcgccattctcgagatgggtgtacccatcctgaagctccttggtagtgtgagtcctgtcccacttgtacgcgtacggctcgtagcccttccctctcagctcctcaacctttttgaggcgaatggcgcggatggattcgcggtcggaggtggaggacgaggacgaggaggcgcttcggcggcggcggtcctgaggtgggggcgggggcggcttcgtggtggaggcggcggccggggagcagcagcggacgtgggggcggaggggcctcgccgctggggcggccttggcggcgcgagaggccgcgaagccgaggagattggaggaagccctccacgcccgcagcgcctccat

SEQ ID NO: 97066 - DNA, 1296 bp, Oryza sativa
  Clone ID: PAT_MRT4530_95105C.1
cccttccaaaaaaaccaaccccctccgcgcgtccgatttcaaaataaccccgccgcctccgccgccgccgccgacgaggaggggtcaccgatgttgtccgaccaggagctggcccggtacgtggagtcgttcgtgcgccaggcggcggccgtcccgggcgccgtggcggcggcggggggcatatcggcggagtccgtggcgcgccagctcggcccccagctcggcctcgacctcacccccaaggcccccctcatccgcgacatcctcctcgccctcttctcccccccgccgcagggggcccccttcacctcctccgctccctccccctccgcctccgcctccgcctccgcctccgccgccgctgctggccacttcttctcccagcagcagcagcagcagcagctgcagacgttcctgacggcgtcgcagcagtaccagcaccgcggcggcgcgggggccgcggcggcgccaccgtcggcgtacggcgtcgcggcggcggcggcggggtacaggtacgggcagccgttcccgcaggacgaaggggcgcatctgcagaggctcgtccagatgcatcatcaccagcagcagcagcagcagcagcagcagcagcagatggcggcggcggcggcgggggtggccgctgcgccgcccacggctgtggagagcccgcgccccgcggcggcatcgaagaaagagagtgcaagtactggagtaaagagaagaggtggtccaggtgggctaaacaaagtctgtggtgtttctcctgagctgcaagctattgttggtgaaccaaccatggctagaactgagatcgttaagcagctttgggcatacattcgcaggaacaacttgcaggacccaaacaataagagaaagattatctgcaatgatgagctgcgtctagtctttgagacagatagcactgatatgttcaagatgaacaagcttttagctaagcatattagaccacttgaggcaaaaatgctcaaaattcttgcagaagattcaaatcgagattcaaagaagttgaagcctgtcgacagcgaacccatttctcctgctgaaactgatgttaaccagcttccaattatcttgtctgatgctcttgcgagcttttttgggactggagagaaagagatgccctcgtctgaggctgttaagcgtgtttgggaccacatcaaaagcaataatttagaggatccagcaaatcccaccatgatattgtgcgactcaaaacttaaacaactctttggatgtgaaagtctaactgccatgaatcgtcttactggactctag

SEQ ID NO: 97067 - DNA, 417 bp, Oryza sativa
  Clone ID: PAT_MRT4530_95106C.1
atggcggtggtggaggagcgccgccaccgctgccgctgccgccttcgtcgggagaccgccgcttcccctcccgccggatgtggtagaggggagggcgcggtagccaccgccaccgccgggcagcctccatcgggtagccactgcattcgccaggcaatcgccagccttgcgagcccgccgccaccgccgggcagccgcgggagaccgtcgcctccccttccatcggatctggcggaggggaggacgcggcagccgccggcctcgggagcccgccgccaccaccgggcggccgctggagaccgccgcctccccttctgccggatctggcggaggggagggtgcggcagccgccacctctgccaagcatctgcccgcctcgggaggccgccaccaccgccgggtagcctccgtcgctag

SEQ ID NO: 97068 - DNA, 418 bp, Oryza sativa
  Clone ID: PAT_MRT4530_95107C.1
ggttcttatttttattgtttgtacactatatgatgcaaaactttattactagagtacaagaaaccaaagtacgatcataattaaccacagaaagagaacgggagggggacaagaaccaagcaaggaaagaaagggagaggcagggccaccccaatcaaatgatgatggccgggtccaccccaaataacttgatgggtgcccggcacaatccggcaaaaagagccacaggggcgccgaagcataacgcccggcggctgcctggaacattgctggggcacgagcgccataggcggcgcacatgaacgtggctggggggctgcccttgcccaacgaatgaaccaggtacggcccacacccagcccaggcgcccacggctagggctggcggaaaacactggggagggccgaggggaaggggg

SEQ ID NO: 97069 - DNA, 2452 bp, Oryza sativa
  Clone ID: PAT_MRT4530_95108C.1
taggttgtcaaacatgaccatgaagatatggcgatcaactgtctctggtgagcaatgagcaatgtagcagaagctcttcacgacatcgaggaatgttctattggacaatctgtcagcagcattataattctgaagaacaagcagggctagtttttgcatctccatgtccacttgtcggtctagctcctcagctttctgcagatctggaccctcctattttgatcattaacgaagaaaaaacttttgttagaccaccagtattaaatagcacatagaaattaattgaaaacattgtacactgggtaataaatgtgtgataacgtgtgatgctatttgttactccctccatctacttttgatagtcatattttccaaatctaaaaattttatttttgataggcatatttcaattcaacaacctatcatcttaatgactttctcggatttaatacatgactctccattctttcacacaagattggctacatgggcatcgagaaatgtaaatattaatgaatcgcttgtttacgaagaatgattagtagcatgtttaaatggatggtaagtagaattacttatccttagtctgtgtgccaagatgaaatttgactataaaaagtagatggagggagtattacttgtgcaattactctggccgcgagtctgcagcagattgaagatgtgatctgctcaagctgagaatatcaaatcctggatccgccactggagacgctcatctgctcggtttggttcgaagatgtttgctgccgctaggaagaaggccgttaacgcgctcttgtgagtcacaccatatacctcaagatcgttctcggcataccacttgttgatgccatgccactcaagttggcagcgcctctggaaacacttgaaatcagcttttgccatgttgtgatagagatcattgttcacgagtggcagcctgtaaagcgacttaccgatccacacatctctgccggcgccatattgctccagatacattcttgtttcaacacgtggcagacttgctttccaggggaagtctagggcgtaaccaatctacgtgtcgacattgatcaatacaatcaatcgatctttggagaactctacaattttcttctggtttaaatactccgcttagtatatctcatatgtttgagaattggctgatgggggttgataaaaaaaactagcaaacttatttttgttgtagcatccgccaacagcatcagttgagaaataacagaaacatcagttgcctgttgcttacttggagagacactatagccatgcaaccggagtagacgaaaagccattgacccggtatcaatatccttcacagagctgtgccagttgtatgtcacgccttccttagtccaatgcctgaaggtgtattctaagcagtactcatcaatttcagttttgaagtagtaagatatgcctagccgctccaaccggtcgactgcccatacgcgctcaaatatttcgataggatagagaaatggtactcccccatggaatttgctaacaattccatcaaggaactcgagacatttcttgtcgcccgtttgcatcaaaacataggccgttgcagcgggtgaggataggaaggatccatctgaaagttggagcttgaggagcctcttccagtccaagcctcgcagtccctctatgctaagaagcaaacttgttggtagggagtgaagtatttctcttgggatcttcttaagctttagctccctttgggcatatatcttgtgcaaagcagggtcatcataagggatgtcaagagccaagtccttggctatctctaaaagtgaggggaaggtgatctcaaaaccaactggcatccatgcctcttcctcttgggccagcctccatatattttcccgaataaacgacaaacctttctcacgcttgtcaccatgaaccttccactccatcagcgcaatcacacaagctagggtgttgaggagcctatcatgaactagaaagcacaagtcatcaccccatgaaccatctggcagctgattgtgagagatccaatcaatggtcgaggggaattgtgggctgtcgctgccgttatgattcttcacaagtgcgacccacgcggtgtcataggcagaagcacttatctccccatcgcccattgtccttagcattactctgatggtattgaccatttcttccatgtcccgcggttcgtcctggataaatatgcaaatcatttctttttcttaattttctatatttttatgatgccgctacacgcgtcctacgtggcgctctccgccccaccagcccacctgcctgcgtggtttccccgccggccgccaccacaactcgtggtcgcaagccatggccgagccaagtcctgccgcctagtaccagccctagccgaacgagctcgcgttgactgggctgaaaaccaccctaccgtggacggggatggatc

SEQ ID NO: 97070 - DNA, 1644 bp, Oryza sativa
  Clone ID: PAT_MRT4530_95109C.1
atggagagctcagcagctgagaactggtgggtgctgccactgaccttcctcccgcccatctcagggcaaaatgagagcgctgccacactgtcagccatggccacgagcttcgtctacctcgcgatctttgcatgccttgcatgggcaggcactgctctgctctactgggctcacccgggtggccctgcatggggcaagtaccggagggcgagggggcagagcccgaggtgttcgatcccagggccgaaagggctcccggtcgtcggaagcctcggcctcatgtccgggctggcgcactgctcgctggccgccgaggcggcgcgccggccgggtgccaagaggctcatggcgctgtcgctcggcccggtacgcgcggtcgtcacgtcgcacccggacgtggccaaggagatcctcgacaacccggcgttcgccgaccggccgctcaaccacgccgcgtacggcctcatgttccaccgctccatcggcttcgcggagcacggcccgtactggcgcgcgctccggcgcgtcgccgcgggccacctgttcggcccgaggcaggtggacgcgttcgccccgtaccgcgcgcgcgtcgcggggggcgtggtcgccgcgctgcgcggcgcgggcggggaggccgcggtgcaggtgcgcggcgtcctccggcgcgcgtcgctctactacatcatgcggttcgtgttcggcaaggagtacgacgtgtcgcgcggcgcgccggagtccggggaggaggtggaggagctgctcgagatggtgcacgaagggtacgacctcctcgggaaggagaactggtgcgactacttcccggggctcgccgccgttgacccgcagggcgtcggagcacggtgcgccgagctcatgccacgggtgaaccgcttcgtgcgaggcatcatccaggagcaccgtggcaaggcgatcgccggaggagaggcacgtgacttcgtcgacatattgctctcgctgcaggagagcgaggggctcgccgacgccgacatcgccgccgtgctttgggagatgatctttcgaggaactgacgccatggccgtgctgatggagtggacactagctcgcgtcgtcctccaccccgacgtccaagccaacgtgcaccgtgagctcgacgcggtggtcgggcggagcaacacggtcgccgagtccgccgtgccgtcgctgccttacctgcaggcgctgctcaaggaggctctccggatgcacccgccgggcccgctcctctcgtggcgccacagggccatatccgacacctacgtcgacggccacctcgtcccggccggcaccaccgccatggtgaaccagtgggcgatgagccgcgacgccgacgtgtgggacgcgccgctcgagttccagccggagcggttcctccccggcggcaaggcgcacggcgtgtccgtgctcggcgccgacggccgcctcgtgccgttcgggtccggcaggaggagctgccccggcaagtcactggccatgacgaccgtgaccgcctggatggcaacgctgctgcacgagttcgagtggacgccggcgtccggcgccgtcgacttgtcggaggtgctccgcctgtcgtgcgagatggcagtgccgctcgaggtccgggtaagcgcacggcgaaatgtgtga

SEQ ID NO: 97071 - DNA, 123 bp, Oryza sativa
  Clone ID: PAT_MRT4530_9510C.1
atgaagctcacgaggttgttcccgaagttcgaatccttgagggatatactctccgttgaggagctcactaagagccgggtgagatccgaccttcacaaacttctcccggccaaccacaagtag

SEQ ID NO: 97072 - DNA, 2202 bp, Oryza sativa
  Clone ID: PAT_MRT4530_95110C.1
atgcctccgcctccgcctcgccgcgcgctcctcgcccccctcctccgcctccgcgccttctcctcctcctcctcctccctcgcccaccaccccccgttgccgcctcccccgcgccgccaccagttcgtcgccgccgacgccatcaccggccagggcggcggcggcaatccactggacccggcgcagctcctccgcgacgatccggtcgccataaccgcatcgctgtgggtctcctccttccgcccgcagccgaccgccgcagcgccaccgccgccgtcgctgtcgccgttcctgtcgcgcctcgagctctgggtgctcgcgtaccagaaggcctacgccgacgagacgggctcctacctgccccgctcctccatcccggcctccacgctctcctccctcctcgcgctccgcaacgccgtcctcgacgcccgcttccgcttcggcaaccgcctcacccccttcctccgctccccgcgcgccgccgccgcggcgcaggaccccgccacgctctccaagcgcaagctccgcgccctcctcaccaccccggggccggccccgttccaggaccgcgtcgtgcaggagctcctcctcctcctgctcgagcccgtctacgaggcgaggttctcacccaagtccttcgcctttcgccccggccgatctccgcacgccgccatccgcaccatccgccgcagcttcgcgccctacctctggtacatcaagggtgacctctccccgctcctccactccccggaccctgccctggtcgtcggcgcgcttatccgcgatgtgcgcgacaagaaggtcgttgatttggttcgttcggcattgctcaccccacctgtgaccgcgaggcccggcgatgaagatgcggcgaagaagaagaagaagaggaagtaccagaagaagaaggtgcttccagagggagagccgaagcctgacccctactggttacagacattctttgggtttgcgccggaggaggcactcacccagcctgattgggggcattgtggagtgctgagcccattgcttgccaatgtgtgcttagatgagcttgataaatggatggaggagaagattaaggaattgtacaggccgtccaagtcggatgttgtgggaggggaggatggagttgagcaggggaacacttcatggccagagtttgtccccacgagcggccctgacaaaacgaggaaggtggactacattcgattcggtggccatttcttaatcggggtgaggggtccgagggcagatgcagcagtgctccgaaaacagcttgttgaattctgcgaccagcggttcaggatcaagcttgacaacgagagcctcccgatcgagcatatcactaaagggatcatgttccttgatcatgtgctgtgtcgtcgtgttgtgtacccgactctccgttacacagccactggaggcaagatcatcagcgagaagggggttgggactctgctctctgtgacagccagtttgaagcagtgcatcaagcagttccggaagcttgagtttttaaagggggaccgtgaaccagacccacaaccgtgcttcaggatgttccatgccacacaagctcacacaaacgcgcagatgaataagctcttgctgacaatggcagaatggtatcgttatgctgataaccgcaagaaggttgtcaacttctgctcatacattataagggggtccttggcaaagttatatgctgccaaatacaaattgaggtcgagggcaaaggtctacaagattgcttcaaggaatcttagtcgaccattgaaggataagaaagggcagtcgccggagtaccacaatctgctgagaatgggtcttgtggactcaattgatggacttcagtatacacggatgtcgatggttcctgatcctgattacacaccattaccaagtggatggcgccctgaccatgaaaagattttgctggagtatataaagctcacagatcaacaaaccctggatgagcagcgaagctgcattagggaggaaggacttataactccacaggactacatttcaatgcttgtatggagctacaagaaaaatgcagttttactaccttcgttcaaagagaatgatcacaaaggatccacagaggacttgggttcagatacagatgaattgggtgatgaggaaataggaaatctggaccatgtcgattccccaaaggttgctgaaatgccatga

SEQ ID NO: 97073 - DNA, 456 bp, Oryza sativa
  unsure (1)..(456): unsure at all n locations
  Clone ID: PAT_MRT4530_95111C.1
gatcttctcacttatccttgtttgcgcctgttcatgatcgttcgtagctgcagatctggtttggtatcgcgagtcagctacctgcttaatcaaccatgggtaaggagaagacgcacatcaacattgtggtcattggccacgtcgactctggcaagtcgaccaccacgggccatctgatctacaagctgggaggtatcgacaagcgtgtgattgagaggttcgagaaggaagccgctgagatgaacaagaggtccttcangtccgcgtgggtgctcgacaagctcanggccgngcgtgngagaggtntcaccntcgntnttgccctgtggntgttcgngacccccttgttctnctgcncggtcntcgntgcccctggtncccgtgncttcntcttgatcttggtctcgggtccctccctggctggctgtgccgtgctcgtccttggcgtccccgctg

SEQ ID NO: 97074 - DNA, 380 bp, Oryza sativa
  Clone ID: PAT_MRT4530_95112C.1
gtttagtctaattcagttataagttggtagaagcctgtatcttcttttgtttgagtaaaggattacatgttcaattgcaagtagtaaaactcaattgttggattggtgcaggttgagattgtgatgggtctcgaggaggagttccacatcagcgtcgaagagtcaagtgcgcagtcaattgcaacggttgaagatgccgctgcactcatcgacaagcttgttgagcagaaatctgctgaagcgaaatcatcttgatatgcacaaatcacaatgttgaagctcgtaaactagctctacttctaccttgggccagcccttgttgttttaagattgtatccttatcgccttttttttttatgacttgatggtttggtgttctc

SEQ ID NO: 97075 - DNA, 3029 bp, Oryza sativa
  Clone ID: PAT_MRT4530_95113C.1
gtttagtttaattcagttataagttggtaaaagcctgtatcttcttttgtttgagtaaaggattacatgttcaattgcaagtagtaacactcaattgttggattggtgcagatggccgcaagccaggaaacctctctcctcctcccagtcgctgtcacgcgcttcgtgctcgccgccttccaccttcgtgctaccccccgccatggcttcctccctcgccggatccgccctctccttcgccacccccgtcaaggcagtcaagactaattcgatatctttcaccagcgcaaggaagggaaatgcatttctccgcctgcagccagtgcctatgagatttgctgtttgctgtgccgcaaaaaaggagacagtggagaaggtttgtgacattgttaagaagcaactcgctgttcctgagggcactgaagtttctggtgcatccaagttctcagatcttggtgctgattcactggacacggttgagattgtgatgggtctcgaggaggagttccacatcagcgtcgaagagtcaagtgcgcagtcaattgcaacggttgaagatgccgctgcactcatcgacaagcttgttgagcagaaatctgctgaagcgaaatcatcttgatatgcacaaatcacaatgttgaagctcgtaaactagctctacttctaccttgggccagcccttgttgttttaagattgtatccttatcgccttttttttttatgacttgatggtttggtgttctcaagattattgccctctgtgccgtaataatactaattaaagtatttaggccctctaacattaaaaaaggaaaaagaaaaaatcagaagttgttccggaagttcagcctgcaatggatgctatggagtatgctgaatgtgaagctactgtcaaaagctatcctccatttattgaagctatgaagagaagaggtgtagatgacatggaacttgtcatggtagatgcctggtgtgctggctactacagtgatgctgatgctcccagccgcagacttggcaagcctctaatcttttgcagaactgacagtgatagtcccatggagaatggttatgcacgtcctgtggaagggatccatgttattgttgatatgcagaataacgttgtcatagaatttgaagataggaagttggttcctctccccccaccagatcatctgagaaactacactcctggggaaacgagaggtggtgttgatcgaagtgatttgaaacctcttattatcaatcaacctgagggcccgagcttccgcattaacggatattttgtggaatggcagaagtggaacttccgtattggcttcacccctaaagagggtttggtcatctattctgttgcatatgttgatggcagccgtggacgtcggccgatagctcataggctcagctttgttgagatggttgttccttatggagatcccaatgaaccacattatcgcaagaatgcttttgatgctggagaagatggacttgggaagaatgctcattctcttaagaggggatgtgactgtttaggtttcataaagtattttgatgcacacttcacgaattttacgggtggtgtggaaacaattgagaattgtgtatgtttgcatgaggaagaccacggaatcctttggaaacaccaggattggagaactggtttagcagaagttaggaggtcaaggaggcttactgtttcatttatctgcacagttgccaactatgaatatggtttttactggcacttttatcaggatggcaagatagaagcagaagtaaaacttactggaattcttagtttgggagctctgatgcctggggaatcaagaaaatatggtacaaccattgctcctggtctgtatgcacctgttcaccaacacttttttgttgcccgtatggacatggctgttgattgtaaacctaacgaggctcataatcaggtggttgaggtaaatgtgaaagttgaaaatgcaggcacacataatgtgcacaacaacgctttctatgccgaggaaaaactactgaaatctgagctgcaagcaatgcgagattgtgacccttcatctgcacggcattggatcgtaaggaacacaagggctgttaatcgtactgggcagccaaccggctacaggctcgtgcctggttcaaactgtttgccgctggctctacccgaggcaaagtttctgaggagagcgggtttcctgaagcacaatctctgggtcacgcagtacaagagcgacgaggtgttccctggaggggagttccccaatcagaatccacgtatccacgagggcttagctacctgggtcaagaaggataggcccctggaggaaactgacattgttctctggtatgtgtttgggctcacccatatcccaaggctggaggactggcctgtcatgccagtggaacgcatcggcttcatgctcatgccacatgggttcttcaactgctcgccggcggtcgacgtgcctcccggctcctccgacgctgacatcaaggaagccgagtcgcccaaagccatccagaacggcctcatctcgaagctctgaagagctttccgctgctcttcgtttcgaagaaatgcaactgtggcatgtcactgctacgtatgcttctcgtcactatattgccccaaataaaagctactcccatggtgttattcctgtgttctgtactgttatgactttcctgctgcgctgtttgatttgtgaaatgtgtcctgttgcgccatttgatttgtgaacttgagccacgtctggtgaaatttgggatggctgacgttaatgcctgtattaataaaagcgcgtgttagacagcctaatcatataattaaaaaacaaaaatacaggatgaccatctcacctaccctctagtctcgtgtctggggctccctcttcgcttactcccctatgctctctttgtgtcttcattctctatttcctgtccctgtccaccggctaaattatctgccacatcttaatctgtacgtattatatcccgacgcagacctgttttactattgtctt

SEQ ID NO: 97076 - DNA, 1308 bp, Oryza sativa
  Clone ID: PAT_MRT4530_95114C.1
atgacggcggaaatggaagcgattgaatacaacaagacttggtcgttggctgatcttccacctggtcgccatgcgatcgggctgaaatgggtgctcaaggagaagagggacaagcaaaggccggtgtccaagcacaaggtgcatctcgtggtgaagggatacacgcaacggcaaggcatcgactacgacgagttgtttgctctggtggcacggctggactcggtgcgcatgctcatcgccctcgcggtgcacgaggggtgggagattcaccaaaatggacgtcaagtcggcgttcctcaatggggacctataggaagagacgtcctgctgccgtcgctcggtttcaagaggagttcatcggagcacgtcgtctatgtcaggcggaacagcaacgcgcaactggtggtcggggtctacgtcgatgacctcgtgatcaccggctccaactgcgacgacatcaggctgttcaagaagaagatggctgctgcattcaagacgagcgatctcggcctactgcactactacctcggcattgaggtgaagcagagcacgagtggaatttcgctcagccaaggagttgatgctgccaagatcccggagaagagcggcatggaagggtgcaatccatgtcaagtgcccatggaggcacggctgaagctgagcaagttcagctcggagccgtcggtcgacgcgacgatatatagaagcatcggtgagagcctgaggtacctggttaacacccgtcctgatctcgcttttgctgttgggtatgttagccgattcttggaagatccacgagaggaccatctcgctgttgtgaagcacatcctgcgctacgtggcaggaagcaaaaattggggagtttggttcagcaggaaggttgagaaggaggcgcacctgagggaagagcacgacaggggtgattttcttactcggcagcagcccaatcacctggcaatctatgaagcagaaggtgcgggcacagtcaagctagctgcattgtggcttgctcgttttctggtagaagtgcagggatcggcactgagaacaccgatgctgagggtggacaacaggtcttccatttccttgaccaaaaatccattactccatggacagagtaagcacattcaagtgaagaatcatctagtctgggaggctgcggaaaatggcctgatcaatgtggagttcatcaagagcgaggaacagctgggcgacattctgacaaagccgctgggcaagaccaagttccatgagctgtgctcaaagatcggcctcatcaacatcagtagtgagcacaacaaggcttag

SEQ ID NO: 97077 - DNA, 144 bp, Oryza sativa
  Clone ID: PAT_MRT4530_95115C.1
tcagccatctttcctagaatccatgtgaaggatccctatcagcgacttggaatcagcagggaagcatctgaagaagaaattcgagctgccaggaattttccttgttttccctactgaagaagggccaactctccaggtggccat

SEQ ID NO: 97078 - DNA, 390 bp, Oryza sativa
  Clone ID: PAT_MRT4530_95116C.1
atggtggatgaggcatgcgcctcggcctcatcctctgttgcagggttgggagaggtggatttggacctcggcaacgacgataggcgttgcgacaacgatgacttctgtgatttgggattccatcaagatgttgccggtaaagaatggatttcatatgcagataggcacccgccaatgaaaagttttcctcgaagcccggggggaggtgccttcaaccccatcgcatgtagtgagcaacaaccaagcagagggaagggacgtcgaggaggtgttggcgatagagggatgcaaggcagggaggccggaggcctcaccaccaaggggaaggccgctaccgtcggtgcccgcgaggctagccattgccgtggtgcccgcaagcctggccattga

SEQ ID NO: 97079 - DNA, 719 bp, Oryza sativa
  Clone ID: PAT_MRT4530_95117C.1
actgacccagaaccatatagcgacacagattcgatgcatggggcgtttaataacgctgcagagatgccagatgggagaaaacacccagcacatggtaactggatgcaatgatagccccactaacgttgccttcaacagaaggctcaagcttggaagataccccctacaaaggtgtgcgtctaacagctgaacagagaaaggaaaagatctccaggtacataaagaaaaggaacgaaaggaacttcagcaaaaaaataaagtacgcttgtagaaaaaccttggcggatagcaggcctcggggcccccggaaggtttgccaagaacgacgaactctgtgaagctaccagatcaagctcccaagattttgaccaatatgaacatgttgtgggaatgaagggagaagacatgcttgattcttccaatattttggcacatttgagtggaatgaacccttacggctataagtacaacagcactgtggaatcctggatataattctcataaacacacaaattaaagtgtgttttcctttcaattgtgcaagcattaaacacagttttcccttgctcccagtaaataagactgatgctttagaagctctattcgcaagagaagtgcttaggtcaagttattgtttctgcacactactgatttgtaaatagaattgtttccttgtcataatagagataacaagtttcaagattaaaaaaaaaaaaaaa

SEQ ID NO: 97080 - DNA, 510 bp, Oryza sativa
  unsure (1)..(510): unsure at all n locations
  Clone ID: PAT_MRT4530_95118C.1
gccgccaaaatggaattttctgtgngctgctgatcacctcggacttcagttcaggccggatgtattgttgaccccattattctatcggcctctcgaggtgtttcaagctccacaattctggaaccctacataccttgtctcgggccaaaccctccgatcccgctgatagttcaggtattcatcacggtggtacggaatcagatcggtagtccaggtaagaaagagcntcgttgctccccttcggcggtgtgccccggttgcttcctgcggtgtgtggtgccttccgtcgcgtgggctgttcccaggaggcagnggaaggcctgcggcggagaanaccggctgatgtgcttcttggccccacnaaaggctcccccctttatgacccggtcccaaaatnaacaggcccattttttaagccttttgttttgataatattatagggtaagtaaagctataattgggtaacatgaaagaattanaaaggggtcccaaaaaaaaaaaaaaaaaaaa

SEQ ID NO: 97081 - DNA, 1994 bp, Oryza sativa
  Clone ID: PAT_MRT4530_95119C.1
cgagtagcgaccgaggaggcgaggagcgacgcgccggcgccgtcgtcggtcgccctgccccccgccgccgcccgccgcccgcccggcgcatcccccgcgtccggcgcactcacgcgctaaccgccagcggccagccgggcgccgccgcgccggcagcagccagcagcgcgcccggccgcggcctcccctccagcagagcagcacggcagggcagcaggctcccactccagtccacacctccacggctccaccggccgacgaaggtttgaaacatgaagaaaaaaagtgctcccacaccccttccgccggagaccgccaacacctcgcccgctcccatcggcgccaccgccggaatccgggttgagaactgctacgtcttcaagagccggctgcaagagtatgcgcagaaagccggcctccagactccagagtatcatacctccaaggagggaccttcccatgagcctgtcttcaagtccacagtggtgattaataacaccagctatggctccctgcccggattctccaacagaaaggctgcagaacagtctgctgctgaagttgccctcatggaaattggcaagtccataccagccaacgcaaacatcccagctgttcaagagactgggctgtgcaagaatcttcttcaggagtatgcacagaagatgaattatgccattccatcttatatttgcaccaaatcagcctcaggcttagctcctttcatatgcactgtagagatttggtgggaatacaaatatattggtgctgcagccaggacaaagaaagatgcagagataaaagctgcccgaactgctcttctggcaatccaaggtcaatcagagggttcggcaaatggtgcaacaaaatatattgtagttcctggtaaaagggtaggtaaggaggtagagaaaaggccaattgaaacaccgaaaccacttaaagtaaagaaaggtggtttcaagaagaaatggaacaagaggaaattcatgaagaaggatggtcaagctgttgatgtggaaaaggatgaagctagagtggctggagatgctcacgattctgatgtcctaatgcagccaacagtaataacacaggaggcatcttgtggcactctgttcctgcaaccttgtgaggaagctaaaagagtagaagctgagccacctagagatattgaaatggtacagcctgataaggagaaccaacactgtgacgctgcattggtgcaacctgatgatgaagctagagtagaacaggagccatccagagatatttcagtggtgcctcctaatgaggaagctataagtggtaagcaggaaccatccatcgatgctgcaattctgcaacctaaagaggaagcttcaagtgtaaagcaggagccattcatcgatactgcaatgctgcaagcttgtaaggaagctggaagtgtagaacttgggccagccagagatactgtaatttcccaacttaatgagcaagatagggctgtaaagcaggagccagctggtgacactgcagtgccacaacctgacgtgcacgctagggtcgtaaaggaggagtcaccgagaacggaacctaatggggaagctacgaacatgaaggagacaccaaagaactctgcagtgtgtaattctccagagacaaaggattttggagatattacagcaatgggttcagatcctcccgcaactaatatgagcgaagaataagccgtggttgttgaatcaaaatgcaatagccttccagtgtcagtagtgtgttcacctgcagaggtgtgaaacctgaatggctggcttttccagtttaaaaagaggcagctggaataggaagatgtatgtgggctgagaatagttagttcatatttgtcattgttagctaggcatttgtatgcctgatgatatgaatgaaatgtattgcctgctgctttagtgagtattactttgaaaagaaggggaaaaaaaatgaaatcgaggtttctgatcaaaaaaaaaaaaaaa

SEQ ID NO: 97082 - DNA, 621 bp, Oryza sativa
  Clone ID: PAT_MRT4530_9511C.1
atggaaccttctgaacgaaattgttggttcccagaactcgtgcttctgaagctgctgctgccgtgggctccgcggatacggtggcccgctggtcagccacacgggcacacggccggggtggtgacatcttcgcgtagtgcgcatctctcgtggcgcacgtttgtgtccgagcccgcgcgggtggtcacaccggaaaggctattcgccaagtggacccggaaatcctcccctggcccacctgtcggtggcgttagagcatctcacgctttgcggagaggcatcggaagttcggaattcggagtggataacccggcaccgcgcatcggctgctcctctcaactcctcgacctcaacgacgacatcgactgtgacgggctccgggtggtggcggcggttggcgctagtgtttcacagatctgtgggatttttttttttgctaaaattctagtgagcacctgccagcaaaaattgaaaatgcccgattgtgaaaagcaattatatattgatatcgatgataaagtagatatacttaagaagaaacatcctcgctacaacatgattattagtactccatatgagcatagtgtatacagcaaaattatcacgttaagagacatttac

SEQ ID NO: 97083 - DNA, 1476 bp, Oryza sativa
  Clone ID: PAT_MRT4530_95120C.1
atggccggctggatctcctccaagctcaaggccgccgagaccctcctccaccaagcaagccccccccccccgatcgaccagcaggcggcggagtccctcggcaagtccccgtcggcctccgacctcaccgcgctgcacgcctcctcctcctcctccgccgccgacgccctcctcgacgccccgacgcggaggcagccgccggtcgccccgcctccctccctcggcctccgcctcgccgcgaggcgccccaacctgcctccgcctccggctcctgctcccgcttcccctgccccccgccgctccgcctccgcgactgcggttctcgctgcccaggatcgcgcggcgggtgctgctgtggggggcgtggccgaggctaaggtggggggagatcgggaggaggacaaaggcggcgggtcggagagcgggagcgggagcgatgaggacgactcggatgggtcgggcagcgacgactcggaggactcggaggaggagaggcggagggaggaggagaggaggcggcggcgggcggagcggctcgcggcaatggcggcgcgagcgatcgcggagagggaggaggcggtggcgaagctcgagggggagaaggccagccttgagaagctgctcgccgagcgcgagaaggagcaggcacaggaggcttcagagttgcagaatagcatgattgaaactatggaggctgtggagatggagaaacagcgacaccacagcactagaatggaagcccttgcacggttggctaagcttgaggttacaaatgcagagcttgcaaagtcacttgcgagggaacagtggaacctggatcttcaagttgatcaggtggcacaacttcgagaggaagttgatatgaagactcttactcaagataaatataagagaaagatagcaaagatgcagaagactagcccccttttggttaatgaaatagaatcgttgagaaggttcaagctggaagaagaaatgattgatgcagagtatgctctaacatgtgatagaatcgtcaacttgaaagacaaggacttatctttctttgtgcttttggtgataattgtgctgtgccttagcatggcaaggaagattaaagaaaacattgagctgacaaaaagaagaatggtgcatcctacagaagtggaaattgaactcaagaagagacttgatcaactcactgatcgtttaattcagaaacagatgcaggttgagtccctctcttcagagaaagcagccttgttactgagaatagaggcagtttccagatcgcttgacaataacggatcatcatcgttggcttattcgagctcctcgtcaaagatagatatcgaagctggtacatggcaagaatcacaccccccaaggttgcgtgacaggatacggaatgggacagcggcaactggggatcggcaatccgacagctgcgattccatgcttctccgctggccatatctgcgggtccccgagtcctaa

SEQ ID NO: 97084 - DNA, 499 bp, Oryza sativa
  Clone ID: PAT_MRT4530_95121C.1
tctcgccggtcaagctctcaaccaatgttctcggaacctctcagccatttttgtggtgctcgtgtcgatcttgctccatctttggtgatttctggtctggaatccaaactcaagtcactgaactcggtcaacacttcctcaaccaaggtttagctgctgttctcggtggactcggtagcctcggatcacgtggtattggtgacatcttcagctcactctcatcaagcattgccaccgctgttgctggtgcccaagtgctcttactggtgctctcggtggtcttcaactctcggatcacaaatccttgatgcctcaaaaccacacctgggaacacttcaagaacaactcgttggtcatggcctaaacgttcttggatcaatctctgaaaccatcaacacgttcatggttcactcgtcggtggtcgttaaatattgaggagtttttaaccgtcaatttaatgattaaaaaaatatattatctttaaaaaaaaaaaaaaaaa

SEQ ID NO: 97085 - DNA, 258 bp, Oryza sativa
  Clone ID: PAT_MRT4530_95122C.1
tgctgctgctccactcctctccgcgcctcctcctccgccaccgcctcctcctccccccgtccctgcgacctcctccccgccgcctccgcctccgccctccgcctccgccgctccgtcgccgtccgctgccgagcctggagctgtccacctcggcatgcctgagcctccccctgtgtgcgacgacggcgagtgtgagatggtccctgtggagctccgcacccctgacgctcttctccatctgacgagaaccccacccct

SEQ ID NO: 97086 - DNA, 241 bp, Oryza sativa
  Clone ID: PAT_MRT4530_95123C.1
gccaaaggaaccaatatttggaagacatcccccgctaacaaacccaaactgggtacgcccacgaaacccccccttttaccccaagccaaattaaggggcccttttttttaagcccccaaagtgggggcttcccccctttgggtagcacccccatttaagccccccaaaaatgatccgggccccaacaacctccggagccaggccccccgcaaagggctccccagggcccccaaagttgggc

SEQ ID NO: 97087 - DNA, 2184 bp, Oryza sativa
  Clone ID: PAT_MRT4530_95124C.1
agagattgagcgctaccttcttcatgctcagtcaagatcgccactagcacttccaaactattcatctgtgaggctaccttatggtgatccaagcatcaccgctgcaaagttttataccagtagccctacagctgcgacttctttggatgaggactatttttcatcattggccaccaaatacccatggttcctttcaatgaaagataaacatcagacttccacaggttctgccgacattcataagaccagaaatctctatgtaactggacatcttgatggaaccataaggttttgggatgcatcatgtcctcttttactgcagaatttaatgataaagcagcagaatgaagagaatagtccaagtggcacccctattacatcattacagtttgatatgtcatccagcattctaatctgtggggataggagtggaacggtccgtataatcacattcagaaaggactccagcgataacatattctcctttttacatgcgaagcaaggggagagctataatgtcagatgtataaagcttaaaggcgctgtaacctcaatctctttgatctcgaactcaaagcgtgttgctgttggaacagaaaaagggattgtatcagttgtcagcattgaagatgcatcgatcttgtatcaaaaacagcttgagtgtcgggtatctggtggaatcgcatctttgcaatttgaaatgtacagccataatggctacgacaaggatcttttgctagcacgaggggaagattcaactatatatattcttgaggaagaaactggaaaacttttgaataccaacccagttcagacaaacaaaccctcccgagccctattgatgcagacacttgaattatcaccagatgatccatcggtgtcagatacccacgatacagtatcgaaagaatcactgttattgctttgcactgaaaatgcaatccgcttattttccttgagccatgcaattcagggaacaaagaatataatcaataagaagaaaccaaatggtagttgctgttttgcatctcttatccacagtgtttcttctgaaactggacttctacttgtcttctccaatggcaaaatagagataagatccctcccagatttatctatattgaaggaagcctctttaagaggtttttcatatacaagaaacttgaattcttctagctccatagcatgttcatctgatggagaaatcatcttggttaatggagaggagacattttttttctctactctctgtcagaatgacatctacaggcatgtagacagcattaatacaatatacagaaaagacaactcgcccaggggaagaatcttcttatgtagtgaagtcccccaaaaaaaaaaaaaaagggcatattcggaatgattatgaaagatactaaagcaagcaaggggcaccagggcgatgcaaatggagatgaacaatttactgcaacaacttccgaagagctgtcttcaatattttcatgtgctaattttgctccagtatctgagaagaggaacagttcaataaaagatgacgagaacattgaactagatatagatgatatcaacattgatgataacccgcaaaagcagaaaggaccacacttcccaggtctaagcaaacagaaaatcagcaagggattccaaagcctaagagaaaagttgaagcccaggacagaagaaaaggtgaattcagggaatagaaaacctgaagacgacacatcagtcagtcaagttgaccagataaagatgaaatatggatatgcaaccaatgatgaccccacctagcctacccaaaatgcttgcgaacaagctgcacgcgacgacaaaaagttggagggcattaatattcgcgctggagatatggcccaatggtgctcaatccttctcggcaatgccaaacgaactgtctgcgaaacaccccaagaaccgagaaggccacattcgtagaaatggcaccatacactgtaccttcccctctgttcagttttgagtgttcctgttcattcagtgcagttcttctaccacatgaaataattctgttgtaaataatgattgagaatcacagccaagcaatttactggtgaatttctttcccagatgcgttggtagcatgtatagtaccacttgatagtcatcataaatgaactgtttttctgttaagaaaagaaaaaaaaaaaaaaa

SEQ ID NO: 97088 - DNA, 730 bp, Oryza sativa
  Clone ID: PAT_MRT4530_95125C.1
cccacgcgtccgttctcgcttcgccttctcctctccttgtccttgacctcccctgctccgccgcgccgcagagcgagcggccatgaccaaggtgcaccccaacgtcgcggtggtggcgccggcggtggtggaggaggagaagggggaggcggtgtcgctgacggtgtggcggcggtcgctgctgttcaacgggaaggggttcacggtgttcgacggcaaggggaacctcgtgttccgcgtcgagagctacgccggggggtcgccgagggaggtcgtgctcatggacgccgacggccgcgccctcctcaccatccgccgcaagaagctgagcttcgcggacgagtggctcatctacgacggcgacgcggcgtcgccggcggcgccggggccgaagaggttcacggcgcggcgccacgtcagcctgcgccccaccaagtccctcgcccacctgtcgccggcgcgcgcgtcgtcgtccgccgccgccggcggcggatcggcgaccgcgccgagcggcgcctgccggtacgacgtggagggctcgtacgccgcccgctgcctcgacgtgttcgcctccgccagcgccggcgagcagcggcggcgcgtggcggcggtgtgcagtaaggaggccgccgtgggcccggacgtgttccggctggtggtggagccgggcttcgagccggcgctcgccatggccgtcgtcatcctcctcgaccagatgcacgcctcgtga

SEQ ID NO: 97089 - DNA, 155 bp, Oryza sativa
  Clone ID: PAT_MRT4530_95126C.1
ggagaccacaccagttcgcacaaatcccctagatcgagcaaaacaaatcgagcacgccatagacagtgaggagaacgagaaaaagaagaagaagcaaattcttaccaagaacattgaggtcaagaagttgaaatcaacaagacataatcttccag

SEQ ID NO: 97090 - DNA, 294 bp, Oryza sativa
  Clone ID: PAT_MRT4530_95127C.1
atggagatgaaggagtcaagggtggcaagcttcgtcgaccgattgcgccatcgccactgtgcaccaagccccgtggctagatgtgccagccgctcctgccatcacccctctaagcgcagctgcgcgtctgtgcctgcccctgcccgctcccggcatcagccaactgcgcccatcccgctctcgccgttggccaccactaagaacaataacaagtcaatctctgaatgtgtgtctactgcttctgtatggattactgctcacatcgctgcattgctctgctcgggtgatagttga

SEQ ID NO: 97091 - DNA, 1521 bp, Oryza sativa
  Clone ID: PAT_MRT4530_95128C.1
gtatatacccaatcaaatccttttcctccaaatctcgccaaattcttcgagcgagacacgtataaactctcactcgctcactcacacctcacacgctgctgctgctgcttctcgatgaggaatattttttttgcttcggccaaggcaacgctaatatcgcacgaggttcccgtcgaaccgaccccaggcccggccgggagctgctcagccccggtacttgagcctctcttccttccccttcctcttcccatcgcgatacctcctccttcccgtcgaaccctctccagtctccactccactgaatcctcccacctcggctcgaaggaatggcaagcggtagtgaagctgagaagtcacctgaggttgtgctggagtggcctaagaaggacaagaagaggcttctacatgctgtttaccgtgttggagatttggatcgcaccattaaatgttacacagaatgctttggaatgaaattactgaggaaaagagatgtgcctgaagagaaatatacgaatgcatttcttgggtttggacctgaggacaccaactttgcacttgaattgacatacaattatggtgttgataagtacgacattggagcaggatttgggcatttcgctattgcaactgaggacgtgtacaaattggctgagaaaattaaatccagttgttgctgcaagatcactcgtgaacctggtcctgtcaagggaggatccactgtgattgcctttgcacaggatcctgacggttacatgtttgagcttatccagaggggtccaacacctgagcctctttgccaagttatgcttcgtgtgggtgaccttgatcgctccatcaagttctacgagaaggcccttggtatgaagctgctgaggaagaaggatgtacctgactataagtataccattgccatgttgggctatgctgatgaggataagacaactgttattgagttgacatacaactatggtgtcacagaatataccaagggcaacgcatatgctcaggttgctattggcactgaagatgtctacaagagtgctgaggctgttgagttggttacaaaagaactagggggaaagattttgcggcagccaggtccactaccagggctcaacacaaagattgcctctttccttgaccctgatggctggaaagtggttttggttgataacgccgacttcctgaaggaactccagtgaagatgagagatggcccaagttctgtgctaggaggcaaagccacaaaccttatgtagtaatgccagtgcaatgtaataaagaagcggtttccgctctatgaacaagaataaattctggcacatgcgttgtgcttatgctagtactgtctgggtttggctgtaaatccgctatgcattgctacctgtatcagcatgactgttggagtgttgttgataacaaggaccagtttgtgcagttgagctgagtttcctgataaaaaaaaaaaaaaaaaaaaaaaaaaaaaaaaaaaaaaaagaaaaaaaaaaaaaaaaaagcggcc

SEQ ID NO: 97092 - DNA, 132 bp, Oryza sativa
  Clone ID: PAT_MRT4530_95129C.1
atggggcgcgaaaaaatgctgaaaaccagaaagaggaaggatttgcgacgcaaggcattcaagagacaaatcgggactgtgcaagtgcgtggactttacattcttcagatagggcaagatgattgcagctag

SEQ ID NO: 97093 - DNA, 399 bp, Oryza sativa
  Clone ID: PAT_MRT4530_9512C.1
ggtgtttttttttttttttttttttttttttttttttgaattaaaacaattcataagcttaaccaccaagcaaaaaatacacaagcttagatttcatttccaggggaaggggaaaaatgtgccatccagaataaggaaaagttacagcagggacatatatagatcttccactccaaatacagaaacagaaacaccgcgacctgagacagggacgggcaggccgcgaaggcccggggccagaggacaacggcagtatcactccatgtaccactgcaaaaactgacgggggaaatcccttgtgaaagggccgaagcggaaacgtctcggggccttggcctctgcacgagcctggattttgatacaacatcctaattccactttacctttaacagtgaagga

SEQ ID NO: 97094 - DNA, 342 bp, Oryza sativa
  Clone ID: PAT_MRT4530_95130C.1
atggagaagatgccctggcctgcaactgggccgagccgccgttggtccggtccacgttctgattgccagtttgccaccaactccaactccatatggcacgtggggcccaccacgcccgtggagacccaggcccacaagtcaggcagcaattttgacccgcctaccgccgctgcggcggctatctctgcgaggcggtccggtcccacccgtcagagagacgtcctgatcgcggcagttcctgtttatgggggagggagggagagagggagggattgggtggaggcgaaccaggaatcgtcctggcggtgtgatgtctggatgaattggattggcagcgtcttt

SEQ ID NO: 97095 - DNA, 186 bp, Oryza sativa
  Clone ID: PAT_MRT4530_95131C.1
atggctgccaattggagtgcctactactcctatgatcttattctagctaagctttctgcagagacaatgtggataactcaggatgtcagtgtatacatgtacctaactcgtaccgtaggacaggggaacttgcagcaggcacctttagctttgaccaagatgatcgatcatcatgtaaccgtatga

SEQ ID NO: 97096 - DNA, 546 bp, Oryza sativa
  Clone ID: PAT_MRT4530_95132C.1
gaaagggtagaatctgcggtgactgacttgaaaaaggaatttggagagcaacatgtgtggggaattgtctgtgatgttagggaaggaaaggatgtaaaggcactagttgattttgcacgtgacaagatgaagtatattgatatttggatcaacaatgctggatcaaatgcatatagttacaaaccgttggtcgagacctccgacgaggctctcatggaagtgatcacaactaacactcttggattaatgatatgttgtcgtgaggcaataaatatgatgagaaaccaacctcgaggtggccacatatttaacatcgatggtgctggttctgatggaaggccaaccccaaggtttgctgcatatggtgcaacgaagagaagtgtggtgcaccttacaaaatctctgcaggccgagttgcagatgaatgaagtgaacaatgttatggtgcacaatttgccgcctggcatggatacaacagatctttttatgcctggtgccacaacaaagcaggccaaattttcatcaatatattagcttgacctgcta

SEQ ID NO: 97097 - DNA, 108 bp, Oryza sativa
  Clone ID: PAT_MRT4530_95133C.1
cgtccgaatccgggtcgcccacgcgtcgcacacagcagctcggctaccactcagctcagagcacctagcaaataagctgacgatgcaaggcgcaagcggctgtcgcgg

SEQ ID NO: 97098 - DNA, 439 bp, Oryza sativa
  Clone ID: PAT_MRT4530_95134C.1
cccacgcgttcgcccacgcgtccgagcacccacccaccgcgccggcggtgaggccatcacctcctcctactgcacgtgcgccgagggcgtggtcgccggagccggaagggtggatgacgtggcggagctgcgactactgcggggaggcggcggcagcgctgcactgcaaggcggacacagcgaggctgtgcgtggcgtgcgaccgccacgtgcacggtgcgaacgcgctgtcgcggcgccacgtgcgggcgccgttctgcgcccggtgcgaggcgcgccccgcggcggcgcgtgtcgccgccgtcgctggagctggaggatgcggcggcggcggggaggccaggttactttgcgccgggtgcgccgacgacgacagtgcggatgcggcgagggtgcccgcggtggggttttccagatgccccagggcccgccgagctcg

SEQ ID NO: 97099 - DNA, 1671 bp, Oryza sativa
  Clone ID: PAT_MRT4530_95135C.1
atggcggccaccgccgcctacctcccgctccgtgcccaggcgcaggtgggcctggctccgctccggccgtcgggctcggccgctgctggggcgcggttgcccggccggacggcgcggcgccggcttgcggcgagaggcgggccggaggctgccggtatccgcgcggaggctgtccctggtggtggaggggtcgcgcggagggcggccatggtgcccccgtataatgttctaatcaccggttccacgaaaggtataggatatgctctggcaaaggaatttttgaaggctggcgataatgttgtaatctgctcaagatcagctgaaagggtagaatctgcggtgactgacttgaaaaaggaatttggagagcaacatgtgtggggaattgtctgtgatgttagggaaggaaaggatgtaaaggcactagttgattttgcacgtgacaagatgaagtatattgatatttggaaccataagaaggcaggattttctccttatctttgtgttcctttggcacagatcaacaatgctggatcaaatgcatatagttacaaaccgttggtcgagacctccgacgaggctctcatggaagtgatcacaactaacactcttggattaatgatatgttgtcgtgaggcaataaatatgatgagaaaccaacctcgaggtggccacatatttaacatcgatggtgctggttctgatggaaggccaaccccaaggtttgctgcatatggtgcaacgaagagaagtgtggtgcaccttacaaaatctctgcaggccgagttgcagatgaatgaagtgaacaatgttatggtgcacaatttgtcgcctggcatggttacaacagatcttcttatgtctggtgccacaacaaagcaggccaaatttttcatcaatatattagctgaacctgctaatgtggttgcggattatctcgttccaaacatcagagcaatacctactaaccagtccatgaaaccaacctacatccgttttctcacaggcttgaaagcctactccagaatattttcaaggattgcttttggtgctcgtaggaacaaaataatgtccaacagccagccagcacaagaggatgattgcatgtcgagcattctggtttctcgccttatccgggctatgcagccaacaaggagttaccttcgatggtctgatgatctccataagatgtttgtggaggctgtggcctaccatggaggtccctatgaagctaaaccaactgcagtgaaggagacaatgcaagctatgggtgtcacaagccttacgacccacaacatcaagagtcacctccagaagtacagggagagtttcagttcaggtgttgggtctcttcatgatcatgatctgctgagaaccacttctccaagcaaggaagcacttgatctggcatctgagatggttagggacaacgatgccgctatggctgaaatcgagatgttgaacgatttgctgttggatcacgatatagagatggtagagaccagtttctctgtggacgatttgcagatgatggagagggagctgatgagtgaaatcaagctgatcgagcacaacttcgagatatctgagagtgctcttgatgagtacatggatgacttggccaactacgcatttgaccttacgggtcctgcaaactcttctagtccatga

SEQ ID NO: 97100 - DNA, 116 bp, Oryza sativa
  Clone ID: PAT_MRT4530_95136C.1
gcgggtggctcctaccacattctgctcctcgcggtcaagcggcctcttaagatgggctcatccctatgattcctcctaactactatccttccgcactcaccctgtttcttccccgt

SEQ ID NO: 97101 - DNA, 1491 bp, Oryza sativa
  Clone ID: PAT_MRT4530_95137C.1
ccggccgggctctaacattgatcagtacacacatgtcttgttcttgtactgctactaatcttgtataggaggaggactgcagttgcagacttgtagagcccaagagaggagaggagattccaagagaagagatgagatcccacgagatgaacaactcttcttctcgttatgcgtcagaggaggagcgcggcagcaacagcttcctcatcgagagcgaggaggaggaggaggacgaggaagcccacccccactcctccatcctcctcaaggatgccgactccgactccgactccgacgactcctcctgcgctaccccgcgcccaagctcctacgccacccaccaatggccgcaaagctacaggcaatcaatcgacatttatagtagcgtgcagtctcccaacctgagctttttgggaactccaactctaagcaggctctccaactcattcctcaccaactcttttcgtggcaaaacccctgaaattctctctaatcttgtcaagccacttctacgcccatcatcttcaagcgacgaccagcagcagcagcagcagcatgacgatgatacccgtaagagttcccagtacctgcttccctcaagaaaaccgtctttgcaacagatcccggaggatcaaaaaccattggtgccggctcatgaggtgccggcttatcaacaatgctcctacacccaggcagtgatgaatggaataaatgttctgtgtggtgtggggatcctatcgactccatatgccattaaacagggaggctggcttggactggtgatactttgcttatttgctgtgctcgcttggtacaccggagtgctccttcgacgttgtctggacagcaaggagggtcttgagacataccctgatattggtcatgccgcctttggcaccactggacgttatgcaaaaatgactgctcttgtgctaaccctttttccttgtatgtggctccactatctacagataatcctgtacatcgaactgtatgcctgttgcattgagtatttgatattggagagcgacaatttgtcaaagttattccccaatgcacatctaaccattgggagcatgacactaaactctcatgtgttcttcgcaatcttgaccaccctcatagtcatgccaaccacttggctccgcgaccttagctgtctgagttatctttcagctgggggtgtcattgcatcaatccttgtagttgtctgcctatgctgggttggggttgttgaccatgttggttttgagaacaaagggactgcactgaatctcccaggaattcccatcgcaattggactgtatggttattgctactcaggacatggtgtgttcccgaacatctattcttctctgaagaatcgcaaccagtttccttctattcttttcacttggtaagggttgtcctcaattgggttggccggtgctggtgtgatgggatataagatgttgggtgagtccactgaatctcagttcacgctgaacttac

SEQ ID NO: 97102 - DNA, 568 bp, Oryza sativa
  Clone ID: PAT_MRT4530_95138C.1
atggggagggtggagcgcatgccaaatgaggatctatcagcaatgggacggggcctccactttagcatctccaccctgctccttttagaggaccgcctttcattgcattcagctgtgatggtagcacgaacacaggtgcaccgaggacgaggagagcaggagccttgtgctctctctgcatctgaggcaggacagcacagggtacggagcactgaagaagcatcggtagggaatccagaaggagcgttcatgaaggtgttacaagcccggaagaactacacaagcactgagctgattgttgagccagaggagccctcagacagcagtggcatcaacttgtcaggctttgggagtgagcagctagacaccaatgacgagagtgattttatcagtacactaagttacatcttgccttatttctcagcggtaaacctagatgtgaaatcactgttactaccgttaattaaactgccaacctcgtgccgaattcctgcagcccgggggatccactagttctagagcggccgccaccgcggtggagctccagcttttgttccctttagtgagg

SEQ ID NO: 97103 - DNA, 324 bp, Oryza sativa
  Clone ID: PAT_MRT4530_95139C.1
acgagtcttttggaacttcttgggacccttaagggaagtaaggaacggcccaatggacggggttccccaacaagtggcctcaattggaattggggttttaagttcgccaagccggcccctttttaaaaaggggccccaaacgcatccgggaagcgccaaaccaaggggccccaaagggttttggccccccccctttccaagggtttaaaaaaagggcgcccccattgattaagggggtttttttttttgtttttccaagctctggaaatgacttgctccaggtgaccacatgacaaagagggtagctaacaaaaaaaaaaaaaa

SEQ ID NO: 97104 - DNA, 177 bp, Oryza sativa
  unsure (1)..(177): unsure at all n locations
  Clone ID: PAT_MRT4530_9513C.1
ccggccagagagggaaacggcaccgagcacacgccgcgggcagcggacccaccgaaggagggacaggaacccaaagcacggggccaaggagaacgcggcaaaaacgaagaagacggacaggaagaacaaggaanggaggaagggcacgcaacacacgggagacgcacgacacccaca

SEQ ID NO: 97105 - DNA, 432 bp, Oryza sativa
  Clone ID: PAT_MRT4530_95140C.1
tcggttacctttctagaataaattttcttgaattgatttgactaacctgataattcattctaatttgaccaaagactgcaccacggctgtgccgcgggaggtacacaactgaatttattttttggtaccgaccattttctgataggcaacatttgaagttgcagtatctgcattattaaagcgatcaactatgtttcagaactcattatctaaaagctatctttcagaactgttattaggacttcttggaccttactggactgtaaggtgctttggattaatcgccacttcatttagtggatcatttcatccctgatttttggacactactgaactgctatcttgctaagtgctttggaattatgctggtcatttcattcaatctcatgaataaatggctgcattgagtactaggttgtgctttaaaaccca

SEQ ID NO: 97106 - DNA, 890 bp, Oryza sativa
  Clone ID: PAT_MRT4530_95141C.1
ttttttttttttttttcttcttacatatgtcaggcacaaggccttgcattgggtgtcaatgagaaagacaactaccaatgaacaatacttttcactgggccggccatgtttattaggaggagaaactggtacgagctcagcagcaaggcgctgaggattacaacataaccacccatttgcctgggggtacctgatcccggcaacaatgatgagctaccaattacaattaaagtaatctacaaaggttaccaatgaaaagattacatcaatgatgcaaaagacagcatctttgcttctaatttttcattagacgggagataaatattcttccttgaagtatattggatcaaacaacaaagtttatgattgacaatcccataaataaacttacatggtgttctgaaatctactctaatcagagtaaatttcacaaaaaaccacattttgcggtcaaagttgcataaacctccggatattatgactcgaggcacataaccctatgctctataacctagaagtatcataaaatccatcctagttcaaatttcagctaattttaccatccttgacataataatgttcaaaacgttgactgattaaactggtcatcctgatcaagtaaccaacatttgaacaatacatagtggtttatggcatgaaaaatgaagtgaatatgtgtcaacaagttgttttttttatgatttgagtgaatgctaggtttgcgaaaccttgataccataatgacatagggttatatgctacatgccataatatccggagcattatgcaattaagaccacaaaacacagaagtgttctgaaatttactctaataaatatatctaccaagaatatttcaagtggagcccggacaattgctggccatccttt

SEQ ID NO: 97107 - DNA, 1353 bp, Oryza sativa
  Clone ID: PAT_MRT4530_95142C.1
atggcttcgataagaaaggttggcggtataggcatcgaggaggagacgagcaagaacatcatgggtatggagtccgatgatgaatttaatgagttcgtaatgaacgaattgattgatccctcttcgtcggctctgcagcttgctcttcggtttggtgctgcgcttatgatcattgaggaatcagtaaataatccgggtcgaattggatctgttcagggacatgaggtagtgcatcgggatagactattgtggcacaatcttctttacaaagactatttctcagataatccaacgtttggaccaaacatctttagacgcaggtttcggatgaggcttcatgtatttcttcgcataatgaaagctgttgaggaacatgacgattattttaagcagaagaggaatgcagccggtgtgctcggattatcttgtctgcagaaggtagtagcggctttccgtatgttggcttatggagtaccagctgatgctttggacgagtacattcgtattggtgagagcaccgctctagaagctttgagaaagtttgttgcagcagttgttgaggtttttgggccagagtacatgaggaagcctaatgaacaggatgctgctaggttacttacaattggagcgagcagaggatttcctggtatgctaggttccatagattgtatgcattggagctggaagaattgtcctactgcatggcacgggatgtataggggctataaaaaggagcctacaattatactggaagcagttgcatctaaagttctgtggatatggcatgcattctttggcatgccaggttcacacaatgacattaatgtgcttcaacgatcagatatatttgcaaggctcgctgagggagaaggtccacaagttaattttgacatcaatggtcatgaatattcgatgggttattatcttgcagatgggatatatccatcgtgggcaacttttgtgaagaccattccagagccacaaggtaataagaaaaaatactttgcaaaggcacgagaagcttgtcgaaaggatgttgaaagggcatttggggttctacaatcttgctttgcaattgttcgtggggcggctcgtatgtgggatgaagacacgctccatgatataatgatggcttgcatcattatgcataacatgattgttgaagatgagcgagatgactacgaatacaacttcaacaataaaggccaatatgtttgcaattcagggcgtgacacacctgaactataagctttcattcagaattacaaaaaaaaaatgaagaacaaggaaacccacactcagcttcaggtagacctcatcgagcacttgtggcaaaaccatggagatttatat

SEQ ID NO: 97108 - DNA, 269 bp, Oryza sativa
  Clone ID: PAT_MRT4530_95143C.1
ggtggtttttaaattttggggggttaaaaaacacctagctattgaccaaaaaactgatcacccggggtcctattggagcataacccatgtaataatacatactggccaatggttttttcccacaccttgtacagctgcgtgctcatatacaaagacaaaactaactggttgaacactcaccggttgtcaccctggtgcgagtttaccaaccaactaaaacatttatactacttgtagcactctggtaactggatgatcaatctatcggc

SEQ ID NO: 97109 - DNA, 658 bp, Oryza sativa
  Clone ID: PAT_MRT4530_95144C.1
ccggccgggatccccccgcacccatctcgccgtcctcctcctcacctcacctcgccccggatcccccatccacctcgcgacctctcctctcccctccccggcgcttcacccacggcgatggcgtcgaggctggcgcagctacggtccaaggcggcgcaggcgtcggagctcgtgtcgaagcacgggtgcgcctactacaaggaggtgatggagaagaacaagcagcacgtggtgcagccacccaccgtggagaagtgccaggagctctccaagcagctcttctacacccgcctcgccagtttgccaggccgctatgaggcattttggaaggaatttgatggtgtcaagcaggcgagattgttggcagaggattcaccataaccggctataaggtctagaagagttctgattaagacctggtttataaaatacactgttagctgatgcttgtcgaaatgacaaagatacctcctgccttttcacaattttgtttatggaaagtctttctagtgctggatgtcagccaagacgagcacatcgttgcaacactgcttcaataatttgctcgatctctcgattgccattttggtgtcctgtaatgtgaaatactgaaattccatcttgccccaccaaaaaaaaaaaaaaaaaacccgcggcc

SEQ ID NO: 97110 - DNA, 1373 bp, Oryza sativa
  Clone ID: PAT_MRT4530_95145C.1
aaaacctcattacccataaattcgagctcccaaacccaccaaagccccacctccaaccccctaattcaacacgaggaggagagggttgcgacgctgctagggatcgcggaggagtgcgacacggaggaggagctccggctgctgctgcgggggaatccccaccccgtctgctacgacagcttcctgccctgcgaccgcatgaccattgcccaggtgagtgtgcttgcttgcttaattgcgtgttcaatctcccgggtgatcttattgttatcacctattcacctattcacctggcagggtgttttgaaagcaatacatgtgagaaaaatggtagaagctggatgcagagtaaaaatctggatagatgattggtctgccttcctgaacaacaagctgggaggtgacatggaaaaaatccagactgttggccgctacatgatagaggtctggaaatccattggtatgaaccatgatggggtagaatttctttgttcatcggctgagatcaatagtcgggcagatgaatattggccacgtgtcatgggtattagcacacaccgcaagattggagttgtgaggcatatgtttcaaattatgggtcaaagggagctcagggaatgcaaaaagcctactgcccagttcttcaacccttgcatgcagtgtgctggcatattcttcctagaggcagacatttgtcagatgggcatggatcagcatgaggtcaacaagctagcaacaacgtattctgataacagacaggaaaagaagccaattattctgtcacactacttgctccctggcttgaaagggcagaacaagatgtctgctagtgatccagcatcagccatcttcatggatgatgagaaggctgagatagatttaaagataaaacaggctttctgccctccaaagattgtcaagggaaatccatgtattgagtacataaaatacatcatttttccttggtttggcaaatttgaggtggtccggaaggctaaaaatggtggaaacaagacatttatgagcgtggaagaactagtcatggactatgagagtggttccttgcatcctgctgatgtaaagcctgctctgaaagaagcaataaaccaaatattgaaacctgtccgtgagcactttgaaaacaacaaggaagccaaattcttgcgtgatacagttaaggtaatatcttgtccactctatttgacattaaatcagaatcacacttttttatttgtaatttttgatcattcgtcttattcaaaaaattttgaaattattatttgttttgtttgtgatttgctttattatcaaaagtattttaagtacaacttattcttttttatatttgcacggcaacgcatatgctcaggttt

SEQ ID NO: 97111 - DNA, 1100 bp, Oryza sativa
  Clone ID: PAT_MRT4530_95146C.1
atgatgctttccttcacctctgctcgtctcctccctcgttgccggcgtctctacagtgcctgcggcgccggcgcagctgcgtgcggcgtcgtcggcgagagggtgaccgtgctgaccatcgacggcggcggcatccgaggcgtcatcccgggcacggtgctcgcgttcctggagggcgagctccagcggctggatggcccgggcgcgaggctcgccgactacttcgatgctggctcatcaccggcgggctcatcaccgcgatgctggccgcgcccggcgaaggggcggacagggacgggcggcggcggcggcggccgatgttcgccgccgcggacattaccccgttctacctcgagcacggcccacgcatcttcccgcagcggtggagcacgctcgccgccaagatcgccgccgcgcgggggcccaagtatgatggccggtatctccgtggcgtggtccggaggatggctcggcgagacgacggtgggcgacacgctcaccaatggcggcggccccacctgcgacggccgccggcgccagcccggcagcggcgccacagacgagggaccgggacacccggcgggacagggggaaaaccgggacgcgcgcggacgcgcacgcaccacggggagaccccgggaccccccccgggccggcccctcgtgtccggggacacgggacgggcccccggacgacacccggggggggacccacaccgggacgacacacgaacacgggacacgggacgggacacccacggaccccgggcccggaccggacgcgacgacacacacacacggcaaccgggacaacaaccggggcgacacaccacccgcaacgggacggacacgggggaccgaaacggacaccgacacacgaacggacggggacaacggggggggaaccgggggacaacggggggaaacaaccgaaaaaccgcgggggacccaggggaaaaaccaaacaaacggaaaaccggcggggcggggggggggggggggcgacagggcgccaacgaccggggggcaacgccgccacccggacggcgggggggcggggaccacccgggccggggcgggccccggggggcccggggcccc

SEQ ID NO: 97112 - DNA, 1517 bp, Oryza sativa
  Clone ID: PAT_MRT4530_95147C.1
gttgtatcggcttttttttttgtttttttggttatttcaagagaacaaatttttgacaatttgtcgggtggggcaagatggaatttcagtatttcacattacaggacaccaaaatggcaatcgagagatcgagcaaattattgaagcagtgttgcaacgatgtgctcgtcttggctgacatccagcactagaaagactttccataaacaaaattgtgaaaaggcaggaggtatctttgtcatttcgacaagcatcagctaacagtgtattttataaaccaggtcttaatcagaactcttctagaccttatagccggttatggtgaatcctctgccaacaatctcgcctacgcagaaccacgcataaagctcaactccaaataatgtcacaattccaaggtcctctaccttgagctcctttctattcttccatacctgcttgacaccatcaaattccttccaaaatgcctcatagcggcctggcaaactggcgaggcgggtgtagaagagctgcttggagagctcctggcacttctccacggtgggtggctgcaccacgtgctgcttgttcttctccatcacctccttgtagtaggcgcacccgtgcttcgacacgagctccgacgcctgcgccgccttggaccgtagctgcgccagcctcgacgccatcgccgtgggtgaagcgccggggaggggagaggagaggtcgcgaggtggatgggggatccggggcgaggtgaggtgaggaggaggagggcggcgagctgccgccagaagattgcagattatagattccacatcttcacctgaatacccagcctgtgtaattgcagttgcatcagcaatcacaaatggaacatcggcaaatcgagctaaagtttttgctaacagtgttttacctgaccctgtcggcccaatcagaaggatgttacttttttcaagctcaatgtcatcatcaccactcatactaacatcgccacatgccgagctcttcatagaacaatttgaagattcactgtatatcctcttgtagtgattgtgcacggcaacacagagcaccttcttggccttgtcctggccgacgacgaactcgtccaggcccctgcggatctccttaggcgtcgggaaccgacgcggcgacgaggaatggtagccagtgaaagtaaatcctctaccaacgatctcaccaacgcagaaccacgcgtacaactcaatgccaaaaagtgcagcaacgccagcatgctcaacgttcagatcctttctgtttctccacaagttcttcacttgatccgcttccttccagaatgcctcatagcgaccaggaaggctggcgaggcgggtgtagaagagctgcttggagagctcctggcacctctcgatggtgggcgggtcggcgacgtacttctggttcttctccatgagcgccctgtggtacgcgcacccgtgcttcgccgcgaacctcgccgcgtcgcacgccttcgcctgcatctgtgccagcttcgacgccagcgccgccat

SEQ ID NO: 97113 - DNA, 390 bp, Oryza sativa
  Clone ID: PAT_MRT4530_95148C.1
atggccgccgtgaccttcaacggcatcggcagtagagcaagtgccggtggcatggcggatctggcacgacacgggccgagcagaaccgttggcagcggatctggcatggcacggcacgagcagacctggcggcggcggcggcaaagacttcaagatggtggcgaggtgctcctaccgcttgtggagctcgcggcgggcgttgcgcccgacgctgccaccgccagattcgccggtcgtgcccaccgctgccaccggacagggcgagttgtggtggtggagagagatggggaaaaagaggagaggatgaaggaagaagatgaatatgacatgtgggtcccacgtgctgatgaggaagaaaataaaaaacagacggcagtggcacgcttctaa

SEQ ID NO: 97114 - DNA, 228 bp, Oryza sativa
  Clone ID: PAT_MRT4530_95149C.1
tggtcactgtgtgcacagtgacttgtcacgcgtgtgacactcagcagccagggaactgacatgcgccatgaataacaccaatgacgcactgtgcatgagccactactaacactgcccgcacaaggcgtctaatgctctctctaatctgcatgacgatgagcatatgtgctaactatgatgaggataaggatgtgcctatttggaatgcatctgatgtataggatgctg

SEQ ID NO: 97115 - DNA, 327 bp, Oryza sativa
  Clone ID: PAT_MRT4530_9514C.1
atgggggagagcaagtgggggggcatggggagggacgagccgcttagcggtgaccttatcagtgaactccgcctctcctcgtcgcttccatcgagggatctattcgggccagaccgctgtcacctcttcaccgcaggactcctctcccgcctcgtcctgcctagcctcctccacacacgacagatgggaggcaagagaggtgggaggatggcacgatcgacaagctcgaggcggggcacagggacgcagggagcgcaggcggacggcgcaactgacgaggttgaggtggggcgcgaggaggtagctggcgaggtaccagggctatga

SEQ ID NO: 97116 - DNA, 1309 bp, Oryza sativa
  Clone ID: PAT_MRT4530_95150C.1
ttgaaaggggaatcgttcaaaggtcggcaggtacccccctgtgaatacgccccccagtatgaaaagttctttaatgttagttgagtccctggctcccaaatagattgacccgcaataacacgtacagcttccctcaattcgaccagatcgccatgagtggaactccgaccataacataattgtcagatccaagatgtgctccggcaagtaaagggggttctaatatatattggttgtgctcgaaatggctgtgctcgaaaggtggttatgaatcgattgactaacccaattccaatatcttgatttcgagtggcaatgcaccgtgaaccgatatatatatcgtttgctaatacacgaccaattaatgtttgtacaaaaagtttttccgtcatcccattttgaggactcacagaaatagcttggatagtaccacaatctcttctacgcacaataatatgttgaactacttcaacaagtctacgtgtaagatatccagcatccgccgttcgtacagcagtatctacaacccctttgcgggctccgtagcaggaaattatatattctgtcaaagaaagtccctcgcgtaaattgctttgaataggtaaatcaatcatttgtccttgaggatccgccattaatcctcgcatacctactaattggtgtacctgcgatgcatttcctctagctcctgaaaaagacattagatagactggattagaaggatctgttatccgaaaattcgaattcatttcgtgtttcaaatattcacttgtagcataccagatttcaacggattggcgtaatttttctaccgcgtgtacagccccataataatagtgtttttccaaaagaaaactctgttgttccgcatcttggactaaccatcccttagagggtattgttaaaagatcctcgattcctaatgaaatcgatgtagtagtggcttgatggaagcccagcgtttttatttgatccagtatatgggatgtatatcccattccgaaatgctctattaatctgctaataagtcgtttcatagcagttcccatctatctctttattctgaaagaccagattggcccgttccgccataaataagtaccccctttttcggctgagtataattcgacaattgctgagtaggattcgacaatgggcctgagtcagtgattcgaaaacttagttaacttcctttcctcatctcatctggattcgtgcgcccaaaatgatgatactagcgaaatcggaatgcccctcgaaaggggcatccccgatctaaccctcgtgccgattcctcagcccgggatcc

SEQ ID NO: 97117 - DNA, 334 bp, Oryza sativa
  Clone ID: PAT_MRT4530_95151C.1
tattccagcagccaatgctgtcttcctcaagatacttcggaactgcaaaaaagccatcccatctagagacgccggtggaaaggtgataatcatggatatagtggtcggagttggcccatctgaccaaaagcacagagatgtgcagatcttgtttgacgcgctcatcatgtttgtcaatggcgttgagcgagatgaacaggagtggaagaaacttttcgttgaagctggatttagtagctacaagatcatgccagtcatgggcttcaggtcaatcatcgagtcacatggcaaggatgaccgtctagcaagaatcaatctgttgtacaaggaagag

SEQ ID NO: 97118 - DNA, 2182 bp, Oryza sativa
  unsure (1)..(2182): unsure at all n locations
  Clone ID: PAT_MRT4530_95152C.1
tctcctcctcctccaccaccttctctctactcctcctaccttctcgccgtagcgtagtagnctagagcctagagcggaggagcatatcctccgagatcaccggagaagaggcagcagcagcagggngccgcgccggcgatgaggtggacggcgttcatgtgggagggcgcgtcgagggcgttcaaccaccgccccaccttcaccaacctcgtcctcgtcctcggcgccgccagtagtggaggactagtagcatatgcggattccaattcagatgatgttgttgggaagccccagggacctccaaagaagaaaatcgttgttcttggcaccggttggggtggcaccacgttcctgaggaatcttgacagcagactgtatgatgttcaggtcatttcacctcggaattatttcgcattcacgcccctgctcccaagtgtcacttgtgggacagttgagccaaggagcgttgttgagccgattcgtaggattttggagaagaaaggtggagatatcaaattctgggaagcagaatgctttaagattgattcatcaaacaagaagatccattgccggtccaatatagggacaaatcttgatggaaatggcgaattcttggttgactacgactatcttgtgatagcagttggagctaggtctaatacatttaacactccaggtgttgaggagaattgcttctttttgaaggaagtagaggatgcccaaaagatccgaaggaatgtgatggactgcttcgagagagcaagtcttccttacctggatgaagaagagaggaagaagaaccttcactttgttgttgtaggtggtggacctacaggcgtggaatttgccgcagagttgcacgattttgttaccgaagatctatccaagctgtatccttctattcagcaccttgtcaagatatcactgattgaagctgcagatcacatactgactatgtttgacaagaggattactgaatttgctgaggataagtttggaagggatggcattgatgtgaaaactggatacaaagttgtgaaggttgctaaggatgcaattaccatgcaaaatccagccactggagatatcgcggttccttatggaatggctgtttggtccactggtattggtacccggcccttcatttcagagttcatgaaacaaattgggcagggcaaacggcgtgtactagccactgatgaatggctaagggtccgtgaatgtgatggtgtttatgctgtaggagattgtgctacgataaaccagcggagagtaatggatgatatctcggaaatattcagagtagcagataaagataactctggaaccttgacagtgaaagaaatccaagatgtcttggatgatatctacgtgagatatccccaggtagagctctatctgaagagcaggcaaatgaatggaatcgctgatttagtaaggactgccaaaggtgatgctgaaaaggaatctgtagaactgaacattgaagaatttaagaaagctctttctcttgttgattcgcaagtcaaaaatctgcctgcaactgctcaggttgcttcacagcagggacaatatttggctaggtgcttcaataagatgaaggatgctgaagaaaaccctgaaggccccatccgtataaggggagaaggacgccatcgtttccgccctttcaggtacaggcatttaggccaatttgccccactaggaggtgagcagactgctgcacagctccctggtgattggatctccattggccacagcacacagtggctctggtattctgtctacgcaactaaacaaataagctggcgcacgagggcactggtgatctctgactggagccgtcgctttatcttcggtagggactcaagttgcatatagtcaagaaggaaaatattttgttgtgacatattcatcagaagctaagtgcatcagtagtgcctgcctcccactcgagtttgtttctgcaaatatatattctttttggttaggaaagaataaaagttacccttttttttttcttacatagtgcaccacggaggaaaaattccctttgtacctttcttttgaagagtgttgtacttttgcggcatgagcaaacctgcagattctttagtagtttctttaccttaaaagataagcaaaagaaaaccactttggacctgaaaaaaaaaaaaaaaaa

SEQ ID NO: 97119 - DNA, 1385 bp, Oryza sativa
  Clone ID: PAT_MRT4530_95153C.1
tcatccagcttcgaccctgtcggctgcctccagcttctgcctccgcaatccgctattcgctgccaggctcgaatccatcggcaagtccgcgcgccgccgcatgcccgcattcacggccctccggccacgaactgccgaggagccccaatccaggatgccattgacgccctctcccaggaagggctcttccttgtacaacagattgattcttgctagacggtcatccttgccatgtgactgttttgcaaaattcaatcgacttacattaatagccgattgtattttctcgatgattgacctgaagcccatgactggcatgatcttgtagctactaaatccagcttcaacgaaaagtttcttccactcctgttcatctcgctcaacgccattgacaaacatgatgagcgcgtcaaacaagatctgcacatctctgtgcttttggtcagatgggccaactccgaccactatatccatgattatcacctttccaccggcgtctctagatgggatggctttcagtaaagcgcgggatgtttgcagttccgaagtatcttcacacagtcattgtcactccaatcatgcataatccacttgaggaagacagcattggctgctggaatactgtcaaacatgtcgccggcgatgaactcgacaccggtccccctgggtgcgtcggcgacgacgtgggcgaggtccatcacgctacatttcacctcggggaacgccttcgcgatggcccgcgccgccgcgccgttcccgccggcgacgtcgaccagcgagctgatcccctggaacacctcgccgtgctccctgaccaggatgtccatcatgaaggcgctgtccgacgccatcccgtcgttgacgaccgtgttgaacgcggcgtcctcgttggtcatctcccagaagctctggccgtgcgtgtgcttgaacatgcacggctcaggcagctcgagctggagccagtcgctgatccggaagaagggggcgatgaagcacgggtggagcagcatggacatcatgtgtcgttggttcccggcgccgatgaggaggcgggacaccggcgtgagcgtgtacatgggcgcctcgtcggcttcggctgcggcatcgccgggcgccggcttctggacggcgaagatgccagagagagtgagcacgcgcatgaggcggcgcaggcacgggatcttggaggggtggagcgtgaccctggtggctatctgggccatggtggcggcgccgccgtggtggtggatggcgtcggcgatgccgaggtccaaggcggccttgagagccatggacttgatgacggagaaggtgttgccgtagagctcgctcagagcatcgagcgagctggtggcatgttgcccgttgctctgaatgggcgccat

SEQ ID NO: 97120 - DNA, 267 bp, Oryza sativa
  Clone ID: PAT_MRT4530_95154C.1
atggattcaatcacaaggaaccagtcacagcgaaatctgcgacggaagaatgggtacgacggcggcgagcttggtttccctgagattgctcgcctccgcttgaggccgccacctgctcgaggccccccgctgcagcttctgcctgctcccactgccgactggcggaggctgcggcggcgcccgttggctggagtctctgccgacgcggccggcttccctgctggacctcgcgcagtcgcgctcggcggagcaaaggtgaccgcttga

SEQ ID NO: 97121 - DNA, 121 bp, Oryza sativa
  Clone ID: PAT_MRT4530_95155C.1
gacgacgacgccaccagaatgggatgacgcttctgtggactacgggctcaacgatgacggtggtggcggccattgctcgaggagggagacggcaagcttagaagaccaaggttatgggtag

SEQ ID NO: 97122 - DNA, 705 bp, Oryza sativa
  Clone ID: PAT_MRT4530_95156C.1
atgcggcaaaaaaccgccaaccggaacgctcgccgcaccgactccaaaaggataagacaacagggggcaatatcacgcgtctggcccgactttcttcccccaccctctactcgctcccctcccattccgccccgaaaaaaacaccccgcaagaaccgccgcgctaagattatttagcggcaacccgaaaagggaccggggagctcgggaaacacattatttaatgatttttaatcccaaacgaaaatcggggcgttgcatgcggccacatgggcggcttcaggacggccggccggcggggagcggcagcgacgcctggggccaagaggccaccggcggcgagcggtggccacgagaaatgcggcggagggcgacgggaagggagaggggagctccccgagaggatgggacggcgaggcgaagacgggaaggtggccggcgacgaggattggcggcggtgcttctcgggttagggtcaaggacggcgctccggcgactcgcgaccatggcggaggtgcggccgagggccggtaggacccaggagcgaggggagatggcggttccagcggcgggaaaaatggtggctgaggggcggcttgatgtcgtggagctgggggagggaacggcgcagctcaaggtggccgggaacggccacgagaggcggctggaggcgacaaacacggtggcggcctcgggcttgcgttga

SEQ ID NO: 97123 - DNA, 153 bp, Oryza sativa
  Clone ID: PAT_MRT4530_95157C.1
cgtactcttgggacttgcacgcgatctacttactgggactttcatcttacgatgctaaaggtaatcactagctaatagctcgcttaagttacgaactagccatgagcagacgagaagcaacagctctacgatttccaccacaagaagcgacca

SEQ ID NO: 97124 - DNA, 1890 bp, Oryza sativa
  Clone ID: PAT_MRT4530_95158C.1
atgcataccaagttgctcctgttgccaatcttggcctctttgcagctactaccaggcgctgccaatggcgccaccgtggacccaagctgcccaccggcgacatgcgggaacctgactatcacctacccattctggctgggcagccagaaccagtcgtcttgcggcccaccgtcgttccagctcacgtgcaatgacagagcatcaggtcccttcctaagaaactcctacatcaaggtcctcggcttcgattatggccgccgctccctcgtggccgtgcacgccctcctcgctgccgatgctgcgtgcaccgtcatgttcaacgtgtcctccgccttcgcgatcactgacaggttcagtatcagccagagcaaccgggagctctatgtgctgtccaggtgcagagagagactgccaccgccagacgctgtcccggtgaccaactgcagagccaacagtagtggcatgtacgcctaccttgggggaagctatggcacaggccagacaccggtgaacaatggtggttgcgagctttcagtgttcctggtgcttgggtccagcaacgccgccgacatgacagcggcaaattacagacagcttatagcgggcgggtttctgttggagtgggaacctgttggcgactgcaacgcctgcacagcgagcggcgggaggtgccggtacgatgccagcacatcggcgttcgcatgcctttgctcggatggtggcatgagaccatcgatttgcgatggtaagaacaggggcaagttggctttgatagtatctctgtctgctgcggctggcttggttttcgcctttcttgcttggctgatgtaccgtcagaggcaaaagttcagatcagcaatctgcggagtttactctggcaatacgaaaaatgaagaagaaatgttgaaaaaatgtgaatctcttgctctcaaaaggtacaagtactcagagttgaagaaaataactaaatcatttgaagataatttaggagaaggtggctatggtgtagtattcaagggaagactacaaaatggcagaatggttgcagtgaagatcttgacagtatcaaaaggcaatggagaggatttcctaaatgaagttatgagcatcagtcggacatctcatgttaacattgtcactctactcggtttttgtttagagggaccaaagcgagcgcttgtctacgagtacatgcctaatggttctttgaagaattacattcattcagaaagttcaaatctagctacaggatgggagatgctgctaaaaattgtgatcggcatcgcacgaggactggagtatctgcaccagggctgcaacacccgcatcatccatttcgatatcaagcctcgcaacatccttcttgatcatgagttttgtccaaaaattgcagattttggattagccaagctatgccacctcaacgagagcatcctttcgatggcggaagcgagaggaaccattggttttattgctccagaagtattctccagaggattcggagttgtgtcaaccaaatcagatgtctatagctacgggatgctgcttttggaaatagtcaaagtaagaaaaaacataaaaggaattgcagataatttcagtgaaacatttttcccacattgggtttatgacagtctggtgagtgagatgcaatgttgtgaaacggcatatggaaccgaagagattgcaagaaagatgaccatagttggactgtggtgcatacaaatgacacctgaaactcgtccttcgatgagcagggtcatagagatgttggaaaggagtatcagtgaactagaaatgccgcccaaaccattcctctgctcccccatccactcaacgaatgtttcgtcttataaatcagtcaattttacgatgtctgcatcatcatga

SEQ ID NO: 97125 - DNA, 120 bp, Oryza sativa
  Clone ID: PAT_MRT4530_95159C.1
atgcggtgggtgcattatatcttcgttgggatgcggtgggtgcattatatcttcgttggtcagaatgacccgaacaaggttgatatcaaggtcaggagacctgcgaaccctatgggctag

SEQ ID NO: 97126 - DNA, 921 bp, Oryza sativa
  Clone ID: PAT_MRT4530_9515C.1
ctattgctgcatcaccaccatacaagcggcacgtgcgtggtaagaatggctcgtcatgttcccctcactgccgactcctcccttccccgcaatctccgtgcatgccaccttcgtcgtctcttgcagcagctcgagacgatccttcgggctcccgtgcgtcatactcgacgtggcaggggccgtcgtgctggcaatgccggccgtggccccccatctcctcctcctggcttcgccggacgtggaggaagacgccgcggcaacggcgcggctgcccaaaggaacgccggagccggtagcaccgactccaataccatcgccactcgccgagggtctccggcgacgccgggcatgtgcacaacgctggacagaatcctggtggaggcaccacaccattgtgcgtcccatgggtggaccgcacgggtgcgaccgcagctggacatgccggacgtgcgccggttgggcactgcaccattgcctgaagtaaatgcgaatgagaagaaaaatgttcccagcgggaatacccagactggaagttcatttggcaagggcaaacgcaacagagccaaaaagcaacgtgggaacagcaaaaagaggaaaggcaattctaagcccaataatgatagcggcagcaaaaccgcctgctacaggtatggttgctacaatcatattgctaagaaatgcagaacccctaaacatcttgttgatctgtacatgaagtctatgggtcatacacagaccaaccaaaagcatgaagcacacttcgcctctcaagtgctggagactggagctatggaccccattcctgacgaagagggaccgagcaaaaccaagactccgacaaatgaagaggaagactctttggacatcgatgacatgctcgtggaatatgcttccaacgacatttatggagaccttaattag

SEQ ID NO: 97127 - DNA, 517 bp, Oryza sativa
  Clone ID: PAT_MRT4530_95160C.1
caagagggagctcagttcttcacaagtaagctgaaatcgtcagcagagcaattgctaaataatcgaagactaaagtgactgtcaagattttttcaaggcgtacatcaaaatgggaaaattggtggcagcaataggtaaattgctctgctgtgtacaagttgaccagtcaacagtaggcatcaaggaaagatttgggaaatatgaggaggtgcttgatcctggatgtcactgcgtgccatggattattggaagccgtgttgctggtgagcttacactaaggcttaggcagctagatgtacgttgtgagacaaagacaaaggacaatgtttttgttacggttgttgcatccattcaatatcgagcaatggaggacaaagcaagcgatgcatactacaagctgagcaacccaaaatcccaaatccaatcttatgtctttgatgttatcagggcaagtattcccaaactagaattggacgatgcttttctgcaaaagaatgaaatagcaagagctgtggag

SEQ ID NO: 97128 - DNA, 1013 bp, Oryza sativa
  Clone ID: PAT_MRT4530_95161C.1
ccccggcgcacgaaccaaccggagaggaaaggaaagctcgggatcggagcagtagtagtactaggacgactcaacgacgacgatgcttcgccgccgcggcttctgctgctgctccggcgcacccaccgccgccgccgccgccttgctcctactggccgtggcggcggccgccccccgcgccgctgggttccacctcgggggcgacgagagcgtcctcgtgcggggcatgctcgccgcgatccgccgcgagcaggccgaggcggaggacgcggcgcgcttcgccgtcgcggagtacaacaagaaccagggtgctgaattggaatttgcacggatagtgaaagccaagcgtcaagttgtgactggtaccttgcatgacctgatgttggaggtagttgattctggaaagaaaagcctgtatagtgcaaaggtatgggtgaagccgtggctagattttaaggcagtcgtcgagttccgtcacgttggggactcccagtcacagtcggccactgatgctgatggtaacgctgggcaagatactgctgatcccactgtggcatcaaggaacgacctgcacaacactgagaacaataaagtctctgttgtcctgtcaaccttttctcagacatactcggtgtgaatctagctccatggagaggatatggaagacttgagcttctgagagctagctgtcagtaatttgtgaagtaaagtagctgttatccttttgtgaagttttccccactgttatggaatgatgtctagatcgtaatatgccgttgagcagacatgagtttgacatctggagtgtatatttgttgctgcaaactgcaaagtgaacactcccatgtatattccatacctttcgttcccatgcatgtatataaggcattactgctaccgttgtatggtatacccgctgcatgtgtttgcatttcatcgattaaaaaaaaaaaaaaaaaaaaaagaaaaatgctttgtcgtccaaaaaaaaaaagggggggagcctcgtgccg

SEQ ID NO: 97129 - DNA, 1551 bp, Oryza sativa
  Clone ID: PAT_MRT4530_95162C.1
atggccatggccccccggtgcaccttgtccgtgctgctcccggttgcgctcctcctctgcgccgccatcgcgtcgccggatttccctctcggcaaaaacttcaccgtgcctttgtactaccagcagccggccgacctcgccgtgacgacgaccacggtgctcaacgcgtcgcacggcgcgccgctgcggcctggcgtcgccgccgccatcagcgtcgtggccggcacgggaggcctggaagggctgtccatgtgctccctcgtcgtcctcctgggcaacgtcacggtctgggcctcggaccacgacggcgggaggttcttggtgcggggcttctgccggctcgagctcacggtggacggcgatctgcggctgacggacgccgccgggaccgtcgggtggtcgtccgccacggcagggcgacgcgcaaaggttctgcgtctgacccggagtggcaacctccgtctcctggacgccaagaaccaatatgtatggcaaagtttcgacaaaccagccgacaaactgctacgcggccagcgcatcggggtgccctcctacctcaccgcgccggtgacaatgatcggctccgcgttcttctccttggagctcaaagagcgctcgatcactgccaacttcaacgttgggattaagaggtacacatactgggagctcactccgcgccataaccggagcgtggcatttgcggagatggacgtgctggggctgaggttgctggaccgtcaacggcgaccggtcgcgcagatctcgccggcgatcgaggcgcaggtcagcttcttggcgctcggagaagacggcaacctgggcatgtacttctacgacagccatgacatgaagttcgggccgtcgtacgaggcgctcgggttctgcgagcttcccctcgcctgcggcctccgcggggtctgctccgccgccggcgaatgcgacgacttctccacctacggtgtccatccggcgccggcggcgcaccgccacagtgcctgcaacgcgaccaccgtcgccgaccggcactacatggcggtgatggaaggcgtcaccacggcgatcaggcccgcctcgccgccgacggccaacgtgacgatgcggcagtgcgcggactcctgcctgcgcgactgctcctgcgccgccgcgctctacgtgctggcggccgtggccgaccacggcggcgcgtgctcgcgctacgagatgacggcgggggcccgggaggtgatcggcgggggccaccggcacaactacctgtacctggtgaaggctccaagaacgagagactctgagcacgagcacggagacgacgacggcgccgtgagccgcgtgctcaccaggatcctgatcggcttcggcacgctcgacgtgattggcctgtgcgcacttacatggctgtgtgcgtactactgcatctatctccgcgacatcccggtcctcgacgacaaggacgacgaggaggctgacgatgaaggaggggaagcagcccggcgaggagacgccgtgtcgcaaagtcctcctaccaacagtgaacctgtaatagaattgaactga

SEQ ID NO: 97130 - DNA, 1572 bp, Oryza sativa
  Clone ID: PAT_MRT4530_95163C.1
atggcggcggcgctctgctccgcatccccggccatctccgccgcggcggcggcggctctcggtgcggccgcgcgccgcctgcgcgtgcgcgtgcgcgcagcctcgcggccctactgcgccgctccggctccgccacgggctgcggctgcggtgggggcacagtcctggagggcgcggcggcggtttgccgcgtcggcggcttccacgaccacggaggaggaggaggagggagcaggtgctgaggtgatgatcccgcccgacaaccgcatccccgccaccatcatcaccggcttcctcggctccgggaagacaaccttattaaatcacatcttgactgctcaccatggaaagcgtattgccgtcattgagaatgagtatggagaagttgatattgatggttcattagttgctgcacaaactgctggagctgaggacataatgatgctaaataatgggtgcctttgctgcactgttcgtggtgatttagtccgtatgattggcgaattggttgacaagaagaaggggaagtttgaccacattataattgaaaccactggtttagcaaatccagcacccattatacagactttctatgcagaagatacagtttttacagaaacatgactatgaacaccatcatcacgaccatcatcaccatgaccatgaacacaaacatgaccatcatgcccacgatcacacccatgatcctggtgtttcttctgtaagcattgtttgtgaaggggagatggatcttgaaaaggctgacatgtggttgggaaacctactgctagaacgcagcgatgacatataccggatgaaggggctactaaacgagccgagtatgggaaagttgatttggattacgtgcttggaattggaggctttgatttggagaggatcgagagtgcgggcatgaacataaacatgaccatgaacaccatcatcacgaccatcatcaccatgaccatgaacacaaacatgattgtaagtcaaaatagattgatatcactcgaaggttttcaaactctttctaccattttaaatatgctaggtgtccatgaccatcatgcacacgatcacagccaggatcctggttccttgtaatctgaagtgcgattggatgaactaacttgcatcatttgcgggatgcacgacattttccagggatctcccgagagaatgtgggaaccaaatgagccacgcatcaacaagattgtattcataggcaagaatctcaatggggaagaactggagaagggcttcaaggattgcctactgaagaaataagcgagaaacgagtttgtacgtttttcctacacacgggatgggaatctccagcttcatgattttgagctttgcggctgtagaacttatccttgaatctgaagtgcgattgaatgaactaacttgcatcatttgcgagatgtacagaatgggttaccgtaatatccttgtagccttgccatcatttacagttacgaattgtaccctgaaattgcgcacgctgtaatttgaacatacagagatggtgtttcttaattcctagtaaaatcgaaattgcatcgtggccct

SEQ ID NO: 97131 - DNA, 1490 bp, Oryza sativa
  Clone ID: PAT_MRT4530_95164C.1
gcacgagggattggctgatcccggccgggatattgttgtgaatgcggttctatgcatccgcaaacctgatgaaccaatcgatctttttatggttgagataatgcacatgcgccacaaatttgatgttgacacacgtctggttgagggtctggtcttggaccatggttctcggcaccctgatatgaaacgcagggcagagaactgttatatcttgacctgcaatgtctcactggaatatgagaaaagtgaaataaatgcaggatttttctactcgaatgcagaacaaagagaaaagatggttgctgcagaaaggcgccaagttgatgagcgtgtgaagaggattattgaattgaaaaataaggtttgtgctggaaatgataaaaattttgtggtgatcaatcagaagggtattgaccctccatccctcgatctcctagctagagcagggattattggtctccgaagagcaaagaggagaaacatggagaggcttgtgttagcatgtgggggtgaagctgttgattcagttgatgatttgactgaagattgtcttggctgggctgggcttgtctatgagcatactcttggtgaagaaaagtacacctttattgagaatgtgaaaaatcctcgctcttgcactatactgattaaagggcctaatgatcacaccattgcgcaaattaaggatgctgttcgcgatggtctaagatctgttaagaatacggttgaggatgaagcagttgtgctgggagcaggagcatttgaggttgctgcgaagaagcatcttattgacaacgtgaagaaaactgtcaaaggacgagcacaacttggggtggaggcatttgctgatgctcttcttgtcatacccaaaacactagcagaaaattcaggtctagatacccaagatgttattgtctctctccagaatgaacatgatcgtggattggtggtgggattgaacccatcactctggcgaaccaattgatccccaaatggagggcatcttcgacaattactccgtgaaacgccagatcatcaattccggacccatcatcgcgtcacagttattgcttgtggatgaagtgatcagggctggccgcaacatgaggaaaccaacctaatactttccctacctgccgctgagtcctctgttttgtgggagatattacgcattttgtttggttattttgcctttctatctttagtttgtgcgtagtagtgaggtgggtgaaatgtccggaggttctgctagtttgttcctctttgactgtaacagatttcacttgtaatctttgtcacactgtcatttatgccgtcctgatgatttgggaatcagtatgtgcttatgctttcatgtcatttgttctcacgttgaactaagcggaatgcaccaaattttgtttggtgagaaaaaaaaaaaaaaaaaaaaaaaagtataggcgttctagatcgcatgcgcttctgatacatgcagcagtttaatttgcatt

SEQ ID NO: 97132 - DNA, 227 bp, Oryza sativa
  Clone ID: PAT_MRT4530_95165C.1
acggaatatcattattgggggtaatatgctccgaatgagagttgggccattgatagtgacacctcagtccggatattcctcggcgcgtgtatatagtcctaagttattttactgaggatggtagtcctccgtatttagccccggttgtatggtaatgataggctgtcgtaaggaactcgacagtcagggatggcttctcgatgtaccagcagggcatcggatagagg

SEQ ID NO: 97133 - DNA, 132 bp, Oryza sativa
  Clone ID: PAT_MRT4530_95166C.1
atgttgaagccccgcgtgcaaccttctcctccaaaggcaaggcaaggcctgtaccttgctagtggacggatccagggccccgcttacccttcggagtggacggcgcccctccggcacctcaaggagggatga

SEQ ID NO: 97134 - DNA, 168 bp, Oryza sativa
  Clone ID: PAT_MRT4530_95167C.1
gtgtaacctcatctttcgggtggcttaggataatcactagggagaactatgcattcacatgaagccagtacctgggcctgatgcccacattttttatcggaatacacctgccggctaacgctaacggagggaaggtaaaaaaataggtctacgccggcaacccatata

SEQ ID NO: 97135 - DNA, 1773 bp, Oryza sativa
  Clone ID: PAT_MRT4530_95168C.1
tttttttttttttttgttttttttttttgtactggcattggtagacaatatgcaatgattaacaagtgacaattacaaattcctattgacacatctcgaatcaatgacaagggcatttggcccctgaagacgagataactaatttctggtgcttctttgcctacaatctaacatcacagttatcagcctatatatattatcattacagcctatactaactatacaacctacggtagattacaatattatacatggagctatgctgaatttcatctgcagatgccactatgaacctgaccaactaaatgtggacatacaaaggattctggcttacagaagtacctacgaagcagatccctttgatttctcaatttccaatgcttgctctgccaccatgatacatgaatccatctccagatttgtggctttgtcgtcctcttttagcgaaggtgctcttggcaaagataacatttcaggggtgcattgtatgtcaggttggatgcctacttggtcgatttcatgcagtgctggagagagatattttgcgaccgtgataaacagagcagatccatcatccaattcagtcacactcaaaatagcacgaccattgtcatgtaatgctcctgccaagatttcacttgcacttgcacttccttcattgacaagtacgacaaggggatcatgtgttaaagaatggccccgggccatatttattggtaggacatttccctcacggtcaacagtgttgacaagagtttcatttccatccaaccacatttgagccacgtcaagacctgcttttactagaccaccctgagagaatgcagctagcctaacatacccagttttgcactcacggccatcgtccgacctatgagagataattgctgttgatagaggtgaaagattgataacctcacgagatagctggacctccttttgtcttatcctaccattcctttcgttttcagtgccatccaacactttcactttcacagttgttccaacacgacctctaagtctctgagctgcagcttctccatccaacccagaaacactcttcccatcgatctcaactagttcatcgcctccatgcaggcctgctcgatctgctgggccaccttcaatgcagtccataacaagcaagcgtccagagctaggctccttgtttatgaacaccccaaccccttggacactcccatcgcttccaatcctgaaactctgatattccttggggctgatgatcttggtgaacggatcgccgagtgtggacagcatcccgctgatcttaccataggcggcatcctccgatttcagcgggaacatctccaccatggtctgcttggtgattgaaggtgggatccacgaaggtctcacggtatcagcccccacgcctccaccagcgtcctctgcacccggttcacctttcggtcctttgagacagggaacgcgacggtgagcgactcggcccgcgccggcggcggcggcgagaggggctccgcggcgagcccggtcagcgacaccacggccgccgcggcgagccccgctgccgccttgcccagcgcggcacgggccgccgccgtcgcgctccgacgcagccgtcggcatcgtcgggctgtccctcctcctcgtccgctccgaccgcacccggagccggctgccgctcctcccggcggcgccaagagccggcctgccgccggggagcggcgggaggcggcggggcagtgggcgcggggcccgggcggcgggcagcgagcactccaccatctccat

SEQ ID NO: 97136 - DNA, 113 bp, Oryza sativa
  Clone ID: PAT_MRT4530_95169C.1
aggaagaaatcttactgatttcgcttcagagaggggctcatcttaacatcctttaaacacgtatctgaacttccaactcctaatttgattcactgtgtgtttacaatatcatg

SEQ ID NO: 97137 - DNA, 342 bp, Oryza sativa
  Clone ID: PAT_MRT4530_9516C.1
attaaagcagacaactattcatgcaccggggatggatttatatccatgcggaacggaaactgtttgagactaacagatggacacatacgcttgcacgtgctgcgtgtgcaccgatgccatatccacagatggtgaagtgaaactcaacgactaaaataatcgattcaagaaggagaatccatgccagtctgtttcaatcttaagaccatacatactgatcatgcaaaaaaagctaggaacaatgaacaccgacaccaacagagcttcttgatttggtcgactatatcatttgaactattcaagtgcttacaagcttctagaatcttaggtattactccaagg

SEQ ID NO: 97138 - DNA, 129 bp, Oryza sativa
  Clone ID: PAT_MRT4530_95170C.1
ttgctcgatgccacctctggtgctgagatggtggaccttgcagagagcgtaagttctatgggcacgattgaagctgaggtggaggtggattcggctgaagatgaggttaccctgttcttttctgactaa

SEQ ID NO: 97139 - DNA, 454 bp, Oryza sativa
  Clone ID: PAT_MRT4530_95171C.1
agcacaacagacaaccttcgcattaatccaggttaactgtacagcaagctggccttgaggatactacacaggttacttgacgagaggggtgggacactggcgcaccagccggcagcgattatcttcatgcacgtaagcacagtgtacagggaggtctcagggaggcttctaagactcgcggacccagaacagtctagcgggaaggcggggcggctggctagaccttgtcgcaaataaatatcggcttacccggtcgacttcgagcgcagaagaattattgcagcatcgtgaggcgccatcggcagcaagacacacgtggccctacctaaaactcggggcttgcatcttgcagtcagtcacgagcaaaaatgagcaggccaactctagcatcttgcatgcagctttttttagatcttttcctgtgccaggaaccgaccgaaacccacgttttgtt

SEQ ID NO: 97140 - DNA, 211 bp, Oryza sativa
  Clone ID: PAT_MRT4530_95172C.1
atggcggcggtgggcgggctccgtgtggggcggcgggtgtgcgggtcgtcgtgggtggatcccttaagcccgtttccgcttttcgcgccgccctgccacttttttttgtcggcggtctccagtttcgggttttcgtggtgcgactgtcgcgtgttcggcgcgccccgccccgctgatttttgccgccgtgtttcgcttcactttgttcgcg

SEQ ID NO: 97141 - DNA, 285 bp, Oryza sativa
  unsure (1)..(285): unsure at all n locations
  Clone ID: PAT_MRT4530_95173C.1
cccacgcgtncgcggacgcgtgggcggncgccccgccaagaagaagggncacaccgtggggggggcgctgactttcgatgaccaatgcnccatcttggagaaggaggccgagaaccaatccctggagaacctaatgacccaccccatagctaaggcagggactgcccacggatcgccgaaccccttcctcatacattgcaaattcaaccacagcaaatgcacctgagaggacctttaaatacacacggcccctcgatccatggacaaatctactccacccttttt

SEQ ID NO: 97142 - DNA, 1703 bp, Oryza sativa
  Clone ID: PAT_MRT4530_95174C.1
atgcggagcctctcggtgtcgttccagggggagtccttcttctaccagacgtcgcgcgcgccgcgggcggcgtcgccgtcgtccccaggcgggcggcgcgggcccacgccggagcggcggaagagcgtgtcgtcggtgcccgaggccgagaacacgcggccgcagcaccgatggccggcggcgaagcccaaggcgtcggaccccctcgcccgcagcctcgactgcagcctggaccgcaaggactccatcctggctgccgtccacctgctccgccgctccatggcgttcgactccaccacatccctctccccttcggacccggccgccgccgccgccgcggcccacgacctctctgcatcctccgacaccgacagcgtttcatccggcagcaactcgggggccggtgatcccccacgccgcggcatcagcgtgccggcgaggttctggcaggagaccaacagccgccttcgccggcttccagaaccagggctaccgctaccatcatcctctggcaggagatcgttctcagacagtcaaatgtcaccgagactgcctggccgctctccatctccaagccgcggaagcaggggcatggcgagcccagcaagagggcggagtggggaggcatcacccaatggtcacacaatgcaggcgccggcaaatgcgccatctatcatcagctttgctgcagaggtgaggagggcgaaaaagggggagaacagaattgaggaggcacacaggctgcggctgctcgataatcgacatttgcagtggcgatgcatcaatgctcggacagatgcagctctcctggtgcagagcttcaatgctgagaaaactctgcacagtgcatggaaggaaatatcaaaattacgagacaatgtcagttctaaaaggagcaaactccagcttctaaaacaaaagctcaaactgttcgctattcttagaagacagatatactatctagacgagtggtctcatattgaaaaacatcattcaagtgctttgtcagcagcaatcgaagcactgaaggctagtactctccgtcttccagttgttggtggtgcgaaggtggaaggaacaagctctgtggtgtctgagcttgccaaacttgcaacacaagaacaaatgttgttggatcaatcaagagatctcttgtccatggtcgcagcaatacatgttaaacagtgtagcttgcaagctcatatgctacaacgaaagcaaaagcagagccagacacgggtgtagatcagtttgtcttgccacattggtggtcaactaacatcacacggcctcatcttttcacactggagactgtgctacaggtaataaaagctgtaaccatttgttgggtgtgaagtgtgtcctaatctgctttgatctcaccgagtgtagctgattcatgtaattttttgagtgcatatcaccatagaaatggccccttttacctgcaacagttgctgcagtggatgtatacagagaacctagtgttgaccaaggatgagctttctgtagatatgaaaaaagcttgtcgtttgcgtgcctagctttgctgtgttgcgtgcctcgcgtgttgatgattggtgttttgtattctggaatggaaacagttgttagtttgatacgggtgttttcatggcaaattaacatgcaagttgttcattctaaaaaaaaaaaaaaaaaaaaaaaaaaaccccacaacagcc

SEQ ID NO: 97143 - DNA, 363 bp, Oryza sativa
  Clone ID: PAT_MRT4530_95175C.1
atggcgctgatgtcagcgatgacatggctgccacgcgggatcgacgccggtgagcacgggaacggcggttaccagcgaaccacgcggcttccggcgggattaggcggaggggaaccagtggacggggtagagctcgaccttgcggagccgagggaggtggcggtgcaggagggcgacggccgaggagacggcaaacggcggctggagcgactgccggcgacggagagagaagacgagcgtggggaggcggctagggctagggaaaacttcgggaaacagagggaaaccgaagaggaggccgaggggatgctatttatagcaggaagagggagagaccgcctcgggaacagatggatttggtga

SEQ ID NO: 97144 - DNA, 1064 bp, Oryza sativa
  Clone ID: PAT_MRT4530_95176C.1
gtggggaggcatcacccaatggggggacagtgcaggcgccggcaaatgcgccatctatcatcagctttgctgcagaggtgaggagggcgaaaaaggggagaacagaattgaggaggcacacaggctgcggctgctcgataatcgacatttgcagtggcgatgcatcaatgctcggacagatgcagctctcctggtgcagagcttcaatgctgagaaaactctgcacagtgcatgggaaggaaatatcaaaattacgagacaatgtcagttctaaaaggagcaaactccagcttctaaaacaaaagctcaaactgttcgctattcttagaagacagatatactatctagacgagtggtctcatattgaaaaacatcattcaagtgctttgtcagcagcaatcgaagcactgaaggctagtactctccgtcttccagttgttggtggtgcgaaggctgatgcccaaggtgtgaaggaagctgttaactcagcggtggacgtgatgcacacaatggcatcctcaatgtgtactttgttgtctaaggtggaaggaacaagctctgtggtgtctgagcttgccaaacttgcaacacaagaacaaatgttgttggatcaatcaagagatctcttgtccatggtcgcagcaatacatgttaaacagtgtagcttgcaagctcatatgctacaacgaaagcaaaagcagagccagacacgggtgtagatcagtttgtcttgccacattggtggtcaactaacatcacacggcctcatcttttcacactggagactgtgctacaggtaataaaagctgtaaccatttgttgggtgtgaagtgtgtcctaatctgctttgatctcaccgagtgtagctgattcatgtaattttttgagtgcatatcaccatagaaatggccccttttacctgcaacagttgctgcagtggatgtatacagagaacctagtgttgaccaaggatgagctttctgtagatatgaaaaaagcttgtcgtttgcgtgcctagctttgctgtgttgcgtgcctcgcgtgttgatgattggtgttttgta

SEQ ID NO: 97145 - DNA, 522 bp, Oryza sativa
  Clone ID: PAT_MRT4530_95177C.1
atggagatggtaggcagatatacctgtaggttggcggttggaggagaagcccgacgaatctacaacggccacagcccaagcgacaacgaccaacaggtggatgcaggaatttggggagggagtcgatcaaatggccgccgccaccatggtcctcttctcggatccaaggacacaaccacagggaatgccccttggagctgcagatctacgctgccacaagccccttccgtggcgccacccagtacatgcctcgaggaccctccgaaacgatcccagcgtcgagtagatcaggttgagtctacactgcttcggcgagtggtggtgcaagtggaggaagctcggtggcggctccccaccaatgggaccgatgtaggcaggggtggggcatggggaggatgtgtgtggacgggcctcctggcagtggtggcggcccttacaggagggtcccaggagacgatgttgtggaaggtcaattctcgtgcgtcgcggcgctccaagatgagcagtgttgacggtcgttag

SEQ ID NO: 97146 - DNA, 1221 bp, Oryza sativa
  Clone ID: PAT_MRT4530_95178C.1
ccaagcacgagccggccggggaaaaaaaggtcgactgcgatagcgtggaggagcggaggcggaggcgaacgcgaggaggaagacgaagatgaggaagaagctgggcacccgcttccccgcggcacggatcaaaaagatcatgcaggctgatgaggacgttggcaagattgcactagctgtacctgttttagtatcgagggcccttgaattgtttttgcaagatttaattgaccgaacttacgaaattacactgcaaagtggtgcaaagacattgaattccttccacctaaagcaatgtgtgaggaggtacagttcttttgacttcctaactgaggttgtcaacaaggtaccggacctcggtggcgctgactcatgtggagatgatagagcattacccagaagaagaaaagccttgccaaatggaagtgacccagagaatgaggaatctcgatcaagcaaaatggccgtaagaagtgcaaatatcagtcccagaggacgtgggagaggtcgaggtagagggcgaggacgaccacccaccaagcggaaggaagttggttatgtacaatttgaggatgagagcagcatgtttgctgatcagggcgaagccttaccaggagaggagacggttccagagaccatccatggcaccgagagcgtacctccaagcacacaccctccagcagaagccccatcggcagcagagataccagctccaaatccaaaggtggaagaagcgaaaaacgacgaccatcagccggattggcctatgccagatgcgattggaaacatcggtgtcggaccatccggttttggacatcttacggtgcaagttgacgaggatgaggactacgacaacgaggattagccacggccatcttctgattgttatgcactaacagggcagttctcctggtgttgtaaaatgtaaatatgtagctgcagctagctgtgatgtgctgctgatgtaatgcagtatgtagttgtcccgtgtaactttgtctgttttccaataattgcttgctagttgcctcacattgttgacatgattgactactgaagtgttttgtcagaattaacccggtattgaagcagtgatattctgttataacgtgatattgtaccaggcactaattttctgctatcctattatggtgtaatctaaaactagaacatctgatttccttctccattttgaattgaagtcatgcaagtactagatgg

SEQ ID NO: 97147 - DNA, 210 bp, Oryza sativa
  Clone ID: PAT_MRT4530_95179C.1
ttatagcgtcgcttccccaccttcctcgaggcatgctctcagctgcttcttgcggaaatcaacaagggacaacagaccaccagaaccgccattgccttcgtcgcctccaccaacaacggttccggtggagctgggtctgtcgtcactgctgcatccagcaccaccaactccacctccgggaacggtggcaacaactgcaatcactgccat

SEQ ID NO: 97148 - DNA, 2352 bp, Oryza sativa
  Clone ID: PAT_MRT4530_9517C.1
atggggatccagggattgctgccgcagctgaagtcgatcatggcgcccatcggggtggaggcgctcaagggccagacggtggccgtcgacacctactcctggctccacaagggcgccctctcctgcggcgaccgcctctgcaagggcctacccaccaccaggttcggctccggtgacctccccccttttcttggaacccagggtttcttaatccatttcgccgattggcatattgagtattgcatgcatagggttaacatgttgcggcaccatggcgtgaaaccaatccttgtatttgacggaggtcatctgccgatgaagggtgatcaagagactaaacgtgaaaggtcacgaaaggaaaatcttgagcgtgccaaggagcatgaatctgctgggaattcacgtgctgcttttgagtgttatcagaaagctgttgacattacacctaggattgcttttgaactgatccaggtattgaagcaagaaaaggttgattatattgttgcgccttatgaagcagatgcacaaatgacattcttgtctgtgaacaaacttgttgatgccgttatcacagaggattctgatctgataccatttggctgttctagaattattttcaagatggacaagtttggacaaggtgttgaatttcatattacacgattgcagcgatgcagggagcttgatcttaatggattcactatgcaaatgctactagagatgtgtattttaagtggctgtgattatcttccatcattgcctggaatgggtgtgaaacgagctcatgcacttatccaaaagctcaagggtcatgaaaaggtaatcaagcacctgaggtacagtgctgtttctgttccacctcaatatgaagaaaacttcagaaaggcgatctgggcatttcagttccaaagagtttatgaccctgtgacggaagatattgttcatttgtcaggcattccccatggcaaaggcttagcatcgcttgaggcaaaacggaagttcagagcacctaaggttacacctaagcaacaagtacttaatgggtctttgcccagtcccagaattgaagactctggtacccctgatttaattgaagatactagcttgccatcaaataacattcaagtttatcagtgtagttctgagcattttagctcaggaacccctctagatgattcaatcaataccgcctctcaatgtagttctgagcgtgtccgctgtgacatccctcgggatgattcagccagtgtttcaccccagtgttctcatgatattggtagtgatcctgctgaggacccagacattgaaggcaacaaggtgaaagtcaacttctgcaacagaagtacaataccgacaggctctttcttagaggggactttgcctgggatatcagatccatttttagattcacacaacacagagccatccagagctgcaccacgttatgctgaaaaaagcaatgtggtctctgccaatagaaatattactgtgaggagttcatatttcaaaacagtaaataaaagagtttgcacaaatcaaggagaagatgagtgccatgatgaagataactgcgagactggtaattacactcttcctggagatcaacaaagaagctctggaggtatattgaagagaagaaaatttagtgatccccaaaattttgaagatggaatgtttcaacccactagtcctcatgaaagtccaccggttgctgataaaggctgtgactctgattcccacgacggtatcaacacaaattctgaaggaaaatttggatgcaatgtcgcccatgtaaataaatacagtggcattgcagagaaatcaatggataagtttgctgcgctgatatcatctttcagatacgcaggctctcgtgccagtggtcttcgcgctcctttaaaggatgtgaagaacactcttcctgtcagatctgttctcagacctccagaacagagattcggttgtacggctaagaagactactagagtgcctctacaaagcagattctcaagtgatgctacaaacagcactgacgttcctgatctgagcacatttgcatacaggcctacaactgcttctgctcattctgatcaggggaagatcacaagcaaagctacagatgctgctgctggacctcctgacctgagaacatttgcttatgcaccaacaagatctaccaccagccgttttgatcagagtgaaaacacgcgcaaagctatgtgcactgcggacagccctcctgatattagcacattcgaatataaacccatgaaaagcgccgtcagacgttcagatgggagcaagttttcaggtgcagcactaaaagcagctagacgaacctctcggagctga

SEQ ID NO: 97149 - DNA, 378 bp, Oryza sativa
  Clone ID: PAT_MRT4530_95180C.1
atggagccgtgcctttggtgggcccgtgccgtgctgggctgggccgcccatttgacctactatagccgctacccttcctccaacgctggtgccaccatggtcctccctctgagtgtcgtgaccgccgccacccccgacgccgacactgcgcgccgcacccgccgccccgccccaaccccaccccctgcacgccagcgcttccaccggagccttcctccgcaaaacggcgccgtcattgccctccctctgagtgtcacaaccgccgcctcccgcgacgccgacactacgtgcaacacactttgccccctccctccacacgccattgcttctgccgctccctttctctgcacaccggtgctgtcgcagcccttcctctaa

SEQ ID NO: 97150 - DNA, 345 bp, Oryza sativa
  Clone ID: PAT_MRT4530_95181C.1
aaaacctaaaaataatttttttttgggggggtttgttttgttttaaactggttccagagggcacctttaattggtttcaggaaaggttttggccttgcttttaaaaattaaaaaattatgttcgagtaaatgaatcgggggttaattttaaaaaagggggatgggggttttaatttgttttttgggccgaaaaaaatggcaagacttttgggtttaaaagagggtttttttttccgtaaagcaagcaaaatgatgaggggtgggttttaattgttttaattggggggtttttggcccaaaattgatttttttttggaccttttccggagggtggttattttcaaa

SEQ ID NO: 97151 - DNA, 1875 bp, Oryza sativa
  Clone ID: PAT_MRT4530_95182C.1
gattcggcacgagggagagaacaagtctcgagttttttttttttttttttttttggtgatacaatcggtatattttacttatttataaattattctataattctttttttaaataatgcaacacaattaatctctcaactaatttagtcaagagattaagtgaagaatataatacgcagcaggattattttgccgtgtcaatccgaaaagcatagtttatcaatctgcttggagaaaaccatgcttaattgggatcaaacctaccgagatgttttagccacgtttacgaaggattgacgtggcccgctcctggacaaccttccacgcttcgcggacatggcgctcctcggtgagcgtgctcccgatggcgcacctgagcatgtacacgccacccaccatggcggagctcatgtacggccccgagctcgccgcgttcacctcctccaggagcctcctgttgagctcgtttgccgccttctcgcctccgacgccgacgccgacgccgagtctctccggcggcgaccggaggcggaagcacaccagcgcgaaccgcctcggcgccaccacctcgaacctcgcgtcgcccctcaccatggcctcgaacgccgcggccatggcgacgtgggagcggacgtgggagcggaggccctccacgccgtagcagcggagcacgagccacaccttgagcgcgcggaaccgccgcgtcagcgtggtgccccagtccttgtagtcgacgacgtcgtggccctccgccgccgcgtccctgaggatgtactcctgctccgtgcccagcgccgccaccagcgccgacggcgccgccacccacaccgcgcagcagtcgttgttggcgaggagccacttgtgggcgttcatgctgagcgagtcgacggcctcggcgccggcgatcacgtcgcggaactccgggcacaccagcgccgacccggcgtacgccgcgtccacgtgcacccacacgccgccgtggcgcgccgcgacggcgcagagctcgcggacggggtccacggcggtcgtctgggtggtgcccaccgtggcgcacaggaacaaggggaccagcccggcgtcgacgtcggcctgcatggcggcatgcagcgcggtcggcgagagcgcgaacacgtcgtcgcggcacgtcggtatctcgcggcagtgctcccgcggtatcccggcgatgcgcgcggccttgcggaacgcgaagtgggtctgatcggagcagtagacgacgaggtcgccgatcctcctcgcgccgatctccgccagcttccggtccctcgcggcgacgagcgcgcagaggacggcctcgcacgacgtgcccaggatcgtgccgccgcctccgccggcgaacagaaggctctccggcaggtgcagcgccctgccgagccagtccacgaccaccatctcgagctcggtggcggccggcgaggccgcccacgtgaaaggcacgacgttgatgccggccgcgagcgcctcgccgagggcgccgacggtgctgctcgacgccgggaagtgcgcgaagtggcgagggctctgccagtgcgtcacgccaggcaggatgaggtcgcggacatcccgcagcgccgccgcaaacgcctcgggctccgggcgggacggcgcgtcggcggggagctggcggcgcaggaagccgggagtgacgcttgggtggacggggtagtcgcccaggccggcgtagtagtcggcgatgaagtcgacgacctggtggccgagccgccggaactcgtcagcgtcgagcagtagcgcggtatctgacgccgccggcgtcgacgtcgtcgtctccacctccgggatggcaccattccgtggggcaccgccattgatggtgtggcagtgcgagggtggtgccat

SEQ ID NO: 97152 - DNA, 414 bp, Oryza sativa
  Clone ID: PAT_MRT4530_95183C.1
atggcgctggcacgcggcggccgcggcggcgataaggccatctgctccgttcacctcggcctgctcctgctccttgtcatcctggcgctgcaatgcggcgtcgaaccggcggcggcgcggagggagtggcccgtcggcgacggtgccggctggagccccggcgtcgtcgggtggcccaactacaagcccttcaaggcgggcgacgtgctcgtgttcagctacgacgcgagcgcgcacaacgtggtggtggtgggcgacgtggactacgcgctgtgcagggcgccggccaacgcgacggcgtacggctccggcgacgaccgcgtcgcgctgccccccggcgtcaccttcttcgtctccggcttcccgggcgactgcgacaagggcatgatgaagatcgcggtcaccgctagataa

SEQ ID NO: 97153 - DNA, 363 bp, Oryza sativa
  Clone ID: PAT_MRT4530_95184C.1
atgacgattgcagccggcttggagaagggcgatggcagccgacggcgaggaggaatggaagggccgaccgtaggagcaccgcgaggaggatggaccgggtggtgcggtggtctccgggcgaaacgaagggccggctgtgggagaggacgatgctgtggtgccggaggaggagatggtgacatcgggtggcactccaacggggcggcaggggctgccggagtgggtgctgacgagaccgagggagaggccgcgcgggcaacggtgttccgacgaaattcgggcgatgccgcggcctggccagggaagaggatggtgctgctgtgctgggagaggcagcggcggcgccagccgacagataggtga

SEQ ID NO: 97154 - DNA, 471 bp, Oryza sativa
  Clone ID: PAT_MRT4530_95185C.1
ctaatcggactcagagtttgatggcgcgtcctcgtttggttttctatataactcgttccagggggagcctgccctctctatcaaacctccaagattgcagctttcgcggtggtcctgcacaagcagttcatcttccaagagattgcacctctgccagtattcaccaaaacatgtgctatgtagttcccagagttttgcctcagcagctatgccttcctccaccttcaccaaaggatgaacttcattcgacgcaaactgcacaaccttggaaagtacaaacgacctcagacgccgtgtttcctctacacctctcaatctattggtgaaaacatcgcttgcctctacagccttgcagagaagaggaccgctgatgagaggtctgagatgcacattcttaatccgatcaccggtgaacagatcgctcttccgtccatgacgcttcctcttgacaaactgcggtacttcttccat

SEQ ID NO: 97155 - DNA, 140 bp, Oryza sativa
  Clone ID: PAT_MRT4530_95186C.1
acgtacaatatataaggccgatccacctaaccttaggctctgtgtaccatatggcataaacctaagcaggtagtactatacagggctgcctacgttatccttgttgaggctaaacagaagcggtcggtatacgacataca

SEQ ID NO: 97156 - DNA, 401 bp, Oryza sativa
  Clone ID: PAT_MRT4530_95187C.1
acgatttagttttttcttttgtacaaaaaggagaggataaatctagcggcggaagcaatagctgctagaggcggattgttctattctggtctaggccaggcgtatcggacgagatgcacttgcgcgatagagtgtgaccactggcggattatgcgacttgggggagctctactccgcttcccccggcctcaaatcgccccccggattcactcccccaattcctcgctctgctctgttgctgtattagagattattggcgggatttggtgagcgattgattctatgcgaggggattcaaatagatctgatccactggagggcaggtggggagatagtcgcggggttccactccatttctatccttacagtagccacatgatcggccccgttggtagccatgt

SEQ ID NO: 97157 - DNA, 1576 bp, Oryza sativa
  Clone ID: PAT_MRT4530_95188C.1
gcacgaggggtggtctgcataagcagttcatcttccaagagattgcacctctgccagtattccgggacaagcgattgatctgctacgagacgctctgctccagatggagatgtgcagcagagaggagattatggatctgtgccgtcaggctatacaccaaaacatgtgctatgtagttcccagagttttgcctcagcagctatgccttcctccaccttcaccaaaggatgaacttcattcgacgctgacaaaaacttcgactcgcaaattttcagacctgccacatgatatcctgatggatatcattgccatgttggagatccctgatgccctgcgtgcggcttccgtctgctcctcccttgcagagaagaggacctacaagttaactctgcctgagccacccatcagtaggaggtatctgcttgggtcttcagatggctggctggttaccgctgatgagaggtctgagatgcacattcttaatccgatcaccggtgaacagatcgctcttccgtctgtgataaccatcaaccaggtgacgcccattttcaaccacaaaggcgtgctctgcaaatatcgttactcacggcacacagcggagggtgttaccgactcacccatgacgcttcctcttgacaaactgcggtacttcttccattgcaaggcctttgtattttatgataaatctgtaaaaagctatattgtggtgctcatccataacccatgtgagcagctctcatttgctagattaggatatgacaagtggacatggctgccaccacacttgagatttcaggattgcacctacaaggatggcctattgtatgcagtgacgtcattgggggaaattttcgcgtttgatctcaacaccactgtgatcacagcaaagataatcatggacaggacaaaggagtattcgcgtgagagaatttatattgttcaggctccatggggtgatctgttgcaagtttggagaccaccacaaggagatgggcgtgggtatgatgaaattactggccgttcagctcttgtgagcaacactgggaggacaaaattatatagagttgatactctggctaaagagctagtggaaataagtgacctgggtgaccatgtattgtttatggggaataaccaaacttattgtctttgtgcaaaggaatacccactgttgaaggcaaaccatatatattttacagatgattctgagtgcttggcactcagaaccctgtggggtttccgtcttgatattggactccttaacttgagagataagagtgtggaggaaattgtatcccctcggctttggttgaagtgtcgcgctcctgtgttgcttgtaccgaatcctcggaagatgaattccacttgtcacaattagacacaacatccgggaacctccttttcttgggaattttaatgttgccaggcaagatagtattgatacattgtactaaaaaatagggaatgttcttatatgccctggtgcattgttaaatatgttgtagcctgttttattctgtgacatttgtaaggttattctttccttaatcttaattaattgtaactgattctagtt

SEQ ID NO: 97158 - DNA, 394 bp, Oryza sativa
  Clone ID: PAT_MRT4530_95189C.1
gtgtggtagcattgatttgaactcagttcaatccaagtatatagatcatgatatctccaaggaagaaattttttctagcttggatcctttagtgcagttggtagttgaagtaggaagggaagctactgctgcatctccacctcagtttgtagttcataaagtagaaattgtcactggtaaaagggaagcatcacctcctgagaagaaagaatgtgactacaggaatgagggcctcgggactgcaagatccggtggcactggcaccctcattggcagtagacaagtggagccaagggggaagagcatgggcactgcaattgacagtgagcccactgtaattgatctcttcaatgagttgcattgcagcaaactaaaggttttagtgaacctgtaa

SEQ ID NO: 97159 - DNA, 2210 bp, Oryza sativa
  Clone ID: PAT_MRT4530_9518C.1
atggcggccgcgccggcgtcgtccgcgtccgcggcggggaaccgcgaggcgttccgcgtggcggtgaccaacacgctggagcgccgcctcttctacgtcccgtccttcaagatctacggcggcgtcgcgggcctctacgactacggccctcccggctgcgccgtcaaggccaacgtcctcgccttctggcgccagatgtgtcggtcgacccggtatttgcatttcgtgttggaggaggggatgcttgaggtggactgcccatgtgtgactcctgaagttgtcttgaaggcctctggccatgtcgacaaatttacagatctgatggttaaagatgaaaagactggcacctgctatcgtgctgatcatttgctcaaggacttctgcaaggataagcttgagaaggacaatacattgtcaccagagaagacagcagaattcaaccatgttcttgctgtcttggatgatctgtctgcaaaacagttgggtgctaagatcaaggagtatggcattgttgctccagacaccaagaacccgttgtcagacccatacccctttaacctcatgtttcaaacttccattggaccatcaggcttgagcccagggtatatgaggccagagacagcacaaggtatctttgtaaacttcaaagacttgtattactacaacggcaacaagctaccctttgctgcagcacagattggacttctgagagtccgagaatttactttagcggagattgagcactttgtggacccagaggacaaatcccacccaaagtttcgtgatgtttctgatctggaattttttatgtttccaagagaacaacaactgacaggaaaatcagccatgaaacttaacattggacaggctgtatctgaggggactgttaacaatgagacccttggctactttattggaagggtctatctcttcttgacgcagcttggaattgacaaagatcgtctacggttccgacagcacctgccaaatgaaatggctcattatgctgctgattgctgggatgcagagattgaatgctcttttgggtggattgagtgtgttgggattgctgataggtctgcatatgatctgcgtgctcactcggataaaagtggtgttgcacttgaagcacatgaaaagtttgcagagcctagagaagtggagaagttagttataaccccgtcaaagaaggaactaggtcttgcgttcaaagggaatcaaaggatggttcttgaagcattggaggcaatgagcgagactgaagctttgaatatgaaatcagctttagaatccaaaggggaggttgaatttaaggtgtgtacacttgggaaagatgtcaccataaagaaaagcatggtttcaattaacatggagaagaaaaaggaacatcaaaggaaatttactccttctgtcatagagccatcctttggcatagggagaatcatttactgtctgttcgaacattgcttctatcaaagacctggcaaggcggaggatgagcagttgaatgtattcggtttcccccctcttgttgctcccatcaagtgcactgtctttccacttgtcaagatcgaaaaatttgaagttgttgccaagaaaatttcgaaagcattgacagcagcagggatttctcacataattgatatgacaggtaacacaatcggtaagcgttatgcaaggaccgatgaaatcggtgtccccctggcaatcacggttgacaacaccacgagtgtgactgtccgtgaccgggacagcaaggatcagatccgcgttgaggtcgatgaggtggcctcagtggtgaaggaagtgacggacgggcagagcacctgggcagacatcatgtggaggtacccggcacatactgcctcggccgctgaagaggaggaagcatcagaaacctgaagggggcaagcagtgcagtgcaagccaaaacctctggctggaattgagatggttgttgccatcctgcttttctgatacatgttttaacagaatgctaatgcagcattgagcattgttctgtaatctcgatgatttctctacatatttacagatgattttctcctgtttactgttagataaaaaaaaaaagtctaccaacatagttcccctgtacttggtttgcacatgaatgtttgtaccgtgtgaatgtgtgattgaaggtcattctagagtatcagtctttacattgtcaaaaaaaaaaaaaaaaa

SEQ ID NO: 97160 - DNA, 141 bp, Oryza sativa
  Clone ID: PAT_MRT4530_95190C.1
atggcggtggcgcctcctcaaacaagctaccaccactgcttgaccggtccaccgcgacatctaaggtggggggtcatcggacctgaagcgaggaagcgagagcctcctcgaccagtccacggcggccatggcatgggttga

SEQ ID NO: 97161 - DNA, 930 bp, Oryza sativa
  Clone ID: PAT_MRT4530_95191C.1
atgcaacagactagtggggccggtcggactggccttaccacgccagtcagaccggctaacaggcccgagcctgcccctatccctgcctctacccctgcccctgcccctgtccgtgccgatgagtctattggcaaggccggcaggatgttgtacagtcatgaagaagacattaggctggcaagtgcttggctcaaatgttcaacagatcctataggagtgaataggaagggtgagacctattgggtacatgtggccgagacttacaatgagacaactctggatggaaggaagagggatcccacctgtctcaaagggcattggcacaagattacaccgaaggtcactttattcaatgggtgttgcgtgcaactgaggaatacacctatcagtgggaggaatgacgagaagctcatggatgatgccttggcgctctacatcaagcgttcaaagaagcacaagcccttcctctaccaatccagaagttacgacttggggtactatcttgctgacgggatatacctggaatgggcaacgctcatgaagtcaattcgtcatccccaattgccgaaagataaattgttcgcacaacgtcaagaatccgcaagaaaggatgttgagtgtgcttttgggattttgaaggcatgcttcagagtggtggaaactcccacgcatttgtggctgatagctgacattagcgatataatgacggcttgtgtaatcatgcgcaacatgatcgtcgaggacgaaggacacgtttgggatactgaagacttggagtttgagggtgactacgagatcgaacctccagaacacacttttgggacaccacaacatattgctagattacttgagcgtgacagccaagttcaaagtcgaacaatgcacaaccgtctaaaaaatgatttggtggagcacatatgggcaaggtag

SEQ ID NO: 97162 - DNA, 411 bp, Oryza sativa
  Clone ID: PAT_MRT4530_95192C.1
atgtcgcacagcgaggaggaggaggaggaggaggagcgtgtggagggggacggcggtggtgtacacgacagcaaaaattcatgcacagcaaaatcaacaaatacaagatttagaacaaaatgcagcaagaatgcaagagcacatacttgtgcaatttatgcggtaatctgcaagggcgcacacacaaaattggacccagaggcttattgttttattttgtactaccttctctggctcggtgccgtccttggtgttagagacggcaaggcagatgaggtgcagcaaaaaggcaatggggatggcttcgaatgccatggcacgcatgtgggagacctcactgcaggcgcagatgtcgacgtgtctgaggtgaacaagccggcattgcagatccacaagtggataggcccgtga

SEQ ID NO: 97163 - DNA, 374 bp, Oryza sativa
  Clone ID: PAT_MRT4530_95193C.1
gtggcgctggcgatcgttattgtcttactcagatcgcctgccgtaatgcgtggtgggatcattcttaatagccacgaggctaaatgaggtgaacctatcgcggacagaaccactttgtcgccatcgcatttctgaggagctgacaaagtctgaatgcaggaattacacgaattcctgaacaaaatgcctctgaataggcggaccctagtttcaactgtgagtagaacaagttcggaactcagatcgtgagtgatgtttccgagctaaagggccgagtgaaagttgtaattgacttgaggtcctactagaaagtatattggccgtccggacagagagatggaccatccgtggatgcccacgcaactattgaagca

SEQ ID NO: 97164 - DNA, 684 bp, Oryza sativa
  Clone ID: PAT_MRT4530_95194C.1
aaagctctgaatcacaaggacaatatattcatgaatcacagggaacagcggcagacaaatgcgattgcacttgaggggaaggattggtacgaacctaacagtaatagaggtgatgattacacattgacaagagaagatggtgggagactgcggggagagggagcaccgtcatctgcaggaagcaatcagaagggctgcagcatgtatgaggaagacaacattcagggagaattgttactcgttcaggcagaacttgatgacatccaagggcaaattagtgcactgattgatcgtcaagaggagctgtatgagcgtgaatcacagctgaaagctatgctcgaagtatctaaagcatccaacaacacaatcaataataccccttcagttggtccaaaagattggtctgggagcttcttatgggactctcgggctgatgatgttcgttttaatgtatttgggatttcttcataccggcagaatcaaagagaggtaagtttctttattttgcatccttttaagcatattgcaaccttccagataatcaatgccatcatgagtggaagagatgtactggtcataatggctgctggtggagggaagagcctctgctatcaactacctgctgtacttcatgatggaattacattggttgttagtcctttgctttcccttatccaggaccag

SEQ ID NO: 97165 - DNA, 716 bp, Oryza sativa
  Clone ID: PAT_MRT4530_95195C.1
ctagagcggccgcgggcgtcgcactcgctcaacctcgtcgccggctggctcgtcctcttcggcggcggctgcgagggaggtcgccatcttgatgacacttgggtggcatatgttggaaatggagctgggaatagatcatctgctgtgtttagctggcagcaattagactctggcactccaagtggtcgtttcggtcattcatgctctatagttggagatgcattagtcctttttggtggaatcaatgatcaggggcagcgtttgaatgacacatggataggtcaaatcatttgtgaagagtctcgcaggatgaagatctcatggagactgctggaggtaggcccacatgcaccatatcctcgtggagctcatgcagcctgctgtgtggatgataagtttattgtaattcatggtggcatagggcagtctggaagccggcttggggatacatggcttcttgatctctctaatggcctccgatctggcatttggcaccaaatagaggatactgagcctttgcctttatctcggtctggccacactttaacttggattggtgggagtcgcatggttctttttggtggtagaggatcagaaattgatgtgcttaatgatgtctggctgcttgatatcaatgaaagggtcccaaaatggaaggagctaaagtatgaccttgtttagggttctaggtgaaatggcctttttccccggttttg

SEQ ID NO: 97166 - DNA, 1488 bp, Oryza sativa
  Clone ID: PAT_MRT4530_95196C.1
atggaggaggaggcggccgtggcgcggctggggtgcgaccaggtgctctccatcctgcacctgctccccgcggagtccgtgctctcgttcgccgccgcctgccgcgcgttccacgcgtgggcctcgtccgacgcgctctgggaggcgctctgccgccgcgactggggggcacgggccaccgccgcgctcgccgagcgccgccgccgcggcggcggcggcgtgccgtggcggaggatctacgccgaggtcgccctgctcggcgcgctgtccgcgcgccgggtccccgtcaagggcgcctcgccgcggccgcgggcgtcgcactcgctcaacctcgtcgccggctggctcgtcctcttcggcggcggctgcgagggagggaaagatgcaaaatctacttacctcctgacactctcaagccgggcttattcaggcttatggcatgaatttcacatgttaggtcgccatcttgatgacacttgggtggcatatgttggaaatggagctgggaatagatcatctgctgtgtttagctggcagcaattagactctggcactccaagtggtcgtttcggtcattcatgctctatagttggagatgcattagtcctttttggtggaatcaatgatcaggggcagcgtttgaatgacacatggataggtcaaatcatttgtgaagagtctcgcaggatgaagatctcatggagactgctggaggtaggcccacatgcaccatatcctcgtggagctcatgcagcctgctgtgtggatgataagtttattgtaattcatggtggcatagggcagtctggaagccggcttggggatacatggcttcttgatctctctaatggcctccgatctggcatttggcaccaaatagaggatactgagcctttgcctttatctcgttctggccacactttaacttggattggtgggagtcgcatggttctttttggtggtagaggatcagaatttgatgtgcttaatgatgtctggctgcttgatatcaatgaaaggtacccaaaatggaaggagctaaagtatgacctgtctagtgttctaggtgaaatgccttttccacgggttgggcattcagcaacgcttgtcttaggtggtaaaatcctagtgtatggtggagaggactcccaaaggcgacggaaggatgacttttggaccttagatttacctgctctgcttcaatttgagtcaggttccaagaaaatgacaaaaaggatgtggaaaaagctaagaattgatggtcaatgcccaaattacaggtcctttcatggggcatgtgtagacacttctggctgccatgtgtatatttttggcggaatggttgatggccttgtgcatcctgctgaagcctcgggtttgagttttcacatcaaactgcttgataatagatctgaagatctccctgaaaatatttcgacaaacctttaccatgttgacattccacctcgcagatattggccactataa

SEQ ID NO: 97167 - DNA, 603 bp, Oryza sativa
  Clone ID: PAT_MRT4530_95197C.1
ccacgcgtcggcaccatgtcgagcggcggcggcgcggcggcggcggtggacccggaggcggcgacggagctggtgcggaagggcgccacgctcctcctcctcgacgtgccccagcgcaccctcctcggcgtcgacacccaggtgttctccgtcgggcccaagttcaaggggatcaagatggtgcctccggggccgcatttcctctactactgctcccccaacaggcacgcaaatgagttcgcacctactgtcggattctttcttactactcacccatctgaggtgattgttcggaagtggcatgcacaggaggagagattaataaaactaccagaagaggaggaaatcagatattctgaagcagtaagacatttcgagtttgacagtcagcttggaccatataatttggattcatttggagattggaaacaactctcaagctacttgtcacaaagtgtcattgaacgtcttgagccaattggtggagaaattacaattgcatgggagtcatcatggatggataaagctccgcaaacagacatggagagacgtttaatggaccaactaaaagatggaaaatttgcaaaagaatgctcctgtgca

SEQ ID NO: 97168 - DNA, 1522 bp, Oryza sativa
  unsure (1)..(1522): unsure at all n locations
  Clone ID: PAT_MRT4530_95198C.1
atgtcgagcggcggcggcgcggcggcggcggtggacccggaggcggcgacggagctggtgcggaagggcgccacgctcctcctcctcgacgtgccccagcgcaccctcctcggcgtcgacacccaggtgttctccgtcgggcccaagttcaaggggatcaagatggtgcctccggggccgcatttcctctactactgctcccccaacagttatggccaaaacaacttacatgagaagccacatattgattattcttccacaatctgtgatcctttcaggcacgcaaatgagttcgcacctactgtcggattctttcttactactcacccatctgaggtgattgttcggaagtggcatgcacaggaggagagattaataaaactaccagaagaggaggaaatcagatattctgaagcagtaagacatttcgagtttgacagtcagcttggaccatataatttggattcatttggagattggaaacaactctcaagctacttgccacaaagtgtcattgaacgtcttgagccaattggtggagaaattacaattgcatgggagtcatcatggatggataaagctccgcaaacagacatggagagacgtttaatggaccaactaaaagatggaaaatttgcaaagaatgctcctgtgcagtctgagcggagaggatgctactatacaactatccctgcttcaattaagcatagtaacatctctggggatgagctaactgcattaaatctggacaaaacatgcttgctggagagtgttttggccaagaattaccaaggccaagaggatttactcttgggagagctgcagtttgctttcatagcatttatgatggggcagtcactggaggcttttatgcaatggaaagcattagttagtcttcttttgagctgtagtgaagcttttattagggcaatttactatcaactcaagcatggctttcagcacacacaggataatagaagtggtgaggaaatggggaattctctgttcttagatgaagcatggttttcaagagacatatttctctatcgtctttctaagacagatttctttgcggtgatacttgaagctacagttgttgatggtgaccttctgtcatggactcgaaaactaaaatcacttctggagaccacatttggatgggatcttgacaacaatacggtgaatctaattgatgaagatgatgagtttgctcctgtggtcgtggaaatggatgggtcatagactcaggtggacttttgaagccatattcagctggctacttgatcagtgatggagatgcatacaagattacaagtagggctttcttggcagtatgtatcctggtttcctaaattcctgtttgtaaatatacgaagaataatttctctttgcactaagcggtctatcttgtactagtacgctatttaccgagccttttatcttntgcagcgaacggcagttttctctatggtttgttctagtacttccagtaaagttcttatccaaaaaaaaaaaaaaaaaa

SEQ ID NO: 97169 - DNA, 255 bp, Oryza sativa
  Clone ID: PAT_MRT4530_95199C.1
atggtgagttatggatgcaactaccgagatacccaagggaacatcgcgatggggcggcaggtcgggttccatccactccaccgccgtgaacacacgggcccccgaccaaccaagaacaagcacggcgacgacgcaacaacacatgggcgtagacagcctagggaggaggaggagacggcggggaggttggttaccttggccctcatggtcgcctcctcgtcggcttcttcttctttttcggcggcggcggcggcg

SEQ ID NO: 97170 - DNA, 2596 bp, Oryza sativa
  Clone ID: PAT_MRT4530_9519C.1
tcgctccatttgattgatctcgtcgtcgtcgttgacgtcatcaatggcgggtggtttcgccgtcgaggccaaggtcgccggcggcggcgagcggcgggagttcaaggggaagatcacgtggtacgtgtggctgtgcggcatcatcgcggcgacgagcgggctcatgttcggctacgacgtcggcatctccggcggcgtgaccgccatggacggcttcctgatcaagttcttcccgtcggtgtacgcgcggaagcaccgcgcgagggagaacaactactgcaagttcgacgaccagcggctgcagctgttcacctcgtcgctgtacctcgccgcgctggccgccagcttcgcggcgtcgaggctgtgcacgcggctggggcggcggcgcacgatgcagctcgcgtcggtgttcttcctcggcgggacggcgctgtgcgccggcgcggcgaacctggcgatgctgatcgtggggaggatctgcctcggcgtcggcgtcgggttcggcaaccaggcggcgccgctgttcctgtcggagatcgcgccggcgcacatccgcggcgcgctcaacatcctcttccagctcgacgtcaccatcggcatcctcatcgccaacgtcgtcaactacttcacctcgagcgcccacccgagcaccgggtggaggtactccctcggcggcgccggagtgcccgcggcggtgctgttcctgggctcgctggtgatcaccgagacgccgacgagcctcgtggagcgcgggcggcgcgacgccgggcgcgccacgctggagaggatccgcggcacgcgcgacgtcggcgacgagctggacgagatcgcgcgcgcatgcgaggcggcggcggcgctgagcgcggaggagtcggcgtaccggaggctgcggcggcgggagtcgaggccgccgctggtgatcgcggtggcgatgcaggtgttccagcagttcacggggatcaacgccatcatgttctacgcgcccgtgctattccagaccatggggttcaagagcaacgggtcgctgctctccgccgtcgtcaccggcggcgtcaacgtcgtctccacgctcgtctccatcgtcgccgtcgacaagatcggccgccgcaggctcctcctccaggcctgcggccaaatgctcatcgcacagacagcggtgggggcgatcatgtgggaacacgtgaaggcgaacggcaatccgggcgagaagtgggcggtggcgatcgtggtgctcatctgcgtctacgtctcgagcttcgcgtggtcgtgggggcccctggggtggctaatcccgtcggagacattccccctggcgacgaggacgacggggttctccttcgccgtgagctccaacatgctcttcaccttcctcatcgcgcaggccttcctctccatgatgtgcagtatgaaggccttcatcttcttcttcttcgctatctggatcgttatcatggccgccttcgtcttctggctgctgccggagacgaagggggtgcccatcgacgagatggtcgacacggtgtggcgccgccattggttctggaagaggttcttcaccgatgccggggatggcaggattgtagatgcggtcttcccggctgaagcgtctccgacatggaaagggattgaacatgggttgcagttgctgaagacaggacttatatggcgaattggggatgggaccaaggtcaggatttggcgggataaatggattccccgagcctcctctctcatgcttatgggaaggagcggacgctgccgtcttcgctgggtctcgcagctgctgaaacaaggggaaaagagctgggacgttgatctgatcaagcacgtctgtcacccacttgatgtggaagagatcctgaaaatcaatttgtcgccataccaggatgaggatttcctagcttggcactacgaaaaatcagggattttctcggtgaggtctgcttatcgtttagcgtggctgaacaagttccatccggatggagaaggcagtagtagagaaacggacggtgatcgctccatctggcgaagaatttggagtacacctgtgccaccaaaggtccgtattttcgcctggcgtctagcccgaaattatctggctacccagaagaacaggtgtaaacgaaagctgcaagcagttgcgacctgtactatctgcggccagggggaggaagacgagtttcacgcggtgatttcatgtacccggccaagggccctccgtgaaactctgcgggcgagctggaggttaccggataagcgttccctgtcgaagctaggcccagggtggcttcttgggggactcgataagctgagcgaaaacgagcgggcgcagtttctccttgtcctatggcgagcttggtacctgcgtaatgactgtgtcttcggttctgggcaagcgacggtaaagggctctgcatctttccttctgaatctatggaattccttgtgcccgtctggcagtgcaacgctggaaaatgagaaaggaaaaattgtgtcggagggaagacaaagtgatgtgaatgggtgcggggaaagaacccaagtggcaggtgtgtggcaggcaccagctatgggatgggtgaaaataaattggtag

SEQ ID NO: 97171 - DNA, 1982 bp, Oryza sativa
  Clone ID: PAT_MRT4530_951C.1
ctagagacctgtttttgtcacttccccattgcactgaggtgacacttcttcaactagttgggatggccatgcaatgcaatgaccaatagcgtctctaatatagttcaaatttctgtgcggccggaacaattcagcatctccacatataagactgtctatcactactttgtagcactcccttcccagcattgttcctccgaccatttctaaggggtcttgactttgaatagtagctcttgcaacacggttatatggacgaacaattctcttaagaaagacatcccttccaaccacattttcacaagctaatgctgcccttttgaccttagcatgtttagttgttcccacattggccccttcaatttcagtaggcttgttgttattgtacctggccatatgcttctgtacccccttcgtaacatgcatattttgattaacttgcgattctctggcaactcctggttgcaccttcctagcatgtttgttcagactaagctgcaattctctagcaattcttggttgtatcttcatagcaggcctcttctgatttagttgcaatgcttcaacaattcttggttgtatgcgcacgagaagtgagccggtggtttcggtggaaatgcatccgatttcatttagcacggtattgtatttctcttggatgacgaaagaatggctgcttgcagctttgtgaacatcctggaatggctgtccaagacttccttcatcacttcggtcttctagcatgtcgggggatgcatcggggttgtagtcttgctcctcagcaatgaactcccatttttcatccttaagagattgccgtacaacatcaccatgatcatacacaatctcgtgtgtttctgaagaagcatcaaatgacttaaccaatccattgtagaacatttcatcagcaggccaccgtactttgattctcgagccgacaatgctaccgtcaagagcttttttatttgaattaggagcctctttagttccctgtacaatttccggtttcaactcatccccactatctgctggttgtcctatagttttacccatcatggtcgaagatttaggagacactacttccttcatgtcatgcataaaagcaccaacattgttatctccagcaactatagcatcttggagaaatgatgtaacaagattgctatactcggttatgggagcaccctgaagtagtttgatgaacactggctttaacttttcatggcagagtcctattaccctctctgcaagtacaaaagatgctggaggagtttctttttcttcctttttaacattctgaagcaggcaggatgccagatctttaattagatcttgttccatatcagtaatatcttcgatcacaaacttcattatggtttccatataggatataacatgctcctgatgagtattggatacggtgcggaagaaatggtgaaacatatcccgtatcagatcattgcagtcaagatctaacaacaaggcacaaccccgtatccttgcaaaagttccaagcattgaaacccttgttccataggaggggcagtccacatcatccagttcacagaagaccccaacaacaagcttgagaacatccttcatcacatcatcatcataagggggatccggcgcgcggatcttgatcagcgtggttaaacacgacgctacggcgagcttcactccggggtcagtgtgatccagtagctctttcttaatcaatgctctcataacagggataagagcactgtgaattctgtctacctcacactgattcactctgtacaacaatttggctgcttcctggagcaacctgagcagctcgccgtcgtccggaagcgagctcaggcgggcgccgacgtcgcgcagccgccgccgcacctccacctccgcggcgtcccgctccattcggcggcgacacagtcggagagaagcagtagcactgtttgagtgaaggggactgtggttgtagccggtcctcgtgc

SEQ ID NO: 97172 - DNA, 313 bp, Oryza sativa
  Clone ID: PAT_MRT4530_95200C.1
tgtgaaggaaaaaacctgacctatgatgaggtgttgttgtgcctgaccaaccaactgtgtgaggagtgctgtgtgctgatgtgatgatgtgatgcctgtggaaatgtctgacaatgaggagatgagattgactgaggatgtggagaaattaggtgagtgctgaaatgtgccatgttgctgtgtgtgtgtgcacctgggcaatgccccttgaatgtgtgcacaatgccacagtccacaaaaaatgaaaaaatcccctggagggagagaaaaataatatgagaatagactatagtaaaaaaaaaaaaaaaaaaaa

SEQ ID NO: 97173 - DNA, 1395 bp, Oryza sativa
  Clone ID: PAT_MRT4530_95201C.1
atggcagcgaagggaaacccagcggatgcggtcgccatcgtggccgtgccgttcccggcgcagggccacctcaaccagctcctgcacctgtcgctgcagctcgcgtcgtcgtcgcacgggctcacggtgcactacgctgcgccggcgccgcagctccgccaggcgcgggcgcgcgtgcacggctgggacgacaaggccctcctctccgtccagttccacgacctcggcgtctccacgtacgtctctccgccacccgatcccaccgccgacgcgcccttcccctcccacctcatgcccctctgggaggcgtacaccgcggacgcgcgcgccccgctctcggcgctccttggcgagctgtccgcgtcctaccgccgggtcgtcgtcatctgcgacatcatgaactccttcgccgtcaaggaggcggcgcggctgcccaacggcgaggcattcgtgtgtaactgcgtagccgtgtcgtccgccaccgggagcatcgaccccgggcaccggctcctgcgcgagaacggcctccgcttcattcccatggatacctacttgaccaaggagttcatggactacgagcaacagcgagcaagagcggcgcagtcgatctcgtcctgcgccggcatcctcgcgaacgcgtgccgcgcgctcgagggtgaattcatcgacgttttcgccgagagattggatgccagcagcaagaagctcttcgcgatcgggccgttaaacccactgctcgacacgggcgcattgaagcagggccggcggcgacacgagtgccttgactggctcgacaggcagccaccggaatccgtgctctacgtgtcgttcggcacgacgtcctctcttcgggtggagcaggtcgcggagctcgccgcggcactgcgcggcagcaagcagcggttcatctgggtgctgcgcgacgccgaccgcggcaacatattcgcgggctccggcgagagcgagagccggtacgccaagcttctgtccgagttctgcaaggaaaccgaaggcacgggcctggtgatcaccgggtgggcgccgcagctggagatcctggcgcacggcgccacggcggcgttcatgagccactgcggctggaactccaccatggagagcctgagccacgggaagccgattctggcgtggcccatgcactcggaccagccgtgggacgcggagctggtgtgcaactacctcaaggccggattcttggtaaggccatgggagaagcacggtgaggtggtgccggcgacaaccatacaagcggtgatcgaaaagatgatggcatctgaagaagggttggcggtgcggcagcgcgcgaaggccctcggccatgccgtccgttcatcgcgcaatgatcttgaggacttcgttgatcatatcacaagatga

SEQ ID NO: 97174 - DNA, 862 bp, Oryza sativa
  Clone ID: PAT_MRT4530_95202C.1
ggagagtcccaagcgagaggagaggagaggggaggcgatggggagcgggagcaagaagaagagcggaggaggggatgaccagaggccgctcctctggaggctcccggaggtcacctccaccgagctcggcaagatcggccccgccttcggcctcggcgtcggctgcggcgtcggcgccggcgtcggcttcttcggcggtgcaggattaggttatggatttcccggactcacattaggctttggagttggagctggatgtggtgtaggatttggctttggttatggattggggaaaggaattgcttatgatcaaaacaaaagatactctaatgttggcacgatgttccaagaagctccaagtcttccgatggacaccgttgctggtttggttgatgagctggttgtgaacaccaaaaagcttgtgagagcaacttcaaaagagattgaaaaatggcgttgagcttataattgcctccatcagctgtgtcagcctatgaaaactgggttatcattgaaggttataagcaagtatgctgttgtcttagatgaaggtttaggagctagccatgggatgaagcctattgcaagcagtatgctatcttagatggaatttaggagttagtcgtgggatgcagactattgcactgcaatgttctttcttattcttgtgtacatcagtaattatgtctatatttaattagggtaatgaaatgctattgcagtctctgcatgttagaaatccccctgtgatgaacagtgtcagttagaattcaggaacaaaatatgagactggtgatctcatttggctgcttgttattactctgtcaatggttgtgctcaaaaaaaaaaaaaaaaaaaaaaa

SEQ ID NO: 97175 - DNA, 409 bp, Oryza sativa
  Clone ID: PAT_MRT4530_95203C.1
tgcaggtgacgaccccaaggacgtgaaggcgaggctcaaggtgtgggcgcaggcggtggcgctcgcgtcggcctcccggctgggttcttgatacatttttatcgatcgtcgtacgtgccatcaaccaacgttttgtcatgagattgaaatagtgtattcgaaaaaaaaaattctcccctctttcgtcggctcggctgtcacgtgtcagtcctcttcgtcgagcaataagtacatcgatcagcgatcagctcttccttcaagcgtgtgtgtttccacagtacataacttgaagtccaggaatatgtgtgaaaaaaaaaaagcattagcggcgtgtgcaatcgccaaaaaaaaatggaagaaaaaaatataaaaagaagttgtttcaaaaaaaaaaaaaaaaaaaaaaaaa

SEQ ID NO: 97176 - DNA, 445 bp, Oryza sativa
  Clone ID: PAT_MRT4530_95204C.1
gaaacaaagagacgcaaggaaatttcttgtcactgcacaccagtgaaccaccacacacttcactttctattctccacacattaatcacacactgattacatgcttaaatagcacacacgcgcagcagcacactagccacgtttttgccgcactaaccggccaccactcacatgacttagccactaattaaccactaatcacgtctctatgcatgaaggccatatctctttgcatgcaaatgcactaacacacatgcaacacagctaactgatccacaatccatgccactactccagctacttgactcggccactactcccagccgatatccacatataacttcctacatgcaagcacttacatgcagatcatggattttcttgatcaagctaactcatgcacgcactaatcacaactcacacaataaacaacaagattaagtcta

SEQ ID NO: 97177 - DNA, 3063 bp, Oryza sativa
  Clone ID: PAT_MRT4530_95205C.1
atggacacgggagctacagatcatatcacaggcaagctggaaaaattgacgactcatgaaaagtacaatggcaaggaacaaattcatacggcgagcggtgcaggtatggatattaagcatgttggtcattctattattcatacccctgtccgcaatattcatctcaaaaatatcctccatgttcgaaaagttaaaaagaatctcatatctgctcatcgcctagctgttgataataacgcttttgttgaagttcactcacgtttctttgctatcaaggatcaggccaagggtcatcagcttccctatcccaagtcctctagtgtgtcaagtcatcctttagagcttgtgttttcagatgtgtggggacctgctcctgtgtctgttgagagtaggaagtattatgtcagtttcatagatgatttcagtaaatttacttggatttatctcttaaagaacaagtctgaggtgttttccaagtttcatgagtttcagcagcgtgttgaaaggctgtttaaccgaaagattatttctatgcaaactgactggggaggagagtatgagaaattacactccttctttaccaagattggtatttcacatcatgtctcttgtccctacgctcaccaacaaaatggttccgcagaacgcaagcatagacacattgtagaggttgggttagctctcctagctcatgcctcagtgccgctaaagttctgggatgaggctttcctagcagcaacatatctcataaatcgccttcctagcaaagttattcaatactccgcccctttagaacggctccttgatcaaaaacctaattactctgctttgagaacgtttggttgtgcttgttggccaaatcttcgtccttacaataagcgcaagcttgagtttcgctcaaaacaatgcgtttttcttggttatagcaatatacataaaggttttaagtgcctcgatgtatctactggcagagtttatatttcaagggatgttgtctttgatgagaatgtctttcctttctctaaattgcattctaatgctggagctagattgagatcagaaatcttacttttaccttcttctttgattcctaatggggttggatatagtaatgatcacatgcttaatactcctgaacgttctaatggtgtgtctgagcatgttacagatcagcatgagcacttgaatgataattcaggaaatatggagaatattgcttcagggaatacagaggtttttgaagaaaatgcagaagatccagacggcacagaagatcctgatcatgcatcagttattcagcctaatgatatgaggacagttctactgcacatgatggtgctagctctgcagctgcgtcacagggagcaagaaggcccgccgactgccacatcgtcggcacagcatagtgcgcagcagcactcgcaggcacagcatagtgtacagcagcacggcaatgatggcaatgatggcgcagagcagcagcagcagatggtacagcgtccaatgactcggttgcaacgaggtacaaggaaagaaaaggtatataccgatggaactgttcgatattcttttttagctatgactggagagccaaataatctagctgaagctttagctgataataattggaaacatgctatggatgctgagtttactgctcttctagataataaaacttggcatcttgttccgcctagtagtgacaaaaatattatagactgcaaatgggtttataaaattaaaaggaagtctgatggaagtttggatcgctataaggctcgcttagtagctaaaggatttaaacaacgatatggaattgattatgaggatatgtttagtccagttgttaaagcagcaactattagaactattttatctatcgttgtatctagaggttggtgtcttcgtcagcttgatgtacaaaatgcttttcttcatggttatttggaagaggaagtttatatgagacaaccatctggatatgaagataagagtaagcctagctatgtttgcaagttagataaggctatttatggattgaaacaggctcctcgtgcttggtattcaagcaagggagatgttacagtctttgtgcttatctatgttgatgatataattattgctagttctacagaaggagcagtaactgcattgctgacagatttgaggcaagaatttgcactcaaggatctaggaaatcttcattattttctgggtatagaggtgagtacagtggatgatggtatactcttaaagcaagaaaagtatgccacggatttattaaaaaaggcaggatctgtggatgatagaaggtcaactggaggtgtgtttctgggatccaatttagtgtcttggagtgctaggaaacaagcaacagtctcgagatcaagtacagaagcagaatataaggcagttgctaatgcaactgcagaagttatgtggatacaaactttacttaaggaaattgggattaatgcacctatgacagcatgtctatggtgtgataatcttggtgcaacgtatttgtcagttaatcatgtttttcatgccaggactaaacatatagaagtggattatcattttgtcagagaaagagttgctagaaaacaactgtgcaagagtgccaccaatatcgggcaaccctcaccgtgtgacctcgtctcatctcacaaacggcatgattcacggggtggaccagtcattggctataggttcacggtgaacccacggcggcagatccagcaccactacggcaagatctgtgcgaccatcgtcactgtcgacatgccccgcaagcgcatggctgaggccatctgcatgctccatgagctcaagctgttgtccgtctctggtacgggatggatattgctggtcaaggatcgtaaagggtctttcccacctcaaaagctagccattgagatttcatctgtggcataccttcagcaaatctggtggtttgaagtggttggaaagatcgatttcagcttccctgtgggaacctacagcttatacttcaggattcatctcggaaagttctacaagcgatttggacgccgagtttga

SEQ ID NO: 97178 - DNA, 3099 bp, Oryza sativa
  Clone ID: PAT_MRT4530_95206C.1
atggacacgggagctacagatcatatcacaggcaagctggaaaaattgacgactcatgaaaagtacaatggcaaggaacaaattcatacggcgagcggtgcaggtatggatattaagcatgttggtcattctattattcatacccctgtccgcaatattcatctcaaaaatatcctccatgttcgaaaagttaaaaagaatctcatatctgctcatcgcctagctgttgataataacgcttttgttgaagttcactcacgtttctttgctatcaaggatcaggccaagggtcatcagcttccctatcccaagtcctctagtgtgtcaagtcatcctttagagcttgtgttttcagatgtgtggggacctgctcctgtgtctgttgagagtaggaagtattatgtcagtttcatagatgatttcagtaaatttacttggatttatctcttaaagaacaagtctgaggtgttttccaagtttcatgagtttcagcagcgtgttgaaaggctgtttaaccgaaagattatttctatgcaaactgactggggaggagagtatgagaaattacactccttctttaccaagattggtatttcacatcatgtctcttgtccctacgctcaccaacaaaatggttccgcagaacgcaagcatagacacattgtagaggttgggttagctctcctagctcatgcctcagtgccgctaaagttctgggatgaggctttcctagcagcaacatatctcataaatcgccttcctagcaaagttattcaatactccgcccctttagaacggctccttgatcaaaaacctaattactctgctttgagaacgtttggttgtgcttgttggccaaatcttcgtccttacaataagcgcaagcttgagtttcgctcaaaacaatgcgtttttcttggttatagcaatatacataaaggttttaagtgcctcgatgtatctactggcagagtttatatttcaagggatgttgtctttgatgagaatgtctttcctttctctaaattgcattctaatgctggagctagattgagatcagaaatcttacttttaccttcttctttgattcctaatggggttggatatagtaatgatcacatgcttaatactcctgaacgttctaatggtgtgtctgagcatgttacagatcagcatgagcacttgaatgataattcaggaaatatggagaatattgcttcagggaatacagaggtttttgaagaaaatgcagaagatccagacggcacagaagatcctgatcatgcatcagttattcagcctaatgatatgaggacagttctactgcacatgatggtgctagctctgcagctgcgtcacagggagcaagaaggcccgccgactgccacatcgtcggcacagcatagtgcgcagcagcactcgcaggcacagcatagtgtacagcagcacggcaatgatggcaatgatggcgcagagcagcagcagcagatggtacagcgtccaatgactcggttgcaacgaggtacaaggaaagaaaaggtatataccgatggaactgttcgatattcttttttagctatgactggagagccaaataatctagctgaagctttagctgataataattggaaacatgctatggatgctgagtttactgctcttctagataataaaacttggcatcttgttccgcctagtagtgacaaaaatattatagactgcaaatgggtttataaaattaaaaggaagtctgatggaagtttggatcgctataaggctcgcttagtagctaaaggatttaaacaacgatatggaattgattatgaggatatgtttagtccagttgttaaagcagcaactattagaactattttatctatcgttgtatctagaggttggtgtcttcgtcagcttgatgtacaaaatgcttttcttcatggttatttggaagaggaagtttatatgagacaaccatctggatatgaagataagagtaagcctagctatgtttgcaagttagataaggctatttatggattgaaacaggctcctcgtgcttggtattcaagcaagggagatgttacagtctttgtgcttatctatgttgatgatataattattgctagttctacagaaggagcagtaactgcattgctgacagatttgaggcaagaatttgcactcaaggatctaggaaatcttcattattttctgggtatagaggtgagtacagtggatgatggtatactcttaaagcaagaaaagtatgccacggatttattaaaaaaggcaggatctgtggatgatagaaggtcaactggaggtgtgtttctgggatccaatttagtgtcttggagtgctaggaaacaagcaacagtctcgagatcaagtacagaagcagaatataaggcagttgctaatgcaactgcagaagttatgtggatacaaactttacttaaggaaattgggattaatgcacctatgacagcatgtctatggtgtgataatcttggtgcaacgtatttgtcagttaatcatgtttttcatgccaggactaaacatatagaagtggattatcattttgtcagagaaagagttgctagaaaacaactgattagcaaagtgctgcagttaagaagctcaagaaaagtgcaagagtgccacaatatcgggcaaccctcaccgtgtgacctcgtctcatctcacaaacggcatgattcacggggtggaccagtcattggctataggttcacggtgaacccacggcggcagatccagcaccactacggcaagatctgtgcgaccatcgtcactgtcgacatgccccgcaagcgcatggctgaggccatctgcatgctccatgagctcaagctgttgtccgtctctggtacgggatggatattgctggtcaaggatcgtaaagggtctttcccacctcaaaagctagccattgagatttcatctgtggcataccttcagcaaatctggtggtttgaagtggttggaaagatcgatttcagcttccctgtgggaacctacagcttatacttcaggattcatctcggaaagttctacaagcgatttggacgccgagtttga

SEQ ID NO: 97179 - DNA, 333 bp, Oryza sativa
  Clone ID: PAT_MRT4530_95207C.1
atggcggcggcctcggcggcgccgttccaggtgagcatctccaccagccggtccaccaccgccgctgacgtgccgacccgtcggagcgcggcctcgccgagccgcgggtttgtcacgaccgttccagctcccgtgacttcagggtacagctttctttcccaaagtcacaacgccaccttgagcttcctttacacgaaacggccgctgctaagcagccattggagggacaaaattcctaccgtttcattatcgctgttatggccgcagacagaggacttcccttcattgaaacctgccgctgttgctgttggaacagagaatggcgtcccctga

SEQ ID NO: 97180 - DNA, 963 bp, Oryza sativa
  Clone ID: PAT_MRT4530_95208C.1
atgtcgaattacatgacgtacctactgtttgtcaatcctgagatgttgatgccaggcacaaggcgaaacctattcacagacgcctacaacgaactgaagggtgtcgtcaaggaaaagaatccaccactggatgaaagagaacttgcagagagaataatcgccgaggtgcagcaacaactcgaggagataactggggaagataagtcaccatccagtaaaagagggctcattgaagatgcttggtccattgctgaagagctcctgaagttagaagatgacgagaagatgtggagagtgattgaaggcgtatgggtggagatgctttgcttttctgctgccagatgccgagggtacttgcatgctaagggcctcggtacaggcgtggagttcctgagctatgtttggctactcttgcattacatggggatggagaccttggcagagaagctggcaagaggagacctccaaaacagaggacactcaggtaatttgcggacattccatgttagagagtcctctggtgaagagcaggttgctggaccatcgacttcttatgctaacggagacaacggtgatcaacatgttgttgctccattctctgaggatggctttaccttggctggggatgaaaatggactgctggttatttggaccggtcagaccgggcaggtgctgccggtcaatccggagctatgtgagcggtcagactggctagcccacgtcggccccgaccgccggccctcgcggcatcacctttgtcggccccgctgccggcccttgcctctgtggcttcgtcggcaccagtgcatctacaccatcgatgaagaaggagctaggaaggacaaagcaatgtcggggttgtgtgcccatgatgagcttgacggcagcccaattgagtttggactggcaaggcatcttcgtctaatttttaaaattgattgggtgcagtgcctctatgggtag

SEQ ID NO: 97181 - DNA, 1289 bp, Oryza sativa
  Clone ID: PAT_MRT4530_95209C.1
atggatatggcgaggtggagctggagggggtggtggacgctctagcgcccgcctcccgtacgccgccgatctgcgccgctgctggaggggaggaggggcgcgacgccggcgcagacgctgggcaacatcgtcgtctccatcgtcggcaccggcgtgctcggcctcccctacgccttccgcacctccggctggctcgccggagctctcggcgtcgccggcgccggcgccgccaccttctactgcatgctcctccttctggattgcagagacaagctacgggagcaagaagaggtggatcacgacggcaactacacctatggcgacctcggcgagaaatgcttcggcgccattgggagatacttcaccgaggtcaccatcatcctctcccagaccggcggctccgtcgcctacctcgtcttcatcggccagaacatctgctccgtcttccccaccaccgccgccggcggcgaggagccgccgcgtcgcgtgtcgccggcagccgtcgtcctcgccgtgctcctgccggccgaggcggcgctctccttcatccgctcgctgtcgtcgctggcgccgttcagcatcctcgccgacgcgtgcaccgtcctcgccgtggccaccgtcgtcagggaggacgtccagctcctcgccggccgcggcgggagcccattccaggggcggagcgccctcgcggggctctggggcgtcccgttcgcctgcggcgtcgccgtgttctgcttcgaggggttctgcctgacgctggcgctggaggcgtccatgtccgaccggaggaggttccgccccgtgctcctccacgccatcgccggcgtcaccgccgtctacgtctgcttcggcgtctgcggctacctcgcctacggcgacgtcaccagagacatcgtcactctcaatctccccaacaactggtccaccgccgccgtcaagatcgtgctgtgcgtcgcgctggcgctcacgttcccggtgatgatgcacccgatccacgagatcgtggaggcgcggctgcggcggtgcaggcgagccgcgtggcggtggtgggcgcggtgacggcggtggcgtgcttcgtgccggcgttcggggagttcgcggcgttcgtggggagcacggtgtgtgcgctgctctccttcgtgctcccggcgctgttccacctccgcctcgtcggagcggcggcgagcgcgtggcggcgcgcggtggacggcggcttcttgctccttgggctggccttcgcggcccatgggctttacacggttgtctcgggcctctgaactgggccgtaa

SEQ ID NO: 97182 - DNA, 706 bp, Oryza sativa
  unsure (1)..(706): unsure at all n locations
  Clone ID: PAT_MRT4530_9520C.1
tattttttcaggtaatcaagcacctgaggtacagtgctgtttctgttccacctcaatatgaagaaaacttcagaaaggcgatctgggcatttcagttccaaagagtttatgaccctgtgacggaagatattgttcatttgtcaggcattccccatggcagtagtgaagacttggactttttgggcccatggctaccacagactgttgctaaaggcattgcccaagggaatatcgatccgattaccaaggaaccatttgagggcaaaacagagagtagcgcactcgcttttgataaagtgcatctgaacagagagtccagtgctccttcaaatggaaagaaaaagcttgatctacctgtccaaagaaacgtattgacaaattacttctgcttagcatcgcttgaggcaaaacggaagttcagagcacctaaggttacacctaagcaacaagtacttaatgggtctttgcccagtcccagaattgaagactctggtacccctgatttaattgaagatactagcttgccatcaaataacattcaagtttatcagtgtagttctgagcattttagctcangaacccctctagatgattcaatcaataccgcctctcaatgtagttctgagcgtgtccgctgtgacatccctncggatgattcagccagtgttttcacccagtgntctcatgatattggtagtgatcctgc

SEQ ID NO: 97183 - DNA, 684 bp, Oryza sativa
  Clone ID: PAT_MRT4530_95210C.1
gaaattgttcctctcaatgctggcaatgtgcttgtaatagaagacaacgaaccagctgccagatggcttgttcttataaaccaagcattaaaccggccagctgaaaccaatgccaatgtctttcagaatgagccatctccctctgttgattctagtgtctctcgagcttcttcaagcctcgatacttcgttctctgacctagcaaaaacatcaagtagttccacaatcttccagaagtctaatctaaaatccattagaaaatccttcatgccagtccatcgaaaacggcttaaggcctgcaactgccctgtagagatggccaaatcatcctacagggatgcttgctttggttgccccaaagcatatgcttacgaaatagattcgtcagaagaggatgaacgggaagaaaagaaagggcaatcaagggattctaatggatctgtgcgcagtgaagtaatttctcctcccaccgcaagggatgaactaaaatataatcttatagcatggatgcatatcagtgagcatgacactgcaccagacaagcttttgtttcatctgcagccatttggcttcagtaaggtgatatggttcggagatctgaactatcgtatcgcactgagctatgcagataccaaaaattttttgatggaaaataattgggatgttctctttgaaagggatcag

SEQ ID NO: 97184 - DNA, 867 bp, Oryza sativa
  Clone ID: PAT_MRT4530_95211C.1
atggcgaagactatggaacaacgacggcgagggacagagaatcgcgcggatctcactaagccgaaggcctcttgggcgaatgatagtctaacaagggtgggatctgatcacaacccaattctggtggagttggaaaatcaaataaccccttctggtcctaaatctttcaaatttgaaaaagggtggattcagcaagaaggttttaaggcttggataattgacatatggcctgagaggaggaaaaaacatatcctagatcactggaagtgccagagatatatcttgagaaggaaaatgagaggatgggctatgaataagaagaaggagataaacaaggaaaaagaggagctcatcagtcaaatacagaaaatagatgaagaagtggagaagaaagaactgacatgtgaagagtgggggcatagatatgagctggaaggtgctttgaaccagattttcatctctgaagagatttattggcaagggagaagtggggagaaatggatgttagagggagatgccaacgcagccttcttccatggagtagctaatggaaggaaaaggaaaactacaataaggagtttggaaggggaggagggacctattgagaatgctgatgagttgaaagagcacatttatggtttttataagaaactgtttggaatggaattacctcctaaattctgtcttagccataatatgtgggagggaagaggcagactttcttcagaagacaatatagaattaactaaaccattcagtatggaagagattgagggtgctttgagagaaatgaagactaatacggctcctgggccagatgggttctctgttagcttttacaaagaattttggcctcaagtgatgtga

SEQ ID NO: 97185 - DNA, 967 bp, Oryza sativa
  Clone ID: PAT_MRT4530_95212C.1
agatacttcaccgaggtcaccatcatcctctcccagaccggcggctccgtcgcctacctcgtcttcatcggccagaacatctgctccgtcttccccaccaccgccgccggcggcgaggagccgccgcgtcgcgtgtcgccggcagccgtcgtcctcgccgtgctcctgccggccgaggcggcgctctccttcatccgctcgctgtcgtcgctggcgccgttcagcatcctcgccgacgcgtgcaccgtcctcgccgtggccaccgtcgtcagggaggacgtccagctcctcgccggccgcggcgggagcccattccaggggcggagcgccctcgcggggctctggggcgtcccgttcgcctgcggcgtcgccgtgttctgcttcgaggggttctgcctgacgctggcgctggaggcgtccatgtccgaccggaggaggttccgccccgtgctcctccacgccatcgccggcgtcaccgccgtctacgtctgcttcggcgtctgcggctacctcgcctacggcgacgtcaccagagacatcgtcactctcaatctccccaacaactggtccaccgccgccgtcaagatcgtgctgtgcgtcgcgctggcgctcacgttcccggtgatgatgcacccgatccacgagatcgtggaggcgcggctgttcccgtcggcgggcgggtgggcgcggaagcgcgcggcggtgcaagcgagccgcgtggcggtggtgggcgcggtgaccgcggtggcgtgcttcgtgccggcgttcggggagttcgcggcgttcgtggggagcaccgtgtgtgcgctgctctccttcctgctcccggcgctgttccacctccgcctcgtcagagcggcggccagcgcgtggcggcgctcggtggacggcagcttcttgctccttgggctgggcttcgcggtccatgggctttacaccgttgtctcggggcctttgaacatgggcg

SEQ ID NO: 97186 - DNA, 251 bp, Oryza sativa
  Clone ID: PAT_MRT4530_95213C.1
gcgccacctgactctctgtcgatttcgtgctctcctcctttcgcgagcgcgttctttggaggggagatggcggaggagccacaaccagaagccgtgcccgacgcgacgaagacaaccgaccttgcactatccgcatgttaattgaacgcgcctggcatgccattgtcaaacgatagcaacctgaagccgcaaggggctatctacttgaaggagaacacgttccgctcgaaagatccacgacatcacagtga

SEQ ID NO: 97187 - DNA, 500 bp, Oryza sativa
  Clone ID: PAT_MRT4530_95214C.1
cgggggtctcgttagctcatggtattcttaaagcccctgacatctttattattggattccgggctgcccgaattcggttaggttgtaagatcgttgatagtttgaaaactcaacacaatcaatgagggtacatatggagttgtatgtagggtgagggataagagaactggtgagattgttgcgccgacgaaggtcaaggatggagaaggatttgttattgtctcccacagattgctcttaaggacatgaacgcctcgccctccgtccctctcccttcgatagtggaaggcccggaaagtccccgtcggtacccactgcccccacaggcccccgcggcgcacgcgaagtctcacgggcacaggaccctctagggggccgtcccctcgcaccacggacccccctctccatcccccctcgcctccacacgccgccagggcgccctgcgccgccttcagtatcgctccccccccgctttctccccacacgcctcgttgctaccc

SEQ ID NO: 97188 - DNA, 1026 bp, Oryza sativa
  Clone ID: PAT_MRT4530_95215C.1
atgggccttgggaggagcccatcaacagcatccctttgtgagaagccattgaaatggcttctggaccgcaacaatgaatccttctctacctctccatatctccatcttaagactgtagtgggcctcggggaggagtttgccagctgtgcccctagggacaacgtcgtccctcgaatgctttggtacaaagtgaagagcagagatgaggagaggagaagaaaggaagggatagataggtgtaggaagatgccgggctgcacgcttgctcaacgctatggcatgtgtgttggctccctctacgtgccgatgccgggttttcgctactcctcccggcaggcagcggcacgacgccgctgccagcggcttggtgtggcgaaatcctcaggtggccactcctcccactcctcacccgtgtatccgttccccttcctctcctctattccatgccggcatcccggttcgccgtcgtggccttccgtggaggagcacgccctcaccggcgccccctctgtcctctgtgagtggccgatgctagtctgcctatttgctcgctgtctcagtgggtgcgcacagtcgcggatcgagaacgaggaggcggtggcgaaatgcaaggagcggaggcagtggatgaagtccgtcgtgcaggcacggaacgcgttcgcggcggtgcactcggcgtacgccatgtcgctgcgggacacgggcgccgcgctcttcgagttcgcgcatggggagggcgtgctgccgccgcccccgcccccaccgacgacgacggggccacgggggaggaggcgcgcccccaatggaggagacctcatcaggggcagcagatcgctctctgtatcagaaggcagcagcgatggttgcctcctacacggagacgtaccgcagcaagcccttgtccttctggctgctgctcgtcctcagcgcgtgagcatcccggcgtcgagcctcctgtcgcggctgtactacaacaacggcgggcagagcaagtggatcctgtcgtggtccgccgtcgccggctag

SEQ ID NO: 97189 - DNA, 270 bp, Oryza sativa
  Clone ID: PAT_MRT4530_95216C.1
cctgttagggacaaggcatcttgggtaaagatgaatggaccaaaggtgaacccaccgattaatgagaagaaagttggaaggcctaggagatgtagaagaaagcagccacatgaacttgaaggaggaacaaaaatatccaagcatggtgtgcaaatgcattgtagctactgtcaaggagttaatcacaacaagaagggctgcaagaaaaggaagaattacagcacaaaaaaatggaaggttcagattctcatcagaagggaacctactacg

SEQ ID NO: 97190 - DNA, 135 bp, Oryza sativa
  Clone ID: PAT_MRT4530_95217C.1
atggcggcaacgctggggagggacaagggaacatggatcgatgcactgggccaacgcttccctcctgccacaccattggctgcatctctgccaaccgtcacctccctactcgttgctgacgaattcccctcatga

SEQ ID NO: 97191 - DNA, 771 bp, Oryza sativa
  Clone ID: PAT_MRT4530_95218C.1
atggagcatgagtttgatgattattttaaagatgcaagcttgatggagcaaagaccaattgataattcatcgatcacttgtgaaactatttcggttacacctatgcctaagactggaatggctagtaatcctcttcctattagtcctattgactttgacaacaagaaagtgttgattcggcctagtcaagccgaatccacgaaagggaaaaatgttattattagagatcctcggcccaagacaattaggattaataatgctaaggccgaagattataaagttacaaaagatgagtcatctagttccaacaagactaaaaagccgaagctcactgttgagatgcttatggctaaatacaagaagggattggccgatcgatttgataatcggcctagtgattcgaaaagaccaagatcgtctcctaggaagagatttggtcaaacggcaaagaaatcggagccatcaacaataccaactccatacaaacctccggttgtaacgccatggtatccatatccaatgtcgctatacggttatccttttatgtattatatgccgtggatgcctcaatcacctatgtcgtttcatcaagaatggaaggaatcacctaggacagttccaagtcattcatttaactcaagacaagaccgtttctcacacaagaatcggtccggtggatcaaaggttaaaaaagtaaagaaggtgtgggtgagaaaagaagccaaagctctggaggtcgttactaccaaggaggagtctcaagatgttcaa

SEQ ID NO: 97192 - DNA, 592 bp, Oryza sativa
  Clone ID: PAT_MRT4530_95219C.1
aaatttatgtgtgactggcgtgtggaaacacggttaacgcctcgtcccgaaaccccggaaagccggcggcagctcgagaagtcgagagagacctcgccgagcggatcactcgcactactcccacctcgccgcccgccgccgccgccgccgggttcccgtgctgcgcgcgcttcgatctccttctccttctccttctcgcggccgttcttctgcgtgagtgaggaagggttagggcattggagacccttaggaagggagaggggctgacaaaccatctaccactgcggcctcaacaccggcgcctgattcccctccgtgggcctcggcacctggcagtccgaccccggcgtcgtcggcaacgccgtctacgttgccttcagcccggggtatcggcacatcgattcaggtagtgcgtacacctaggtaaaagcagatgagtttgcatagcttttggccagtgaagagggtgtggtcaaacgcgaagatctgtttatcacgtctaagctatggtgtgatcatcatgccccagtccatgtgcctgaggcactagctgctaccttgaatgacttacagcttgagtacctggatcttt

SEQ ID NO: 97193 - DNA, 1278 bp, Oryza sativa
  Clone ID: PAT_MRT4530_9521C.1
atgggcaagccgacgctgccacccgtcgttgtcgtcgtcgtcctcctcctcctcgtcgtcgtgctgccggcgacgacttgcggggcggacgcgggcggcggaggggaggcggaggagttccagatcccccgggacgggagggtgctggagctggacgacggcaacttcgacgcggcggttcgcgccgccggcctcctcttcgtcgacttctacgcgccatggtgcggccactgcaagcgcctcgcccctcagttagatgaagctgctccggtgctggctggattgagcacacccatcgtagttgctaaggtgaatgccgacaaatacaaaaagctcggatcaaaatatggagtagatgggttccccactctgatgctctttgaccacggaaccccaacagagtacactggttcaaggaaggccgatttgctcgttgagaaccttaagaagcttgttgcgcctgatgtttctgttctcgaatcggactcagcgatcaaaagcttcgttgaggatgctggcatgggttttccattgtttctcgggtttggggtggatgaatccttgattgttgagtatggagcgaagtacaagaacagggcctggttttctgtagcaaaggatttctctgaagatatgatggtcttttatgatttcgacaaggtccctgcattggtttctgttaacccaaagtatcgtgagcagagcattttctatggcccttttgatgatggagccttcttggaagattttatacggaattcccttctgcctttagttgtgcccatgaacagagagactgtcaagatgttgaatgatgatgggaggaaagtagttcttatgattttacaggatgatgaatccgatgaaaattccccacggctgataaaagtattgaggtctgcagccagtgcaaaccgtgatctagtgtttggttatgtaggagtcaaccagtgggaggaattcactgagacttttgatgttaagagctcagagctgccaacgatgatagtctgggacaaaaaagaggagtatgaaatagttgagggttcagaaaggcttgaagaaggtgactatgggtcccagattagccgtttccttgagggatacagggcaggaagaacaataaagaagaaagtgggcgatcgatccccgaccctgcttggtgtgaatgcggtgtacattctcgtctttctggttgctgttcttgttcttctcatgtatttctctgggcaaggcgaggaagatcaacgaccaagacaacgagcccatgaagattga

SEQ ID NO: 97194 - DNA, 342 bp, Oryza sativa
  Clone ID: PAT_MRT4530_95220C.1
atggaagcaaaactcatagcattagatactgtcacagttgaggccgagtgtcttcatgaactcctaatggatttgccagtggttgaaaaaccagtaccagctatcctgatgaactgtgataatcaaacagtgattattaaggtgaacagtttgaaggggaacatgaagtcatccaggcatgtgaaaagaaatctcaaatctattagagagcagaaaaactctggagttatagctttggactatgtccagatagctaaaattctagcagatcagtttactaagggactatcacgcaatgtgatagacagtgcatcgagggagatgggtttgagacccacttga

SEQ ID NO: 97195 - DNA, 2238 bp, Oryza sativa
  Clone ID: PAT_MRT4530_95221C.1
tcagctcgacccacccccaccaccgcaccgcaccgcaccgcaccgcagcgcggataaacaaaagcggcccgagcctgtagccttcttccccacacccgccttccctttcctctcttctcctctactcctcgccttcttcttcttcttcttcttcttcttcttcctcttgctgttcttcgctcgcgcccgcccaccactgcaactcctcgtctccccctccgccgcgttgccgggtggagttgccttgcccgagaggagcgggcacttcgggtttgtgagagtgagagctctgtgcagcggacaggtttgaggcggcggcggcggggctcccactcggccgaatggactgctagtagcggttgcttctatgtgtacagtatctaaccttctaaccattttcaaaggaggtcatattttgtagggcatcgtatgccttattatctggcattggctggtttagatgtcgtttcgtagcatagttcgcgatgtccgggatggttttggaagcttgtcaagaaggagctttgaggtgacccttgcaagtctttatggacttactgggcatcacaaagggaagactcagagctcattggatgagctcgatgactcacctgctataatcccagagagccgctgggcaagtcttccgcccgaactcctccgtgaggtcatacggagactggaggctgatgagagtacatggccatcccgaaggaatgtcgtctgctttgcagctgtttgtaggacatggagggaaatgtgtaaagagactgtgttgagcccagagttttgtgggaaacttacctttccggtctctataaagcagcctggtcctcgagatggtatgattcaatgttatataaagaggaatagatcaaaatccacctaccatctctatctgtgccttagcaacgttgttactgcggaaggtgggaaattcgtcttagccgctaaaagacaccgtaaaacaacttgcacagagtacactatttcaatggtttctggcaacatctcaaggtcgagcagaactaatattggaaaattgaggtcaaatttccttggcacaaaatttataatttatgacacacagcccccttacaatggggctgtagtccctcacgtcggaaggaccagcaagagatttaactcaacgaaagtttctccgaaggttccttctgttacttataacatagctcaggtgagctatgaactaaatgtccttggcacaagaggtcctagacggatgcgttgcatgatgcactccatacctgcctcctcggtggagcctggtggcatagtccctggccagcctgagcaaattgtacctcgagctctggaggactcatttcgcagcaccacctccttctctcaatcattccggagcaccacctccttctctaagtccatcatggacccatccatggatttcagtagtgctcgcttctctgacatcagtggttctataatgggtggtgatgacaatggtgaaatcaaggagaggcccttagtgctccgtaacaagcccccgagatggcatgagcagctacagtgctggtgcctgaacttccgtggccgtgtcaccattgcctcagtgaagaatttccagctggttgctgcaccaagccctcctcctgctggtgctccaactccttcgcaacctggtccagccgaccccgaaaaggttattctgcagtttggaaaagttgcaagggatatgttcacaatggactaccgctatcctctctctgccttccaggctttcgctatttgtttgagcagtttcgacacgaaattggcatgtgaataattgttggaagaaggaaaaactgaagaagggcaagaaaagagttcagatgtctggggataggttactagttgatgtttgcatttttttttcttgttttctcggttgtaattgtgcttgttgtagccttgaactagacgtatatgcaggaaagcatgtttttatgtgccctcatgcatgatagaggtaaggagccacatatcatccactgatccatactccatactgtgatgatgtatctgctgtgccattgccaacacaactgtgaaaggttccctccattcttctgttatccagcatatatattccgttggctacactgaacaggcattcttgctcgagtcctgtaagttttgtctctatcaatctctctctcacctcaagattcatcaggacggccgctttagggcgtccgctcttgagtacgcgtgcat

SEQ ID NO: 97196 - DNA, 4389 bp, Oryza sativa
  Clone ID: PAT_MRT4530_95222C.1
atgcccctgtcgaggcacgaggtcggcaacgagtactcgctcggcggccgcgagctctaccgccgggccaaccagcacgacccggaggccgtcctcgatggcgtcgccatggccggcctcgtcggcgtcctccgccgcctcggcgtcctcccggcatttgctgcacaggtgttccatggtctgtacgatgaggtgatgacagcatctgcacgagggcatgggctcatgctccgggtgcagcagctggaggcagagttgccactcgtggagaaagactcttgtcatacagactacctgtatgttgcttctaacaggggaatcgagtggcattcgaatccgaggttggaaagtggggttgtgacaaaaggcgacacgcctcgcttcatcatggactccatcaagaagtgtcatgggcctcccaaattgttcatgcttgacaagtatgacattggtggtgagggagcttgcttgaagagatacacagacccgtccttcttcaagacagattctgcatgttctagcatgctagagcaaggaattcaaagagaaagaagacctcttagagctatggagatcaggccgaccttgcaaaattctgagattttcagaccacctaatgcagccaacaatgactccaaattggagacagatttgtctggtgaagctttggatgaagtcccaacaaggcgccggcaactgaagtaccgacaactaaatggatctgtgttccgaagcttcaggccacagatgcagaatctttacggagaaacttcaccagatgagaagccctgctccatgaaccattcagaagtgcagatatctttcactgactcacctgacacaaacactgaagagagggacatcatggtagacacattcagcagcatggacaaaggcaaggaaaacaactacgtgatggctggcaagaacagattgttatcagaagaagcactatcgcgttcttcggatgctcggtctgcaggaagcagcaagggatacaactctgaagttgacatctacgtggacgctctcaccacaatggattctgaggttgagacagacacagagcacagagatcatggacaccgtgccttggtaccggtggagtccagcaaaccgtgctctgatgttcacggtgccgcggtttcagggtctattagcttcaggaacaatggctcaatggtgcctaactcttcagatgttgtcccagcagaggaagaaaataatgatcaccatcaagggtatgtctgtgtcccttcaccacaggccaaacctgttgctggtgaacatgagaggagcagctcgttggaggaattgtttgcacaagaaaaaccggtgtcatgcgagcatgagaggaccagttctttggaggaattgctccttggagatgtccatccttctgggcataacatgagatcatcagctactgaatcaaatacaaatggtgttgtcagtactgttgaatcaaatggtacagttggcactacaaagaaagaaaaggataaccccatcattgcaggcatttccttcaagaagacagcgagcaagaaatcaaagtatgtgggcagcatggagcttattgtttcaaaagtgggcattttgccgagaaaactctccaaaaagcatgatccgttctctgattccctcagaaacatggccaagcagttgcttgagctgaagattgatggcaccaaagacactgagttatatgaatttgaagcaaatggtgagggatgtgatatgaagtgtctggaaatgtctcaccctcctattgaaattatggggagtgccacgcaaagcgttcctcctgattcacctcaagacaacgttgattcaagagcatgtcgaccagaagaagtgaaccaagagtatgaccatgatgttccaccaagtgatagtccccaagattcagttgatggaaatgtatttcgggacattgcattgttacgttctcaagaggaacaacaatgtgcaggtcctgtaactgttgacaatttgttggatcatgcacccgaaaatactcaagatcagattggggaacatttttatagggaagtgactgaagatattcatactgaagttgtccctgaaaatggccctgatataggcgaagaattagaagaaggcagtattactgaagagaaggtgaacgaggaagatgtcgaggaaagcaatgagtccgatgcatacacattggatgaaaacaccgagtacatagaagagcaagtggtttcagatgatttgatctcctcaccgatctcatccaagcaatctgatgatccttgtcagatggcaccactcactcttacagatgcagatgatgccttggcaggaacaataacagaatccaatgtatctacagtggttgttgaatcagcaacaaccaatgatgtggccgtccaatataatgaacaatgctgtttacatccagaaaccagttttgcacaagatttaactcatgtcagcagctgtgaagttgaaggacaaaatgagccattaccactgtgcagctcatccatggtgggtacaactccagatctgtctgtagacactgaagaaatacatgaaaaccccattttgtgcattgacagcagttctgatttgttcagagatgcactagctccagactctagagatgtgccattaccaaacatctcaagttttgattggatgcttaatggtgcaatgcagaagtcgttgaatgtacttcctgctaaaccacctaatggaattttacaggaaaataattcttccaaagatactgaagatgcaccaccgccactaccacctctcccgccaatgcaatggagaacaacaaaacttcagccagggcctgcagttttatctgcaaaatttgggagaccaccaagaccaaaacctccagttaagtaccaggaaaatgagagttactcctcacaggatgaaagaaatagagagcctgaaattcttcaggaagcaagtctgcagaatggctcgacttcggtcactccagagaaggaaatggtagtggcaaaagtttctaatgagatccagacaaatataatgtttggtagggattctcaagaaagccacctcaaaggactcaatgagtatgatgtgcaagcttctgattcattctccacatcagaattcaagagcgtgggaggtgttgcttcagtagaaggcgacaatcttgaaacttcacagttatctgagcttatagtaattccagaggaggcatggtctgagcttgtagatataaaatcaatatctggacaggagaaaggaggaaaacgccagcttagcactggagttttcaattgcaatggcatgcatactactggtctgtcagcagaaaagagggatgactacaaaatatatgatcaaaatgaaaagaatttattagctggaaagggaaatgcaatagcagattcagaagaaaaggaaccaaatggagttacttgtcaggatgatacgaagaattctgacttgttggtgcaacaggaagatggacaacatgatagttctgctggcacggcaagggaatcgtcttcttcatttgaagaggaagtagcaaagttttcaccaccgagagtgccaacaccacctaaatatcctctattccaagttactgctcatgatagaagcatgctaaaaagggctccaactttggttcagccttctatcaagctttcagacgagaacaacacaatactggaacagataaagaataagtctttcaacttgaagccagttcttgcaaagagaccgaacatgatgggtgctccaagaacgaacttgcaagtggtggccatcctggagagggctaatgctattcgccaggctgttgctgatgacgatgatgaggatagctggagtgactagctgattcctcagagcatgcaatttggcgcctgatgtttcttcacattcacatttcacaaggtctgtggtgatcatgccatcatggacttgcgtttcctgttcttgcataagtagagctagcaaactgtgaaatgaactacagggtatcatctgataaagaagcttaatgtctcatatgaagttcatgccatgaagatgcaacatgtaaacggtatatcaattttttcccgcttttccggcacgtgatgtgtttacgccccgtttggaacaggaatttcatagggatttcacgtcgaacaattcaaattccgttgaaatccagagaaattccctccttccaaacatggcctttgttgtctttgtcgatgggcctcctgtaacttgatgcccggtgaggattgtatatgcctgataggactagttagtgtgttttctttttgatgaaaaaatgaatcttgagggtatataataatacataatgcatatatgcccaaaaaaaaaaaaaaaaaaaaaaaaaaaaaaaaa

SEQ ID NO: 97197 - DNA, 547 bp, Oryza sativa
  Clone ID: PAT_MRT4530_95223C.1
acggcaacatgttcgacaaagaacaggtcaaccagtggcgcatcttgatatgagtggggccgaacttaagagaaacctacaagatctacgtatccaaggtaccgagaagagggtggagacctacaagaatatctccaaggtgtatggtgcttctttgacgaaggtaaccactttgaacccgttcattaacgacatcttcgagaagctcgtccaaagtaacaagaaacctgtaaagaagcaagaggaaatatccctggagacctgggaaactcagtgcgccaggcatggaaacaagccccatggagtggaggcaccctcaatgcgcaataccaatggacttggggccctaggcaggggcccgagcacacctcattgccccgggctcactatggggagggagccgtttggagaacagctcatccacccacatcttagggacatgacgccgcatgtagcctcccgagaacccatgtctgccgaaggaataggtggggtggacatgcccctcccatatcactccagcatattcaatcttgccaccttgtaa

SEQ ID NO: 97198 - DNA, 489 bp, Oryza sativa
  Clone ID: PAT_MRT4530_95224C.1
aaaaaagcaacatactagttaaaaaaaaaaaaacttctcaagcgcaagcgtttggggttacccgactcgaccgaagagcaaacctgccgaaagaaacgggaaaaaaaagggggaaaacataaataatcgggggggggggggcccccccaagggggaatcaaacccaaatttaaaaggggaaaaaacaaaactagaaaaaccggggggggaattttttgggattcaactttctttttttttttagggaaacaacacaacttttaacgctgtttttgggggtcggcgccactgggggaagcctcatgggatccaaaacgatcggacccggccgggaaattaccccccagggccggagccccgggggggggtgcccctgaagcaccccatcctgggggggaaggggggcccattggatccagaccgggggcaaatccagtcgccaaacttccaaccaggggggggggggcggacgggcccctttccaaaacc

SEQ ID NO: 97199 - DNA, 676 bp, Oryza sativa
  Clone ID: PAT_MRT4530_95225C.1
ccggccgggactgaattacctgcgcatcatcattaccatcagagatacttacatatcactcgaacacgattcttgcatgtcaaaccttggtaaactatccacgtaggggagaaacgcaagggaatgccaagcgacttgacattggcacttcattaagactattagtatgcaacagcacagcgctttgatacgagactttccggactccctcccttgggcttgtcaatttcaagggtccaaccacccaatatgcaatagccttatattcctacccacgcttcctatattgggcagctctcgatgcacgtcagcagaacgttctcaccgccctctaccactgtcagagtacagcatgcggattacgcccagcttgagcaagacacccattttgcgacccccaatggacaactcggtgcgaaccgtgtcgctgcccctgagataaaaccaagtcgcctaaattcaaccgacaagtctcgaagcccggagagatcagctcgggttggctggtggcttgcgacacagacttcccctcttacaaagaaagcggggaatattcaatagtgcctcacaagtcctggtgcaaaagatatctcaagatggcgttttagaggggtgcttgatgtcctgcggttcctgcatctacaatgtgcaaaaaaaaaaaaaaaaacccgcggcc

SEQ ID NO: 97200 - DNA, 393 bp, Oryza sativa
  Clone ID: PAT_MRT4530_95226C.1
aaaaaagaaaatggaagcctggggtttttttgcatgatttggggggtaaaaaaaaatttctaattggccattatttgaaggggtttttttattgaaaggtgaaaccccttaaaccccgaaaaaattaacagttgaaaagaatgggtaaataataaacttaaacgaggcccacaagttttttgttgagggcccaaaattttttggcttttttcggggggttggccttttggaaaagctggtttttaaaaaaaccccatttttttttccaatttcaatacaccccggatttggtaaggtttgggtggcccaccacttgggccaggctttttccggatttcgttttcaaaacaaacccttttttaaaaaacctttggaacgggggaaaaacaaccc

SEQ ID NO: 97201 - DNA, 434 bp, Oryza sativa
  Clone ID: PAT_MRT4530_95227C.1
cccacgcgtacgacagatttgagcccccgccttctccgtcccccccggattcctcgctttctgcccagaaatttgctggcgttgggggggctcggagatgtccggcggcgtgcaggagcagtttgagatcaagttccggctgccggacggcaccgacatcgggcccaagaggtacccggcggcctccaccgtcgccacgctcaaggaatccatcgctgctcaatggcctaaaggttttctctcttctactcgataaagctttttttttttttggtttcttggcaatggcgccgggtgagtggtagtggccacagcgttcgtgtgatcggcgtcgatggagcggtcgctttcggccccctcccgggttctttctgcgaccaatttagcttggaatcttgagatgtacagcactgcagggtcgccatcaggggggc

SEQ ID NO: 97202 - DNA, 292 bp, Oryza sativa
  Clone ID: PAT_MRT4530_95228C.1
acccacagaaatcagagagttttaataggattgcaacaagcaaagcacacacaaaaattgcaggtacaaaaaaacatggcggcggcgcgcgctgccggttttaggaacctactataatgccttggggggggctgctcctcctccggcggtggcggtggcctggaggaggccgtcgcggacctgcgcggccatgttgcggacggcgctggggccgtgggggatgaaaacgggggaggacctggagggggcgcctatgttgtggttggggtaaaaatactgggtgacgagcacc

SEQ ID NO: 97203 - DNA, 393 bp, Oryza sativa
  unsure (1)..(393): unsure at all n locations
  Clone ID: PAT_MRT4530_95229C.1
tctnnctgncgccngagagncagggcagggtnntnnanntgggcgnggcangcgcntngngntancgngtgnntnagctntnngtgnnnncngnggncannnngcctgcnnggnnccgntcnntgntggggccngggnggnncnggcnaggcnccggcnttntnttnngggaggngcntnggcctttntnngctngtcnncnggtccttnttnnggtagntgctttnttngngngtgctcnnccgggtgctncntgtntttttcncccgantatgtganattnntgtgttnttgtnttntnttgnncnngntnggncggnntgtnntttttaatatgcncagtgacttggggtcaacaaaaaanaaacnnnaanaaaaaaaaaaaaaaaaaaa

SEQ ID NO: 97204 - DNA, 752 bp, Oryza sativa
  unsure (1)..(752): unsure at all n locations
  Clone ID: PAT_MRT4530_9522C.1
gcatgccgggcccttgggggcttgggcgggtaacgtgggtcggggcgggcggcgggcgcaggcgccgcttgctagcttggcttctgacttagaggcgttcagtcgtaatccggcacacggtagcttcgcgccactggcttttctccaagcgcgatgaccaattgtgtgaatcaacggctccgggggggctaggttgaattactatcgcggcacggtcatcagttgggtaaaactaacctgtctcacgacggtctaaacccagctcacgttccctattggtgggtgaacactccatcacttggtgaattctgcttcacaatgatnggaagagccgacatcgaaggatcataaagncccgtcgctttgaacgcttggctgtcccacgccagttatccctgtgtgtgcttttctgacacctctagcttccaactccgtcggtctaaaggatcgataggcctcgctttcccggttcgtattcgtactgcgtgtctgaatctaacgagctttttcccttttgtttctcacgaaatttctgttctcgttgagctcatcttatgacacctggcttattttttacagatggtgccgccccagccaaactccccacctgacaatgtctttcgcccgggtcggcccgagggactcgggcctttgatcccaaaggagggggccaggcccccggtttccgattacgggtttaggaaaataaccttaaaagttattgggttttttaatttgggccccgagggttc

SEQ ID NO: 97205 - DNA, 225 bp, Oryza sativa
  Clone ID: PAT_MRT4530_95230C.1
atgggcaaccgggcgcagcgcagcgctgccttcgcgggatttcgcaggggcgcgcgggtccgtggcgcgcgcgcgcgcgtccgcgtccgcgtccgggaacgcgagagtgtgcctgcctcgcctgcgcggcgcgcggcgacacagcgggcagcgactggcattgtcggcgtggccggaggggggcggtccagtggagagcagcagataccgtactgtgcgagataa

SEQ ID NO: 97206 - DNA, 1910 bp, Oryza sativa
  Clone ID: PAT_MRT4530_95231C.1
ctcgccgacaatatcctgtcccggtccggccggcggcgctgctgcaaattcagcaattgcttggcacatcgagttgattgatcgaggtcgatcgaggctagctaagctgcgtccaatggcgttctcacgggctacggcggcggccgtcgtcgctctcgtcgtcctgctgccgcatttggtcgccgccgtcgtcctcgacgtcggcggcggcgtcgcggcgaggccgtgccactcggcgtccgtggacggcgacgccgggtgcctgagctggcgggtcatggtggaggcgaacaacgccagggggtggcgcacggtgcccgcggcgtgcgtcgcctacgtcaggggctacatgacgcgggggcagtacggcagggacctgagcagcgtcatggaccaggtcgccgcctacgtcgacaccgtcgaggccgacggcgacggcctcgacgcatggatcctcgacatcgacgacacatgcctctccaacctgctctactacgaggccaagcagttcgggtatggggaagaggcctatgatccctcggccttcaagacgtgggctagcaaaggggcttgcccggggatacctgcggttcttgagttgttcgccacattgcaagccaaggggttcaaggttttcctcctctccgggagggatgaagagacactggccacttgcacgtcagagaatctcgagtcagaggggttcttggggtatgagaggctcatcatgagcattcgtgtcaagtgctggcttgtgactgccaagagcccggagtaccgggggcagagctcgtcggtgttcaagtcggcgatgaggaagcggctggtggaggaggagggctacaggatccgcggcaacgtcggcgaccagtggagcgacctgcagggcgactacgtcggcgaccgcgtcttcaagatccccaaccccatgtcggcccacccacctgctgccgaggcgtccgcgtacgtcgagtccaaacgcaagctgcggccagtgcggtgctaccgtcagatcaagaacaagccgtacccgaagtcgcgctactgccgcggcgtgcccgacccgaagatccgcatcttcgacgtcgggcagaagaagcggagcgcggacgacttcccgctgtgcgtgcacctggtgagctgggagaaggagaacgtgtcgagcgaggccctggaggcggcccggatcgcgtgcaacaagtacatggccaagcacgcgggcaaggacgcgttccacctccgggtgtgcgcccacccgtaccacgtcctccgcatcaacaagatgctgtcctgcgcgggcgccgaccggctgcagaccgggatgcgcggcgcgttcgggaagcccacggggacgtgcgcccgcgtccgcatcgggcaggtgctcctctccgtgcgatgccgcgacgcgaacgccgcgcacgcgcaggaggccctgcgccgcgccaagttcaagttccccggccgccagagggtcatcttcagcgccaagtggggattcaccaggttcaagcgcgacgagtacctcaagcttaagagcgagggacgcatcgtgcccgatggcgtcaacgccaagttgctaactcggcacggatcggttgctgatcgccagcccgggagaggggtcttcccaccctccgttgcaggctcagacgcatgaggagtgctttcactgtccatctcattggaggtggttgcaggctgcagtgtctgatcgagctctgttaaaagagtgacatgtcatgtgtatatattatggtagtggaataaatgacggtgactgtgtgcagtaagccttgttggtctttggtagcacggttcgtgctgtaaattaactctgcatgcgaataaataaagattggtgaattattcttcgtgtgaaaaaaaaaaaaaaaaaaaaaaaaaaaaaaaaa

SEQ ID NO: 97207 - DNA, 1174 bp, Oryza sativa
  Clone ID: PAT_MRT4530_95232C.1
ctcagaagcactacacttctgaaaagggggaataatagcaaggctgagtataaccaccgtactcagcaagccacaccaatgatgcagacgtgcaaggggatacaaggatgggtttcacccccgtccccagtgggcaacgggcagtcccctctcgtgcctaggtgaatccggaagcgacagaggccgtcgcagggcccaccccgctccatcacgcccacccttgcctgaatgcatcagctagaggaaagctacactacaagctcagccgttgcccacgctagcttgtggtaagtacgaggaattcttccagggtttcccgcgaaccgggaaaaggcactgctgacatcatcaaaggggaagggtgcgccgacagacgggccccacacgtcagcgggactagggtagggcgcacggtggacacggtccaccgcggccggggcagcaccgtggaccgagaccacgggtggtccacgggcggccacagggcagggcgcctagagcacgggcacggctcagagtaagcggcacggcaccggacggaggcgagatagcggcggtgctccccggggcgaggacgacggcgacggtccaacggcggccaacgggcgacgagtgacggccggggacctccgggacctgggaaggggatagagagtttaagtggcacggggaaggcgcggtgccgaggaaaacagcggccggaggcggcgaggaacggtgaagctttcggcggtggcggcacagcgtggcagcaacgggagtggcggtggcgcgcgactgaaggcgacaagaggcggctgtggctcgggtgcacggtgaaaccggtgcccgggtggtttattgcggaagcggagcggtggacggggtgcggcaacgcgcggcgaggccagcgggaccaacggcggtgtgcggcagtggctttagcgacggtggcgggcggctggaggcggtagaggcggcggcggctcgggttggcggcgggagtggtgctcgaggggtggaaagggggacataagaggcggccgggcttgcccttgcggcggcgaagctggcggtggcggcggctcggctcggcgacgggtggagggcgaccgattttatgcggtttgggcgcgagggcgcgagcgggagggcgccggatttggcgggacgtgggcggcaatccgccggccat

SEQ ID NO: 97208 - DNA, 804 bp, Oryza sativa
  Clone ID: PAT_MRT4530_95233C.1
aagcacattgagaaaatggatgaagcaaagccagaggctatggcttatttaaggaaaaaccatgttaggctttggactagaagccaattctctgggcaatgcaaggttgattatgttacaaataatttggctgaatgtttcaatagctggatcaggccacataaaggattgcacttggtggatttcatggacaagattaggcacaagttaatggtgaagtggaacaggagaagatcaatttcaaaaaagctagaagggaatatactaccacacattatgaatgaattgaatgaaaagagcaggggtttgaaccatgaggttacaagaagtgatgatgcattagcagaggtggagtgcaagggaggaagtggccacagagagggtgatcctgctgattaccaagcaatgctagctgaaaggggacctccaaaaaaaaggcaaaagtctagtaatgcacatgctgaaactagcattgtacatgttcctagtgcatcttctgctcaaaatgcaatattgtctgcaacaatgacatatccaccaagcaaaagttgtcaaaccgggaaaaaaggacaggacctcagtaatacttcatcaggagaattctccctaggatatataggtggccgcacgttggcgtcggatggttggccgcgggcgcgctgggcgtcgtcctcctgtctgtcccagtgtccccctctcgcgctcgccaacttgggcagttgggcgttgtttatcgcgaggcttccgtaccaggtgggcataaatctatacgccaacttggagcggccggtagaccacggctag

SEQ ID NO: 97209 - DNA, 419 bp, Oryza sativa
  Clone ID: PAT_MRT4530_95234C.1
acgcagcgcatgtgttgcgctcgcgggcgatgcgcaccatctccagcagcgccaggtcattgaccagcggggcggcggccgtgggctgatccagctgcgcggccagcgccagcagctcggccgggcagtcgcggcccggggtccaggccagacgacgcaccgggccctgcgcctcgagcacgacctggctgaagggcggcgccagcggctggggttcaggctccggttccggttccggctggggttccggttcaggctggggttccggttcaggctggggttccggttcaggctgcagcatcggatcatcgatgttatccacagcttgtccacaggagttgtccacagccggcggcagcgcatcggtctcggccaccggtgcgacagccggttcagcggcaggctccgtgacaggttct

SEQ ID NO: 97210 - DNA, 1613 bp, Oryza sativa
  Clone ID: PAT_MRT4530_95235C.1
cagaactgtgatttcatttcatgttatcatcagaatacccgccctgcttacatttgacaagggtgacagtagagatatgaagagactcaagtgaagttcatataacagttttcaggcatacgctactaccattacattcggaggctgatcaaccaagacatttggacgtgccaggaatctctacccatgctacgtgtgtggccgaattacaagccctcagtaccttgcctggaaaaaacctgtatctttgcttgtggcaatgcttgtgctgtccttacagctacaccagacttcagtgtggagaaatttctgccacttgatgatctctgatctttctgctcttctgatgttggccctcccaataacattgatcgtcaaccaacttttcaggagtaacagtaaccgtcgagctaatgtggcgtcgggccacattttgtccttcagttgagtcatgcttctgaagagtatgatgctcttgaggtgatgagatatctgaattgaccagccggtaaccattatttgtatttgaaatgatttccggtaaattctggtaactggcagcaaccgatccggcccaggaaaccttgatggacaaatgaaagtatcctcggatagcgcatttgcaacctgaagatttttcttggtactacggttccggatctcatttgtcagaccatgctggatgctagaattgtcagccaatgttaaagcctttttactgaggtaaccccaaagccatgaaacaaattttgcactatcatcaccaaggaaggcctccaagtcatcacgtgcttggtactggtgtttcccattacagactagaatgacaatgtattccgcgaggatgtcgtcggtgtagctgccgaggaagcgggggagcacgtcggcgacggcggcgcggagggcgtcggcgtcagttaaccttcttctctttaatcctctgtcatcgcatgtgcgtagactgtcggcgagaggcgtgcggaaggagcgctcccccgcggcgaagatacatctggcgcaggctccggcgcagcagctgccctccgcctccgccgccgcctcccaccccatgtccacttcgccttcttttgtagtccggtgtcattatttttctgatgagactcaagtgaagttctgaaaacagttttcacgcacacgctacaacgtgcccaatcggtaactggtcttcagattcatttgggcgttgccaccaatctccccccatgtcacgtatctcgccgccatgcggagccctcaataccttggctggcagaaacctggatgtttgtgggcatagtagcaggtgccgaacatgggcattcttctccagcaaaaactttgtacatttgcaagcacagtccactcccaggccactgtagagtaggcctattttcttctagacccactttgttcgcggttttcttccgttggccgcggcctcggcccccggcagctcccccgcccccgtcgcgcgcctctcctcccctcctcctcccccccggcctcccctgcgccctccccctccggcatgggcgccgcctgccgcgcctgctctggcccccccttcggctcctccgctcccgcgcccccgggcggggagccgcgagggcgag

SEQ ID NO: 97211 - DNA, 355 bp, Oryza sativa
  Clone ID: PAT_MRT4530_95236C.1
gttatttttacatgcaacagagcaagtataaggaggctaacatggccaacgccaccatcagtcctcttgtatccccaccctattcatcaaggacacaatgaaagaggacaagaggggctcaaagcaaacgcaagtaaaagatcatcactattcacagcaaaccactgagattataaccttgttcgctccttctgcagtataataggccgatgtcttgtctgtctgctggatacctgtccgaataatatcactgaggctacggatgagacaccgatgcaatttcaaaacatccggcgaacaaatctgataacaactacatggacgggacacagtcaaggccggcaacacttgagac

SEQ ID NO: 97212 - DNA, 1892 bp, Oryza sativa
  Clone ID: PAT_MRT4530_95237C.1
aatagactctgaactgaactgattgacattttagactgatcattcattcaagctaatgatgagtgatgcgtgccaaggaaaaccaggccttctctaaaaacaaaaggtaaaatgctaaacatctcagatcctaccactactgcataattttacataaccatacggcaaagacatatccgcacagcacaatgacaccatcacatcacatgcatagaagaatggcaagttcctatataagcagttgtatagtggtttattatcaaatactcaaatccacgggctagtgggtttgaacttcattgccccagaaacaagaaaaaggacagcaaaataagcaaagaaaaggaattggtcagtgatatgttttattcaatcctgtgtacctagtggacttctcccgcaaggattttctctgtttcctcatcagcctccatgccatcttttttcatacgatcaagcaagtctgacactggttttcctgcattgacatatgtcttcagtaacccatggtaaatgtcccttgtcggaggaaccaatctctgtaataagcttgccatctcctcagctgcttctacattcttttgctctgcgaaatagtttatgctcatcagcacatttgccaggtcaggtttccattcattacttgcagaagcaagtgccttctttgtgagatctgctgccttcgacacctgaccaaccttgaaatatccaccagccaacttataccaagtattggaaaaaagtgtcctccctttcttgatgaattgatcaacaagagcttctgccttctccataagaccttctttgcagtaagcagtaagcagtatgttgattaatcgggaatcatggtaaacatgcttactttcccactcttcatatgctttctcagccccaacaatgtcattcatcttaagtaggacacttatcctgcacatgtacattgtgttgcatgccgatgccggaactttggatctatagacatcccagatacggtccacctcactgtccatctgtagatcggcatacatggttagcaaaaacccataagcgaccctaccatccttcctcgcagtaatcctcttttctgattcttgaaaagcctgcaaggccctttcttgcatcccagctttcatgaaaaccttgcctacaatggcaaatgagtgccaactcataagattattacacgatgccttctcgagaaccttttcaatcgcctcaacatcttccacatccgcgtatgctgacaccagattgtcaatagtgaaaatatcaggcacaataccaccctcttccatagccttatacatggagtccaccctctcaacctgcccgatttgcgaataaagattcatcatcgcattgtaagcataagaattggccatccccatgccccgcatattctcgaagagctcctccgccttctcgacgcgctcggcctccgcgtagcatctcagaagggagccgtagcactgcagttccctcagctgattcggcacagcgtcgaagtactccacggccttgtcgaggccatggaccttgctgatcagctccagccggtacgcgacgtcgccgggggataggtggaggtgccgccgctcggtcatccacatggaaagctggagcgcctgagagaagcggcggcggcggcagagatacttgatgatggactggatctcgggcttcgcgatagggcgttcctcggcgaggcaccactgctccaggacgggggaaagcgggaggcgcgggtccgcggcggccgcgacccggcggaagagggagtccttcttgcgccgcggcggaggaggcgagggagaggctctggcgtcggcgctccggcgaagtcggggcgagggttttgggaggggagaggggaaggaaatcgcaaaaaaaat

SEQ ID NO: 97213 - DNA, 3408 bp, Oryza sativa
  Clone ID: PAT_MRT4530_95238C.1
atggcgacggccccgctcgccttccacctcccattccccttcccctccgcctcccgcccgccgcctagacttctacccccctcacgccgccctcccgccgcccgcctcgccgccacgcgccgcttccgcccgcccaccgccgacgacgagccccccgaggcggcggaggactcctcccacggcctcaaccgctacgaccagctcacccgccacgtcgagcgcgcccgccggcgccagcaggccgagcagccggagatcacccccgaccacccgctcttctcgtcccctccttcctccggggaggccggcagctacgaccccgacgacgagttcttcgatgagatcgaccgcgcgattgccgagaagcgggaggagttcacgcggcgtgggctgatcaagccgtccgccccggcgccctcgcagcccgaggaggaggacggcctcgccgacgagctctcccccgaagaggtcatcgacctcgacgagattcggaggctgcagggactcagtgtcgtgtccctggccgacgaggaggacgaggaggcgaacggcggcggtggcggggtggattacggcgacgacggggtgcccctcgacgacgacggcgaggtgttcgatgtggccgatgaggtcggcctcgagggggcgagggtgcggtacccggccttccgcatgacgctggccgagctcctggacgagagcaagctcgtgcccgtggcggtgaccggcgaccaggatgtcgcgctcgccggggtgcagcgtgacgccagcctcgtcgcggcgggggacctctacgtgtgcgttggggaggaagggcttgctgggctcaccgaagctgacaagcgcggggcggtcgccgtcgtcgccgaccagaccgtcgacatcgagggcacccttgcttgccgcgcgctggtcatcgtcgatgacatcacggcagctctccgcatgctccccgcctgcctctacaggcggccttcgaaagacatggcggtgatcggtgtcgctggcacggatggggtcaccaccacggcgcacctcgtcagggcaatgtatgaagccatgggtgtgaggactggcatggtaggcgttctcggggcctatgcgtttggcaacaacaaactggacgcacaacctgatgcctctggtgaccccattgccgtgcagaggctgatggcgacgatgttgtacaatggcgctgaggcggctttgttggaggcaaccaccgatggtatgccgtcatctggtgtggacagcgagatagattatgacattgctgtgctgactaatgttaggcatgccggcgatgaggctggcatgacctacgaggagtacatgaacagcatggcctctctgttttctagaatggttgaccctgagcgccatcgtaaggtggtgaacattgatgatccaagtgctccattctttgctgcacagggagggcaagatgttcctgtggtgacatattcatttgagaacaagaaggctgatgtgcacactctgaagtatcagctttccctgtttgaaacggaggtcctggtacagacaccacatgggatcctcgagatttcgtcaggccttcttgggagggacaacatctataacatccttgcatctgtagcagttggtgttgctgtcggtgcaccactggaagacatagtgaagggcatcgaagaggtggatgcaattccaggccggtgtgagctaattgatgaggagcaagcatttggggtgatcgttgatcatgcaaggactccagagtctctttcgaggcttttggatggtgtaaaggaactgggcccacgtcgaattgtcacagttattggatgttgtggtgagcgagaaagagggaagaggccagtgatgacaaaagttgcagctgagaaaagtgatgttgttatgttgacatccgacaacccagcaaatgaagatccattggatatcctggatgatatgctggcgggagtagggtggaccatggaagaatacttgaagcatggcacaaatgattattacccaccactgccgaatggacataggatattcctacatgatattagaagagttgctgtacgagctgctgtcgcgatgggtgaacaaggagatgtagttgttatcactgggaaagggaatgatacttatcagattgaagtcgataaaaaggagttctttgatgatagggaagaatgccgagaagccttacaatatgttgatcaattgcatcgagctggaatagacacctcagaatttccatggaggattgcgacaagttcagaattccggaggaaagtcgcctccttcgtgtcccactttgtccatcttagctcgatggatccggcgacgcgggcggcggcggcggcggtggagaaggtgttcgtggcgctgccggctgagaaggggaagacgacgctgtcgtgggcgctcggacatttccgcggcagcggagccaagctcgtcgtcacgcatgtgcatgtgccgccgcagacgatccccgtcaaatgtgagaaactagtcattgagaaagaagatgttgtagctggtcttcttgaacttattgcctctcatggcatcaccaagttagtaattgcagctgctgcagacaagcactactcaagaaagatggacaaaccaaagtccaagatagcaacagaaatcatgcagagagctgacgcatcatgccagatttgggacaagaaagtagaaaccacacaatcagttacacctctcagccaacttttcaagattgatactcctcccagccctgatattggtcagaccattctgcaaccgtcagctgaacaggaacaggtcaaacaattcgaggagttgtacttggaggaggtgaaaaggaggaaagaattggaaggagctcttgtcaaagcaaacttagaacttacacggttaaaacaagaaatggacatacctaggaatcaccagagcacaatcttgggggatcgacaagaagtgattaccgataaatttatcttgagacaacaaactgtcgacatgaagagtgatttcggagccacaggacaactaatcaagccacagcaggagtatcttcagttacatcctgaccatgacaatggtgtcagacaaccggaaacgttgctacaccgaaggagcctgactgcattttctccagcatcaactgtaccatcacagtttgataaagactccattccttcccacttcatctgcccgatttctcaggagatcatgagggaaccctgcattgcagcagacgggttcacctatgaagctgaagcgatcatcaattggtttgatgaagggcacgaagtgtctcccatgaccaagcagcctcttgtgcaccgcgacctgatcccaaactttgctcttcgttctgtaatccaagattatacaaggagaaaacagtattcattttcctga

SEQ ID NO: 97214 - DNA, 1259 bp, Oryza sativa
  Clone ID: PAT_MRT4530_95239C.1
ctagtggacttctcccgcaaggattttctctgtctcctcatcagcctccataccatcttttttcatacgatgaagcaagtctgacactggttttcctgcattgacatatgtcttcagtaacccatggtaaatgtcccttgttggagtaaccaatctctgtaataagctcatcatctcctcagctgcttcgacattcttttgctccgcgaaatagttcaggctcatcagcacattcgtcaggtcaggtatccattcattactcgcagaagcaagtgccttctttgtgagatctgctgccttcgacacctgaccaaccttgaaatatccaccagccaacttataacaagtattggcaaaaggcatcctccctttcttgatgaattgatctacaagagcttctgccttatccataagaccttctttgcagtaagcatccaccaataagttgattaaccgggaatcatggtaaacatgcttactttcccactcttcatatgctttctcagccccaaccatgtcattcatcttaagtaggacaccaatcctgcacatgtacattgagttgcacgaattggccttctcgagaacattttcaatcgccttaatatcttcagcaaccacgtacgctgccaccagagtctttttttttcttagaactgccaccagagtgtgagtagtggatacatcaggaacaataccactctcttccatagcctgatgcatggagtgcaccctctcaacctgcccattctgcaaataaagcctcatcatcacattgtaagcgtaagaactggccatccccatgccccgcatcttctcgaagagctcctccgccttctccacgcaattggcctcggcgtagcatttaagcagggagccatagcactgctgctgcttcagctgatccggcatgctgtcgaagtactccacggccctgtcgaggccatagaccttggtgatcagctccagccgatatgcgacgtcgccgggggatagatggaggtgcagccgctcggtcatccacatggaaagctgcaagagaaaagaaaacaaaacaaaatcgaatgatgcggcgacggaagtggtgaacaaggggattcgtagattcgtcgttcgtcccgcacctggagcgcctgagagaagcggcggcggcggcagagatacttgatgatggactggatctcgggcttcgcgatagggcgttcctcggcgaggcaccactgctccaggacgggggaaagcgggaggcgcgggtccgc

SEQ ID NO: 97215 - DNA, 736 bp, Oryza sativa
  Clone ID: PAT_MRT4530_9523C.1
tcaacacctagattcccttccctggtggttgatcgatcgatgcgcccagcccacatggccgcgtgccgatcgccatcatgacattgccatggcggtgatcgccgccgccggaggggagggggacgcgggcgtcatcgcgcatgtggtggtcgacgtcgacgagagttgtgcggcggcggcggatgatgatgatcgcagccggcgcccgagcacgggctgcaggatttgccacctcggcggcggcggcgacggcgagatggcggcggagagcgggagcgggcggctggtgaggctcgggtgcggctgccgcggcgagctggcggcggcgcaccggcgttgcgccgaggcgtggttctccgtcaggggcaacaggcgctgcgagatctgcggcgagacggcggagaacatcaccggctggggcggcggaggcaaggagttcatgaagcggtggcacgcgacggcgggcgtcgacgtcgaaggctcctccaaggcatgcagcggcttctgcaagagccactcattatgcaatctcttgattgcgtgcttgatcattgtaatcgtcttgccatggttgctccataatcatgtgctttgagatcctctaaattgccattttggataaatcattttcagctattcagatgagatggctattttagggtgtgtttggttcacagtcatgcatggatgggaccatattttgttggatacgacgatccaattttttatttggttt

SEQ ID NO: 97216 - DNA, 276 bp, Oryza sativa
  Clone ID: PAT_MRT4530_95240C.1
atggcagactcgggcgtgaggcgaccggcagcagagctagggcggcgacagcgggagagggggagaaagacggccggtgcgatggcaagctcggcagcggagagtagcggcgcacggcgcggcggcaggggagaggagcggcaggagagggggcgccggcgcgagcaccagggagacctgaacggcaggggcagacacggccgcgttcccggtccccgccgtggcgaggatgcgccccgcgagtggctggcagaaggtgcgctgcgccgcggctag

SEQ ID NO: 97217 - DNA, 470 bp, Oryza sativa
  Clone ID: PAT_MRT4530_95241C.1
gaatgaactaatagccaggtcatgaatttaaaaatatatacatacacatttcatggcggcacgcgttgatttgctatctaacatggagcaacagatctaactgatgtgtccatgtgagatcaaattgatgtgcggggtaacctaaaacagcctctggctttcctaacttgctgcaagggctacttctaccaatgttactttggtttcttaagctatggcacaattctttcctttctaaaaataatgctctacggaacatgagcagagtcagtgtggtgcagttagttgtccccctcaaatggtcgttgcatttcattcttgcgcagcagaaaaactcgcagataagtgttgcttcaggcaaaaagtgcataaagctccgaggaatgatagtcagtactcagtagaggactccaagataagcacggaacaggacagttcccatcgcttaaccaaatccatggaagccactt

SEQ ID NO: 97218 - DNA, 367 bp, Oryza sativa
  unsure (1)..(367): unsure at all n locations
  Clone ID: PAT_MRT4530_95242C.1
acngcanctgcctttacantttttactctggcctgctntacantgtctgnggcccaccnccactatggnaaangtccnatcncancatggccntccccggcgngntcnggatcgnaatgctcctcntcntggtcntcngctgnnacnaccatggcctccgccattganctgaatttcattgtccgacatgcncncggttggaacaccngcgtcgactacacngcttgggcgaanggcaaaancttctaggctaacgacncgcttgttattcngatacgccaggaaacngctncggggngacnggangtgacnacancgactaccacgnctgctccgtccgcggcaaaccgatcnctgatttcgaatg

SEQ ID NO: 97219 - DNA, 4138 bp, Oryza sativa
  unsure (1)..(4138): unsure at all n locations
  Clone ID: PAT_MRT4530_95243C.1
tcatatctggatgtttttttgtttgtttttgtttcctttttatgttccttctgttgagagtttttttcagtcctttcaactggttttccaaccacttcaatttctccttccaaactgcatcgtatcgacatataattacgactcaccagatgtattgttctacagactacaccagaataccagatgataagtctgctgctggcggaatacacgcagtaggaccggcagttactgatatatacagtcatatatatacacaaaccaacaccatgacaacactaatattagcaccacaggagcactctacaaatctaatcttatgaggaaggcatcggtagcggtctcagcaatgggctgaaatcatctgatgcacgaaatcttccatgagtgttatgttcatgcagcagggatgtcagaactctggcctttctctgggttaggggaacttgtcgagtgacctccatccaagccggtcttgtcttcattcccttgaccgtcatgctgggtgattcgatttgaagccattctcaatggaggcctcgtcatcgtcgttcaccagcaccttgaccccttatacgacgagatcggctgacgcgaacccgtcccgggcctcgctcttgaacaacatcttctcagcatcgttcaaaaacatctcttaggggtgtcatggccagtcgaggttgacgacgccctcgtggaagacccagcagtggttcctcgcgagaaccgtgccgatgcaccgcgcgccggcgttgtccagcgcaagcctcgccgtgatcagagcagaggacgcgccttccagcttgacccagcttgagaaggtgtacatggtggtcttgttgaggttgtagaccacgaacgccggcgagaagacgccggtctccgtcgtgcggtagccggtcgggtcgtcgctgttgccgaacctcagaatccctccgttgtacagcgccggctccggctgccctctgcagtcggtgtatgcagtgtcatcgtaccagccatggtggcgaccgtgcccaggaggcaccgctgcaacgagctcacggccacaccgcagcagcatccacagcacgagatatctcacggcatgtagagaaaacctcctcatcttccagctcccaagtgcgctacgaaggaagctgttcaggcttagcaatggcgagctgaactgaaggatgtacgttctctaccgtgatcttcataggggtcttgtcagcattctgaaaaaatataactgaggtttgtgttggccagtcgaggacgaagccgcccttgaggaaggcccagcagtcgttcctcgcgagaaccgtgccgatgcaccgcgcgccggcgttgtccagcgcaagcctcgccgtgatcagagcagaggacgcgccttccagcttgacccagcttgagaaggtgtacatggtggtcttgttgaggttgtagaccacgaacgccggcgagaagacgccggtctccgtcgtgcggtagccggtcgggtcgtcgctgttgccgaacctcagaatccctccgttgtacagcgccggctccgggtcggtgtatgcagtgtaatcgtaccagccatcaggaggcaccgctgcaacgagctcacggccacaccgcagcagcatccacagcacgagatatctcacggcatgtagagaaaacctcctcatcttccagctcccaagtgcgctacgaaggaagctttcaggcttagcaatggcgagctggtcctcggcgctggccgcctcttcaaggaagcggtttggtgcagtgcccttgtggtgctcaaacaccgggcccacgctcgggaggaggagatgcaaagcggccgggaggctggggcgctgggcgccaccacaagcgaaaaagcgcatcatcgcttggcggggcgcgagacggcgagagtacaatatgcggccgaggccgatgcggttgccgccttgccacaaaagttggcggttgccaagtcgtggagcgcttgtccgtctctcgtctcggcgcgccccggcctttgttaggcgcgcggtacgcctctcagtgggttcacgtgcgcccgcgcctttctctgggttaggggaacttgtcaagtgaccttcatacatgccagtattgtcttcattcccttgactgtcatgttggttgattgtatttgaagtcattgttaagacagaccctacagcatcatcaccagcttcatgttcctttgtgcccgagatattgtcacccatccatcctggaatagcctctgacaaaagattcatgtatctttccatagctgtctccggatacatgttccctagcttttgccaagcagcccattttgcacgagatgaaggcctcaaggtaagtggctgtgtagagtcatagcatggaccatcaatggcaaccttaaggagtccctgcagctgcagctgcacatcactatcaagctttgacagggcagccatcccggcgtcactagatgcaaacgctgctgccacaccaaacctcttttctatctcagttctttcaatcccttcccactccccaaattccatgtctgtctgagtctcatctgcgggcacaccttgcaatgtcaattcctcctcggtcaactcagcaatcattttgtcaccagaactgcttccatggctaatttccacattgtcggtattcctccccaccagctccaccttagaagccgaaccttcttgttgatcaaccagatggagcttgcatttagcttcgtccttactctgaacttcttcatgaacattgacagctttttcagaggattgttcttctttaagttcctccgtctctgccaatgccacaccaggaattgctactggagcagtcgctgcagccaattgatgttccttctcttcaataacttgctcttcttgcttctcagataactcgtcaagaacctcttcaggaactgtctcggaagtcaatccagatgaccctgcttcaatagcttggaccctctcctccaatcccgcatcaacaacttccgcaggagcagccagagcaacccgatgatgttgattcacatcaatagcttcaataatgcgaactccctgttgctcaaattccacctcaggaacgtcactcggagctacctcagcacccagatcatcctgccgcttgatttcaaccgcttcaatgatgggaacaccctgtttctccaaccctgtgtcaagagcttcccttggagcagcctcggcgaccaaatcatgctgctccaccccaacatcctgcaccttcccttcctccagcgtcacgtcagatacctccccgggagcagcttcaacccccaactcatgcggcttcactcccacgacctccgccaccgcagcggccaaatcgcaccgctcttcgccaacttgtccttcctcctcgcgttcctccaaaacggcatcgagaacaagctcccgagcggccttcgcgggagcctcctcttcctccggcaagcactcgagcttcccctccgccgacgaggccctccccacctcgacccacccctccgaaaccacgcactccctcgcgcgcgcgctcttcacctcgacctcatcgacctcgatgatcctctcctcctccaccaccaccgcctcctcctccgcgatcacggcggcgtgatcgggcgcgcggcggcggggatcactggcggtggcggcggaggccagcagcctggccagcaggaaggcgacgaggagggaggcagccgccgtgaggagcagctcgtagaagttgtagtgcagcatctcgttgttcacgtcccagtgcgcgaactcgccgcggtagcgggtcatcaggttctggatccggccgttgacggcggcgcggaggtcgtccggtgacaggcccttcacccagctcggcgtcgcgtcctggttctcccagaagatgttgtgccctcgcaccatcacgcggtgcgaccgcacgaacgccagcatctggtccggcacgtcgaaccgcagctgccccgacatgggctccgtagagtaccacttcagctcctcctcgaacaccgccgcgttgaaccgatccccgaaccatttctgataggcttggttccccaagaatggtggaggcgatggccgaaccgaacgggaagtccttgncggtttgtctcacggacacggacgcgccacccccgcgccga

SEQ ID NO: 97220 - DNA, 151 bp, Oryza sativa
  Clone ID: PAT_MRT4530_95244C.1
cggacgcgtgggcggacgcgtgggcttctccacgctgtacgcgccgctcatccctgacgggcgtgtggagaaattctactgggcttccacccccgaccaccgggttggggtttgcaagggtatttttcggaccgacaaccttcccgacgag

SEQ ID NO: 97221 - DNA, 1167 bp, Oryza sativa
  Clone ID: PAT_MRT4530_95245C.1
atggccgatcccaacggccgccgccgcctccccaccggtgatccagatcaagccaacgcctccccgtcccggcgagtctccgccgtcgatggcgtcaccggcggcgagggcaggcccacctactcccacttcccccccggcgcgtacgagccgacggacgtggcctacggcatccgcgacgcggccaacgacgagcgggcgcgggcgcgggctcgggctcgccatgaccagggtggcggggctcatgaccaccaccacgaccggccccggcaagaccagcgcggcgaggctcacctccacgacctccccggcgagaagagcgaggtccccgacgtcggtccatctgaccaacaggggaaggaagcctccgacaccgacatggctccattggcggcgctggcaaagagatcctacgacgtcaacttcccgccgctgcacgagcaccgcgccgcccccttccccgccccggcacccgcattcgcacccgcaccggcgggcaccatgggatcctcttccgcacaggtgcagggtgacggggctcctgacaatcacgaccacgacccacgtcacctaccccggcaagaccagagcggcggagctcaccccgacgacctccacggcgagaagaccatcggttcaggctccgatatcctcgacgactccaagagaggaatgatcaacgccggtccccaacacggccgcatcaccacctccaatggcggcagcggcagcggcagcgacaagggcaagggggtctcctacgccggggacaagcccgcatctagctcgtcgtcctccagctctgctggccagcaggggagcgacaccgacaaaactccttcggcggcggcggcgagctcctacgccgtcaacttcccgccgctgctgcccgcacccgctcccgtccccgcccccgcacccgcacccgcggtcgccggcgccatgggtgttgccaatgcccaccacaagattgcgctgtgcagcaagtggaggaaggggaggtgccacaacggggcagcgtgtcgctactctcatggcgaggaggagcaacgaattgtgccggagatgagagtcggcggcgggggacgtccgtgcccggagctcgccgccgccaagggatggtgcaggtacgggctcaactgcaagtattgccatggcggcgtatag

SEQ ID NO: 97222 - DNA, 332 bp, Oryza sativa
  Clone ID: PAT_MRT4530_95246C.1
ataatgctagtcagagtgttgtgccttcaacatctacgtccactccggaaacacaggaggaaggagagccaggtgaagaagatgaagtagcgataggtgaagaagaagaagaagatgatgaagaagatgaggaagagttagatgaagaaggaatagacgatgaaggggaggagatggaagagcaggatgtcttggatgttggacaaggtgtgatggagaatgagaaagggacggagaaagatgacaaagatggtggggaggagagtgatagcgagaacgaaatggccatggaaatgttggaattcatggacagtagtatgatgcccagctga

SEQ ID NO: 97223 - DNA, 147 bp, Oryza sativa
  Clone ID: PAT_MRT4530_95247C.1
atgcgccgaaattgtattgaacgtgcaaagcacaagagggagtgtggcgagctgaatgcgccgctgccgctgtgcgaccccggcggcgacgcctgcatcgcgtggtgcatcaacgagggctacgccaacggcaacatatgcccctag

SEQ ID NO: 97224 - DNA, 435 bp, Oryza sativa
  Clone ID: PAT_MRT4530_95248C.1
atggtgaatggatactgcaacctcacctcgtcgcctccggtggccagcggcgccgtggaggccgagaccaaatgggaaggcgtggccgtcggggcggcgacgctggtgaggaacttctcgtcagcctcccagaggttcaggcccgtggagaggagcaggtcgacggccggtggcaacggcggtggcctgcaggccgtggtgcggagggcgttctccatgaggaggcagccgtccagcttcgcggatgggtactggaggatccacgacgacatggacggcgacgacgcggctggcgagcatcaggagcaggcggcgttccaggatggggagcaaaaacggagggaagagcaggatcatgcgacgggaaagaaggagaagatcacgaagaagaaagggcggatcttcaaggcgtgcaagaagcttcttgggttctga

SEQ ID NO: 97225 - DNA, 441 bp, Oryza sativa
  Clone ID: PAT_MRT4530_95249C.1
ctgcaacaagtgatgatatccagcaagaggaacttctgaagaatgcccagtactcgcatatggattcctaaggcaaaaattgaggatgttgaacccaagaagtgtacatacatcatcctttgacagagaatagaagttcagacacagaacagaaggtcacatcatcttttttgtaccgggttaggaagctcaaatactgaagacttctctgctagtacgatttagctctatggtaactagtaatcctcgaatcatagcctggtagtcacacaatgttagtctataaacatgaagctgcacctattcagaaaccttcctcttaaacaccttatcctgtatctactcagcagtaacatggtcgagattttgtgctctaagctctggtggttgtgcaaatggatatcggcatctacaaagcaaaaaaaaaaaaaaaaaaaaaaa

SEQ ID NO: 97226 - DNA, 667 bp, Oryza sativa
  Clone ID: PAT_MRT4530_9524C.1
ggccgccccttttttttttttttttttcctcgcacatcaaaagaaataacagcttaagattgatccatcacaaatagattatatggcgcacattatataaactacaagtacatgctagaatataacataagcataagcacttgcataaatcatgtgtattccttgacgatttgaactgctaatggctcgtccgttgccactaggaatttattatccccgaagacctgaaaccctagatatttgcaaggcttcccatgggtaatgcacgtcaatagcttgtacgtcatattgtcatcatcactgtacctctcaatgcggaacactttagccgatgatgggtagttaggctctatatttgtgttggccacgacatattgcaacttagatgttgacgatgatggtggcattggtaacaatttcagttggaaattagagatgtaccatgtcgaggggcggttgcacaaccagatgatgtccacaaagtcaatctggacatcggtcgacaagcggactgcatcactgactgttgaattgtgcaatgatgtgaatctcacttttgcgccctagagagcctcatcggtcctatggaacacaaaatgctcacaatgtgtattgccagcatagatgatggagagggcacccccaccagacctattatttaccagga

SEQ ID NO: 97227 - DNA, 177 bp, Oryza sativa
  Clone ID: PAT_MRT4530_95250C.1
atggcgagccatggcattgtacgcgacgctttggtcggcgcgggttccaatccaatggagaaacctattggaaatggaatggccgtgacaccgtccgggaagacgaaattgagggacattgccaagaacaccaacgcgtcatcggattacaaaagatcaaaacagcctgtttattag

SEQ ID NO: 97228 - DNA, 776 bp, Oryza sativa
  Clone ID: PAT_MRT4530_95251C.1
acgtgggtcgaggggagcggcggaggcgacgcttgattctttctcgtgttgcctctccgtatcgttaacgcttatcgctcctgatcgagcggcaccgcctctcttcatgccggagcagctccggcactgccaatcttgcaagtcgctaaagttcagcttctgccgccattgcactggccacatgtaggatctttgctgctgattgaagactctattgtttcgctctttccagatggtccaagcaaccagagccacaatggtgtcaaatccccgtctatgttccttgcattgcttcatcgtgctgtcacatagccaaagatggaaagacgaatctgaaagtggcaagcatcctgcatgtccaatcgcattgagggccatccaccaaagctggcaagattctggacatacgatcagcaggtgatcaatgctctcctcgcattgatcacaaaggacacacttggcaggatgtggaagtcctcgctttcgaagtctatctgctgtctagtatctggtaagggcaacaagccagatgaagtaccgatattttggtgaagctaaagatttctagattgggctggactccagtgcagcgaatcctcctggtccgagagctgtatagacttcatcactggccagaggctaagatactcgagaatagcctgcattcccagggcaccagttatgtcttgaatccatcttttgttgagaagtgcttctgcaactgtcctgtgattgcgaaatctcgcaggaaccgcatcatagatggaaggcgccaa

SEQ ID NO: 97229 - DNA, 345 bp, Oryza sativa
  Clone ID: PAT_MRT4530_95252C.1
aaaaaaaattgcccacattttattgggggcacaacccggtttggaaccaaagtagttcctgccaaattacaggaaaacatgggtttttttttttggcccgggggctcctaaaataaaaaaaaccggacaatggaattcgcattttttacatgaggacccccctaagggaaggcccttttgggtctactttttgaacttaaatgccataaggggggggggggggcctaccattttggggggaaaaaatttttttttttaaacccaccaggaaggctcgaaaaggatgttttttttggcaggtaccaaaaagggggaaaaaacttggttaaaaaatttcaatttttt

SEQ ID NO: 97230 - DNA, 1419 bp, Oryza sativa
  Clone ID: PAT_MRT4530_95253C.1
atggccggacctggctcctctaggtccagacccgacgcgtcctcagtcggggtcggcgtcggggcaaagttagctgttgaatcagtggcctacgtcgccactgcttgcttatacttctgctccttctcaagctggaaggagaagacggtttccggaacattccttgctgtagttactgtagtggtcgtgagtgtggaagcaaccactggaaatgaccatggcgtcgccattttgatcggcacgatcgtggctctcgtggtgtactgcatctggaagccttatcaagcacttctctcctgcatcgagcgtcgcctccgccgcaaggcggcggcggcggctactgcggcggaaccactaccaccggagaagaaagaagatgcggggcgtccccttgtgcaggcggagcggctgcgcgccgcgtttcgcatcgacgggctgctccgggagtactcgcacggcgagatccaggccatgaccgacaacttcggctgcgtggtgggccgaggcggctccgccaccgtcttcaggggcgtcctcgacgacggcacggcggtcgccgtcaagcggatcgtctgtgatgagtccgtcggcgaggccgacttcctgagcgagatcaccatcgtcgccagcgtgcaccactacgcgctggtaggcttgctcggatactgcctccagcccggcggcggccggtacctgctgtacccattctacgagaaccggtcgctcgactactggctcttctccggcgaggagcggaggcgccacgtcgccgtcgacgtcgcgaaggggctcgcgtacctgcaccacgagtgcaagaaccagatccttcacctggacatcaagccggcgaacatactcctcgacggcgacttccgggcgcacgtctccgacttcggcatctccatgtccatcgggagggacctgaccagcgtcgacacgcgctggaggggcaccctcggttacatggcgccggagatgctggtcaacgcgctgtccgccaagtccgacgtgtacagctacggcatgatgctgttcgagctcgtcggcggacgccggaacttcgagctcgcgggcagcgggggcgcctcgcaggcgcgggcgccgccggatttcaccaaggaattcctcccgtgcgtcatgcgggacaggatggaggaaggccggctcatggaggtggtggacgccaccatggcgcgcggcgacggcggcggcgcggctggcgtcgacgaggaggaggtggaggtcgtcgtgaaggtggcgttgtggtgcacgcagcatagccgggacatgaggcccggcatgacggacgtcgtggacatgctcgaagggcgcgcccccatcccgccgccgcctgttcgtcctgaatttctcggagacaccttcctcgtcagctgcgcgcggacagctatgagccggtga

SEQ ID NO: 97231 - DNA, 993 bp, Oryza sativa
  Clone ID: PAT_MRT4530_95254C.1
atggcgacggctcgccgtctcctccccgtcactctcctactcatctcactctcaagggcattgtgcacgacgttcacgctgacaaactcgtgcgcgtacacggtgtggccggggctcctgtcgagcgccgggtcgccgccgctggccacgacggggttcgcgctggcgccgggggagtcgctcgccgtggacgcgccggcggcgtggtcgggccgcgtctgggggcggacgctctgcggcgccgacccgggcgggtccggcaggttcgcgtgcgccacgggcgactgcgggtcgggcgccctggagtgcggcggcggcggcgcggcgccgcccgcgacgctggcggagttcaccctcgacggcgccggcgggaacgacttctacgacgtcagcctcgtggacggctccaacctgccgatggtggtggttccccagggcggcggcgcggcgtgcggcgcgacggggtgcctcgtcgacctgaacgggccgtgccccgccgccctgaaggtcgccggcgccgacggcgccggcatcgcctgcaggagcgcgtgcgaggcgttcggcacgccggagtactgctgcaacggcgcgttcggcacgccggcgacgtgccggccgtcggcgtactcgcagttcttcaagaacgcgtgcccgcgcgcctacagctacgcctacgacgacgccacgtccacattcacctgcgcctccggcaccgccagttacctcgtcgtcttctgccctatcatctccagcctcaagtcgtcggtgggcggcggcgccacgaatccgtcggcgtcggggacggggctgcctctcatcaacgacacggtctccttcctcaaccgcggcggcggcggcaacggcggctactacgacgcgtcgagcagcgcctcgctgacggcgcccagtcccctccccgtcgccggccaagcggccgccgccgtgctcgcgtggctctgcaccgcccgcggccgccactggctgccgtggtag

SEQ ID NO: 97232 - DNA, 161 bp, Oryza sativa
  Clone ID: PAT_MRT4530_95255C.1
gcgcggatgcgttctaatgctaaactataacccagcacagcttcgcgcagcatgacgctcactcgtgtcacaaaccaggtcatatcttgacagatagtggctcagaagcaagatgtctctcacctgttcgagaagatcggcggccttcaccccgccatttg

SEQ ID NO: 97233 - DNA, 776 bp, Oryza sativa
  Clone ID: PAT_MRT4530_95256C.1
atggaaacagcagcaagcttagctgcaatttttgctggggggagaaagtggaggtggaacagtagaggcagtggacgacactggtaccggaggacagtacgggccgaaacagtttcactgcaaccggatctcgatgctcaccatcaatgggccagcggcgccaagcatgatgatgatgatgatgtaaaatctacgcgatttgggtgcagcagcagcagcagcagcatcggtacgactcgatcgtcttcgtcatctgcgatctggacggatgcaaatatcggatttcagagcgggagatcatggaggccaccttgcaaagaatcatgcaatgtccatgcagatccgcaggacaatggcacggcccagtttttttcaccttccaactggaccgatcgtgctgtcttcgtgattgaaactgtgagtaatcattgccttagtgctgtgaaaaccaaggacaacagaatggtgtccagagttcacctttcggattgagcaccggggtatcctaccacatgatagtacgacggatttcaacaaatttcaacaaaatatcagccagatttactgtttcagattttaattctcaaaaaccattcgaagtttcactcgaaatctactttagctccacgacaaaacttcaaaacgttacggttttcgtcaaaagcatgaaccctgatgctggcaccgtgggaagtatcaaatatcaacagcatatgtatccgggtatcccagattccagagcaagaagtacagtcaagagcaacatcaacaaatgt

SEQ ID NO: 97234 - DNA, 1402 bp, Oryza sativa
  unsure (1)..(1402): unsure at all n locations
  Clone ID: PAT_MRT4530_95257C.1
gctaaagataacgaaaatatgatgtactatatatatcctctctttatcttctaggaacaaaattggaacaaaattagatgtgatacctaacccttcaaaacttggctttgagacaatgaccgacatgatccagctttataaacgcctccccttccacttcactcttcttcactccaccacaggttcagctcgcctcctcccgtagccaacttccacgcagagatcgccaaccaccatgccgccgccgtcgccgcacccacctcaccgcaacggcaaccacgtcccggcgccctccggcgagtcgttcgccaagttcttcgagtgctggatctccgagcagtcccgcgacctcgccgcgctccgctccgccgcgtcggcggcgacgaaccccgcggcgccgcccgacgacgccgagctccaccgcctcgtcaaccgggtcctcggccactacgagcactactaccggaccaagtccgccgccgcctccaccgacgtgctccgcatgttctccccgtcgtggacctccaccaccgagaacctctacctctggtgcggcggatggcgccccactgccgcgctccacctgctctactccaagtccggcgcgcagctcgagacccagctcccggtgttcctcgccggcggcggcctcggggcgggcgacctcggcgacctctccgccgagcagctccaggccgccgaccagcttcagcggataaccgtcagcaaggaacgggagatcgagaacgccgccgcgagtgcacaggagtcgttggcgacggtgaagatggtggagctagccggaggcggcgggatggacgcggaggggatggagatggagatgaggagcaaggcggacgggatgaggcgcgtgctggagatggcagacgggctgaggctggagacgatgagggaggtggtggcgctgctccgcccgtcgcaggccgtgcacttcctcatcgccgccgccgagctccacctcgccgtgcacgagttcggcaggcgcaaggacggcgacggcgccgcgtcgccgccgccggcgtgacccgtgcgcgctcgtgtncgtgtcgttgccgttccaagtgcgcggcgtggtctccgatgcgtaggctcgtcgtctagctctggtcaactcaagtcgtcgcgataagctttgaccgatatttatttatgcagtactcgtacactagtatttctctctctctctcttttttttctgcgatgaagccgatgatacctgtagggttttttttttctttcttttttgcgtttgcatgtgatggaattttactaccgtactttggagcagctgtttctatatagacagtgagctaacctgcgtgatatttctaatcaattcgggaagggaaggataaaattgtttttaaaaaaaaaaaaaaaa

SEQ ID NO: 97235 - DNA, 271 bp, Oryza sativa
  Clone ID: PAT_MRT4530_95258C.1
gtaacaaagacacggatacatgatcacatacctcatgtgacgcactatcggacatacctaatctaaaaacacatgaaaccaaagccctttcattgaacagaacacatgaagctgtgggggctgcatcatacacaactccattccggcacacccatgtgcacgcagaatacacgcgggcgtccgagcacgagcttacacgagcaggaggacgggcagggaccagagcattctgttcagtgaaaaaaacgcactagcgaaccagaagcaatgc

SEQ ID NO: 97236 - DNA, 326 bp, Oryza sativa
  Clone ID: PAT_MRT4530_95259C.1
attatttttctaatcttccactgattgatcttgtattactaggaggtgatactgcggtttgtaacaacttgattttcgagtttgacacatggtctgagatctcacaattcaagtgcaattgtgatacctacaaatattgttttgatgctgcctatttaaaatgttaaatgatggcattctttttttttttcacatgctctgttcgaaaccaggtagcaaaggctcctgatggcaatggtggagtttatgctgccctcaagtccagaaggttgctggaagatatgtcttcacggggtgtaaagtatgtagattgctacggggttgac

SEQ ID NO: 97237 - DNA, 219 bp, Oryza sativa
  Clone ID: PAT_MRT4530_9525C.1
atggccatctatgccatgaggggagtcgtcggcgtgacgaatcaagccctcggggctatgatttccgtccggttttctgggaagatgtggtcagcagcggagcagctcgatgcagctgcgtttcgagcaccactgccatcgtctccgggcatcgtatccggcggcgcgctcatcaacgatgtgctcaccgacgacgtgctccactggctacgggtctag

SEQ ID NO: 97238 - DNA, 1210 bp, Oryza sativa
  Clone ID: PAT_MRT4530_95260C.1
aaaaagtccttacaaaaaccacaacgataatttttgcctttttattcagattttcccccgttcttactcacaatgcatacacaatcaatttattcaaattttacgtttatatctaatcatgattcacagggctgaacgaggtgagattgctggtaggtgacccttgtcctgtaagcttatcactgtcttgtacaagctctctttcaaaggagtgaactgcatgcctaaagcctccagcctttgtacagagaattggtaaggtttcaccattggcttactgttgtcctcacacctggtggtgatagggtactgggggaagagctccctaagcaagcgaacaaactcggaccggtgcagcacgctgccgatgcagaggtagcggccacgcgcgtcggggtgctcgtacaccagcgcgtgcgcgcgggcgacgtcgcgcacgtcgacgtacgcggcgacggcgttcgggtacgcactcttggtgcccctcatgtaggtggccaccctgtagacgctggcgttcagcgtcggctgcagcatctcccccacggtgacggcaggcaccaccaccaacagctgcacacctctcttcgacgcctcctccgtcgccgtcttctcggccaccgtcttcgcgtagcagtaccaattctgtgtttgtttgcagaactcaaggtcactccaacaagtctcatcaagagtctgatctgatctcctgttagggttcatatgggcagcaccataagacgaagtaaacaccacacgcttgatgcccatgtccgcagcagcattgatgacattctttgttccctcgatagcagttggcagaagttcagggtcatctgagactggtgatgccacgtggaaaacaccatcgcataagttgaacgcagcacgaaggctgttgcagtccaacacatcagctctgtggagggacaaccttcttttagctctctccagagcatgcaaatgagcattctttctgccctcagggtctctcacggctgccctcacggcgtatccgcggtggaggagctccttcaccagccatgacccgatgaagccaccggcgccggtcacgcacaccatctgctcgacgccggtgaccatctctcgtcgacgatcgactcggtcggccggctgctctgctctgctctgccgtaagaatgtattcttttttgtctacccttgcacgcatctcggttatagatcgaga

SEQ ID NO: 97239 - DNA, 1372 bp, Oryza sativa
  Clone ID: PAT_MRT4530_95261C.1
gaacggcatgatgtgggtggtcttggagtcgtagccggcgaggcagctcttggcgttcaccttgtaaatcttgagcagctcgagcgccatctgcctcgccgccggcgagcacccgctctgcagcagcaggaggaggcgagtcaggccgccctccgacgccgccgcggcgtcggcggcgcgccggtccctgtacttgtggcagaccgcccagagcacggccaccgcggcctcggcgccgtcgcggccggacttcatcatcctgcccaccaccgcgggtacggcctgctcggcgtcctcgcagagcgcggcgcggccctcggcgcagccgacggcggactcgaggacccggagcgccctggcggacgcggccgggtccgccgccgtggtattttatctgttcatgtctatatttcgcttgcaccgcttctttattattatagctgttctgtttttaggtggcgaggcaggagaggcccgcgccgacggccctcgcgtcgaggctccccttctcgtcggcggggccgacgagccgcaccagctcggcgacgagctcggccgactcggccaccgcctccctcgcctcgtcggcggcattggcgagcaggaactccaccagcctcgccgcgtcgaccctcgcctccagcccgctcgctccgcgcatcacgcgcgccagggacgccgccgacgccgcggcgtccgcggcgagcccggcggcgacccgcctcttgttcgcgtcctcgactccatccatcgcgacgaccgcggcgagcacccgcaccgccgcctcgcacccttccacgccgacctcccgctcgcccttcctccggagcaccgaggccacggcctcggcggcgccaccggcgcccaccagcgcgttcttctcgaactcgtcgacgtcgtcgtccgagaggtacgccgcgagctggcgcagcgccgcggaagggtcggcgtcgggcgacgcgacctggcggacaaggcccgcgggggaagaagtgacagaggcatcgccggaggtggcgggggaggaggaggaccagtgggagatgaggctgcggagggtgaggttggggacgaggtcggtggaagggagggggagcatggtggcggggcaggtggtgttgccggagtcgagccatcgctggatggaggcgcggtcgtaggtgacgccggtgcagaggctgaccggggagcgcatcacgtcgagggagatggggcaccggaagaagctcgggatcttcacctccagcgcctggtgctgcggcggcagcctcatgctcctcgtcgccgccgccgccgccgccgccgtcgtcgtcgtcgtcgtcgacgattccttcctgcccatggcgatggcgatggcgatcagcgagacgcc

SEQ ID NO: 97240 - DNA, 856 bp, Oryza sativa
  Clone ID: PAT_MRT4530_95262C.1
gcgacaaggaagcccaggggattgcttcgtcgacgaggagggagttggtggtggaggagaggtcgccgccatggagaatcttgcgctgctttgggggatcatcgggccgggagtcgccggtgcggtcttcggcgccgggtggtggttctgggtcgacgccgtcgtctgcagctccgtccaggtctccttcctccactacctacccgggatattcgcgtcgctggccgcgctcatgttcaacgccgtgaacaaggatgagatcggatacgactattactcgccctacggggacgattccgagtggagggtgaagctttggctttttgtggcgtatgttgtctctttcgtctgcctagctggatcagtgggtatgttggtgcaagatgccttgacagacaaaggcccttctgtgtggactggtgttgctggtgttctgcaatgtgttcttgtattgataagtgggttgatatattggacgtgtcactctgaggactaagggccagaatgttgcaagacttccgagggtgaaaggtcgtggtgataatgctccgaagaaatcttttctgccagtgtcaatgtgattttgtgtacaaaaaatatgctcatttcgtgttgggaagacgggatgtccatttgtgcataactgattactttctgaaatgatccttaacattggtacgtgtttgtcatattttcttctgaagttttggtttctgaatcttctgatgctctatcttgaggttagatctgaaactgaaaaaaaaaaaaaaccgaaactagacctgtggaacaaatcacaccgcagaaacgcccttctcaaacttctagtggcgcccctccccccccccaccaaagg

SEQ ID NO: 97241 - DNA, 738 bp, Oryza sativa
  Clone ID: PAT_MRT4530_95263C.1
atgggctgtcggcccatctctcgccccacgctcggtgccccttccttggccgcccgctcctcccttcccctccccaaagtgctccctccctccctttctcttccgggcgccgacaggtgggccccacctgtcgggtcgtccccaacctccagccgtgcgcccatgccggcaaccgccgctgccgccccacctcctccgctcctcccgcgcccacgccgcgccattcccgcgtcctccccacgacgccgcccacgccccgttgctcctgcccctcgcgcgcgctcgagagggcgggattcgatttcgaatcccaccccactctctctctctctccaccccacgtcgccggtgaaatcgaaggctttcccagccacgtccgcctccccctccacctataaattgctcccccgagcctcctcttcccctttccgctctcgccgccctctctcgtgcctcctaccgagcccgcgccgctcgccgctagcgctgccgcttgccgccatcttcggccacgcgccgccgtggctagggccgtcgcctcgcaacgcaatcaccgccgctagcttcgcacgtcgcgagagctacactcggcacgccactcactttccgtgcgccgctgctgtaccgctctccccacgccacacccgagctccgccgccgccgcccatctccggtcgcgcatcgccgccgctagagccaccgccgcgccgcacagtctccgccgtcgcgctcacctag

SEQ ID NO: 97242 - DNA, 729 bp, Oryza sativa
  Clone ID: PAT_MRT4530_95264C.1
tcgacccagcgtccgattctttgcaagcctccacattgaacagggcatcatcttcaacggagagatctgcacctgaaatatggcgaaagttgctgagaattgtggacaactaagttcaatggcatttaggcaagagcaactatggttcaatgcaaatgaaagaataccttggcatgagaagcttgatggtgaagaggcggggcgaaagcgtgtccatgagcttgtctctcttggaaacttggaaactgcggtgtccttgttactgtcaacacctcctgaaggctcaaatttttacccaaatgcattaagagcagttgtattgtcatctgcggtatcacgatctttacatgaacttgcagtcaaggttgtcgcagccaatatggttagaacggacaaatcactatctggcacgcatcttctctgtgctgtgggaagatatcaggaagcatgttctcagcttcaagatgctggttgctgggttgatgctgcaactttggctgcaagtcatttacatggttctgattatgcaagggtactccagaggtggggtgattatattcttcgcagtgaacataatatgtggagagctctgatactatatgtagctgctggagcactacctgaggctttagaaacgcttcgcaaaaaccaacgaccagacatcgcggcgctgttcttgcttgcgtgccatgagatctattcccagatcaccacagaatcagagtcatc

SEQ ID NO: 97243 - DNA, 1704 bp, Oryza sativa
  Clone ID: PAT_MRT4530_95265C.1
ccctcggcctccacgaagccctcgacggcgccgcctcccgctgtcgacgacgcggcggcgaggtcgtcgtcgtcgtcgtcgccggcgtcggcggcggcggcgcggaaggttcggaaagtggttaagaaggtcatcgtcaagaaggtcgtccccaagggcacgttcgccgctcggaaggccgcggcggcggcggttgctgctgctgcggcggtctccggagcagcagcatcatcggaggcagggggagaagccccaaccgacgagccagcaagtgatcaggacggcggagttgggaatgagcaaaaattggatgaatccaaacctgccacggattgcaatgccgttgcggtggtggaagaatcggtgtgtaaggaggaggaggaggtggccttagtggtgggtaagggagtggaggaggaggaggcggggatgtcggagcggcggaagaggatgaccatggaggtgtttgttggtgggcttcaccgggacgccaaggaggatgatgtgagggcggtgttcgccaaggccggggaaatcaccgaggtccggatgataatgaatcctcttgcagggaagaacaaggggtactgcttcgtgcgctaccgccacgccgcgcaggcgaagaaggccatcgcggaattcggcaatgtgaagatttgtgggaagctctgtcgagctgcagttccagttgggaatgacagaatttttcttggaaacatcaacaagaaatggaaaaaagaagatgtcatcaagcagctaaagaaaattggaattgagaacattgattctgtaacacttaagtctgattcaaataatccagtctgtaatcgtggttttgcatttcttgaactggaaactagtagagatgcacggatggcatacaaaaagctttcacagaaaaatgcttttggcaaaggcctgaatataagagttgcatgggctgaaccattgaatgatccagatgagaaagatatgcaggttaaatcgatttttgtggatgggataccaacgtcctgggatcatgctcagctaaaagaaatcttcaagaaacatgggaagattgaaagtgtggttctgtcacgcgatatgccgtcagctaaaaggagggactttgcctttattaattacattactcgtgaggctgcaatctcgtgtcttgaatcttttgacaaggaagagttcagtaagaacggctcaaaggtgaatattaaagtttcattggctaaacctgcccaacagagcaagcagaccaaggaagaccataaatctagtattactggggaaggcaaaatgaagacttctaaaataagataccctgttcaagattatacccacatttattctggagagaagcgtcccttttcaacactgaatagagtagcggattctttctcacttaatcattttgcatcctcttatgtcagctatggtgcgctgccccctgctactgctgaatcttctctgccacattatcatgacagcaatagatatcctccacacctaggtgaggcaatcaagttctcgccaaccagcgcagtcctatcgaagcaggcatggcaaaaaatgaaactggaaagtgcttctgaaaattatcctcgtatatctgcctgttgtgatgttttcttggtattcctgaattgtgaagaactgttgaacgatcctagcagtaccttcaagggcacacgtacatcactcctgacctag

SEQ ID NO: 97244 - DNA, 335 bp, Oryza sativa
  Clone ID: PAT_MRT4530_95266C.1
tatcatgcgatttctaccacgtatcgcgtgatactcgcgaggtatcatgtgatacctgtcaggtatcagacgatttctaccacgtatcgcgtgatactcgcgaagtatcatgtcaggtatcagacgatttctgctatgtatcgcgcgatacttaagagatatcggatgatacttaccaggcgggcgcggcggcgatggcaggggacgggcgcggcggcaagggacggcgacggcggcggtggcggtgggtgcgggcgcggcggtggcggcggtgggggatggggatggcggcggcgggggacgggcgctgttagttgatccccagctttctagtc

SEQ ID NO: 97245 - DNA, 495 bp, Oryza sativa
  Clone ID: PAT_MRT4530_95267C.1
atggcgagaggcaggattagagggatggtcgccggccgtggtggtggcctggcgggttgcggccggcggtggcgctgccgaccggatttgggaggaccccagtggcaggggtcagcaatagcacgggaggatgctgtgacgccgcagggatccacccctgggcgcggtggcgatttcgccactggccgcgggcggtacatgctgctgctggtgcagacgatgttgggggaatggctccggattaaatggtcagcctccggaaggcctgcagggcttcgaggagccatcctccccagggagataaccgaggagcctggcaaggcttcggaggtcgcccaagggattccgagagtgatcaaggaagccggagcatccgaggctcctggagccacggagggcatctcgagctccggagcctggcgagccttcggagcacgctcaaggggctccggaggcggccagggacttcggagcttcggaggtttccagagctaa

SEQ ID NO: 97246 - DNA, 159 bp, Oryza sativa
  Clone ID: PAT_MRT4530_95269C.1
atgtggctgatccccacgggctgggtgatccggctgacgggatcagctaggcccgggtggccgttgggaaagttgattggcccggttgctgaagatgatgaagcagatcccgctgatgaggagttcttccaggagcaagccggctacgatgagttttag

SEQ ID NO: 97247 - DNA, 218 bp, Oryza sativa
  Clone ID: PAT_MRT4530_9526C.1
ccggaataccgggcgcgccccacgcgtccgcccacgcgtccagatcatagcaccattgtctatcaccatcggatgtaccttgaactatggtatcaattataccccatacttgcaataaggctccctctgccatcttttatgcaggaaaggtagttggcaaaggctgtttaccagctgttagaaacgaacaccgtccatcctttgccattgtatgtaag

SEQ ID NO: 97248 - DNA, 529 bp, Oryza sativa
  Clone ID: PAT_MRT4530_95270C.1
gttagcctaagctttgcttgatttgcagcagcagcagcagcagcagcagctaagcttgcatccatgggcgtcttcgccgtcaccaaggtgtccgagggccccgtccggccgtccgccgcgacgccgtcggagacgctgccgctcgcctgggtcgaccgctacccgacgcaccgcggcctcgtcgagtccgtgcacgtctacctccgccgcgacgacgccgccgtcgaggcggtggcgccggtggccgacgacggcggcgtcgtagtcgaggggaagaagaaggagaagaagccggcggcggcggtggtgcgcggcgcgctggcggacgcgctggtgcactactacccgttcgcggggcggatcgtggaggacgagcggtcgccgggggcggcccgccgtgctgtgctccggcgagggcgtctacttcgtggaggccgtcgcaactgcaccctcgccgacgtcaaccacctggagcggccgctgctgctgtccaaggaagacctcgtgccgtgcccgacgcccgagcagt

SEQ ID NO: 97249 - DNA, 453 bp, Oryza sativa
  Clone ID: PAT_MRT4530_95271C.1
atggcggtggatccattaagacgagtcatagcgcctcgcttttgggcaggggttatttcaatgccaattttagcagtcatttttaccgctattggtatttggggcggttcattagttggtgtggactggaaaggcgttgatagcggcagtttttggtcagtcatgcaacattctgtaaatggacaagacttgatcaatggttttattaaaagcatcatttttgctattgctgttgtttggatcgcattatttaatggctatgattcaactgctacctcagaaggcttattaggtgagcaatatattgtattaaatgttggctttatgctagaaggcgaaacggaatatatgatagaaggaaatagctttgccgataccaattcagcgattgtcttagaagatttaattgggcaattcttatatggcgataaaaaatcagcaaccactgaataa

SEQ ID NO: 97250 - DNA, 447 bp, Oryza sativa
  Clone ID: PAT_MRT4530_95272C.1
atggacggacagcggggtcaccagccggggcgggggcgcgggcgggcggcgccgcccggatggaccggcgacgccgggtccgggcagggctccggccccgacggctcctggaggtacgggtgggggtgggcctcggggcccggaggcggctggggctacggccacagctcggcgcagagccccggcggcaccgcgttcgggtttggcttcggcggcggcggaggcggaggtggaggaggcgttggcgggcgcggtggctccagcggccgcggcggccacggtggcggtttcggctgggctggcgggcagggccacggcggctggggagccggcgctggggcgttcggaggcgggagtggatcaggcggcggcggcggcggctggagcgctcgcgggggattccacggcggtgacagccaccggcctcagcgcggtggcggcaactga

SEQ ID NO: 97251 - DNA, 631 bp, Oryza sativa
  unsure (1)..(631): unsure at all n locations
  Clone ID: PAT_MRT4530_95273C.1
ccgccagccatctcacgggacgggagaatcgccggaatcggcngnattctccgggcacgantcgggccgagaaatcccgggtgcgcgctgcgtcgaagcggcgcggcgagaggggaggggaatgtggtgggagtgggaggaggacggcgaggaggcggcgcggccgggggaggaggtccccgtcgacttcgacttcatctccctcctctgcaagcccaaggattactacaagattctggaagtgggatatgatgcgtcggaagaggcgatcaggtcgagctatatacgtcttgcactgaagtggcaccctgacaagaagcagggcgaagaaaatgcaacctccagatttcaggagattaatgaagcataccaagtgctcagtaatccagccaaaaggcgagagtatgacaagaaaggcattctttatgttcaagatcataatgtagtggactatctgaaccacggtcatgcggacctgccacttttgggaggaaatgatgacgctgagttcatcctgtgttttgacaaatggaaagtggtcggaagggaattagggaaaatatcagctgatctgttggtgacactgcttctcccactcaattttcaatgtgtcaaaactcaatagaaaaaa

SEQ ID NO: 97252 - DNA, 835 bp, Oryza sativa
  unsure (1)..(835): unsure at all n locations
  Clone ID: PAT_MRT4530_95274C.1
gatctaccagcttcagatttcagagagcgattgatcaagtgtagtagagcgagctccatctgcggccatgggagcagctcgtcggcttcgcttcgggctacgagcgccagcggcgtcggccatgtcggtcctactactgctgctgccgtcgtcgctttcgctcgcgctctcgccgccgccgccgccgcccttcttccctccgcagtgggcgccgccggtggccggcggcggtggccctttcgctggtggaggtggatatggaagtggagccggaggtggtggacccggcggggttcacgagcctccaatctcttacgtgtacaacaacccgtacatacctataggcaagtcgacgtggaatgtatcgttggccaggccccaggacatagcaagccaatctaagggtttatttgggggagctttaaattttgagaagcagctgtttggtagccagcttctgagaatctggaaaagctctgaaacctagcttttatatctcctggctttttagttcatttttcagaatcttagactgtttggggcagcttctagcagaagcagcttttaggaaaagctgcagctgggacaaactctcccaaacagggcctaagtagcacatagatcacatctattttaaattcttctgaaacttgttgatgtgtgtccattgccaaagactggagatataatctattttcattattaaaaaaatagcacatagctagaaattcatgcccaaaagtttgtattcgagtctatgtaaatttgctccaaaggtatntgaaactgttgaataaagatnntttntggggggttttannaaaaaaaaaaaaaa

SEQ ID NO: 97253 - DNA, 234 bp, Oryza sativa
  Clone ID: PAT_MRT4530_95275C.1
atgcgcggattcggcgacggatcggcggtggaacggttcggcccgcggcccggcgagaggcgtggagaagagcgcgcggatggtagcggcagcggcagcagctgctctgcttctgctgcctgcttcggttggtcggggcatcaaaagggggaagtgccggtaaaagccaagcgatacggagcgcagctttcctggggaatggtggagcgcgcgactgcggagctgcaggagtag

SEQ ID NO: 97254 - DNA, 924 bp, Oryza sativa
  Clone ID: PAT_MRT4530_95276C.1
ctcccagttgttcttgttctcatcaaccgggactaaagatctaggggtatatatattttcccgatgcgcgccctcgtcttctccaccaacacttagaagtttttgccccgagcgatctctctcggcttctccttcgccgccactgcctagggcatccccgcgccgacgccgccgtcgtatctcatcgtcgtctcgcgcgcgtcgtcgtcgacgtctacgcctactccgccgacaccgcatctatggagtgagagccgccgccgcctccctctctagctctctctctccgatcttgatctctctctctcggttgccgccggctgcctcgttgccgacgctgacgccgacgtcgtcgcggccgaacatgactccgccgcgccacgacgccgcggcggcacgacacgccgggacgccacgacgccgccgcggcaccgccgcgccgccacgccgccgccacgcaacgccgccgtcgcaccgcgccgccacgccgccgccgtgccgcgcgcgtggccgccaccgggccgcgcgccacgccgatgccacgcgcgccgcgcgccgccccgccgccgctcctctgccgccacaccgcctctccgctagctgccgccatgtgaacgaacgaatgtgaacgtgaacgtgaacgtgaacgagcgaacgaacgtgaacgagaacgtgaatgagcgaacgaacgtgaacgaacgaaacatacgtgaacgagaattggaacgtgaacgaacgttaacgaacatgaacgtgaacgaacatgaacttaacgttgtatttgaacgtacataaacgaacgaacatgcgtgaacgaaccttacttaacgtacattaacatggacgcacgtgaacgaacgaacgtaggtgaatgaaacgtgaccttaacgagaacgtgaacatgaacgatcgtgaacgaagtgt

SEQ ID NO: 97255 - DNA, 192 bp, Oryza sativa
  Clone ID: PAT_MRT4530_95277C.1
atgggtgctcgcgcctctgcgttcctgcgtctcgagatcaaccggcagccgcaacgcctgaaacgcgcgcagccgcaacgcgacgcggggcagttgatgatgatcctgcaggcgcggcatcaactggcagtgcgccctgacgaaaaattctgtccaaatgttagtgcagctgacgacgcatattacgactaa

SEQ ID NO: 97256 - DNA, 408 bp, Oryza sativa
  unsure (1)..(408): unsure at all n locations
  Clone ID: PAT_MRT4530_95278C.1
gtcgactctagaggatcccctcgagcaggaagaggaggcaccggcgtggccttcctccgcctcccctcggcctcctccgtctcctcttggccacgagccaccggctcggcgctccacgctgtcctcctcctccgtgccgccgccgttcgcgtcaccggccgccgcgcaacgtttttctccgggtcggcctcctgcttcagctcgacgggcagcgaccttgcgaccgcacgcctacgggctttacaaccactgcggaaggcgcgagcggcggggggaggagctactcgtggacggcggccggcgggggagcccgtgtgccgctttccccaccggcgccgggtngactgcatcaccgccgacgcccgccgcctaggcgctgccggccacagagaagggagagagagatga

SEQ ID NO: 97257 - DNA, 1800 bp, Oryza sativa
  Clone ID: PAT_MRT4530_95279C.1
atggcaggaaatatgaagttgatgttgcacactagtggtatctttttggatgaggaagatggtagaagtaccaagttgtttcactcaagatgcaaggtgcagtccgcttcttgtgccttcacgattgatgatttgagcgcggtcaacttggtcagcattgagctcatggagaaattgaacctattcacatgttcacatccagatccatatctactagagtggacaagttgcaatctcagcattacaagaagagtaaaagtgccctttttattaggggaattttcagataatgttgagtgtgatgtggttccagtgcctatgtcatcatgtcatatattattgggatggcaatggatgaagagtcatcagcttgaatctgattttagcacaaattcttattctttgctacataagggaagacatatgatacttcgcccgatgccttcaaccatgtttcttcttgatcgggagaaaaggaaacaaaggacattggaatatgtgctatccaagaagaaagagtatatagtcaagcatgggactttcccttcggctaatgtgacatgtagtgatgttgcggcagtgcatgcagcacaacagatcattgttgatggcaaatgcgccattgttggcccatggtcattgcatgatgagatgcgagaaaacccatgtgacaaagagagccacatagccaaattgagtgagagtgctgaaaagagtaagctatgtgattccactaaatgtgaggttgagtatatccaaaatattagtgtggacgaaaaagagaacaagcttgatgttacacaaccagcaccttttcaagagcaagtgcctcctacaacacgtacatcttccatcgagaactttaacgataaatatgaacatattgacatgctattgcagcaaaacatgtcgggggcgacttttcttcaagggagggggaatgatatgagcagacatgagagatttggaccattggctggcataaacaacatgtgggtccagtcggaggtgaccgttgtagcggcgtacatgaggaagatcaattgctattctgttcatgaagttcatggagaattctgcattgatgagaaggctttcaacatgaatggcttatatactaggaaaggttatcaagtccactttccatcggatcaaacggcatgtcattccgagctttctaccaacggcaatctcaagttgaagacatcatgtgcgggtagaacgggcaacgcgcaagtaacaacaatggtgatgaacgtcggctttgaacggcatgtttggatggagttatactatcctatggcccatcttgggttgggaaggagtccatctataatttctccatggattgaagccttccaaagcaaggagtttctagacaaggaagaaaagattcagttcggactcggtttgggccagcctggatataccaggactaaaacgcccgtttctgtctcgtccggagtccgttttggacgtgtgagcacttgttgaaaagaaaacttcatggcccaggtggtggatagggctcaggacacaaatttgttctggttccaccgcaagagccgaaacaaattgacgggaattgagggggcaatagatccacttttgcgtggtcaagtggatcaacctatcaaagcgtgtggttttgcgaattcatgggagtttggcctgccgaatgtcttagcaagccggttggaaaagattgttggagcactatttttgactagaatcgccaaaattttgctaggagaggttattggagatgctcttagagttgtgtacaactccaatgtttga

SEQ ID NO: 97258 - DNA, 408 bp, Oryza sativa
  Clone ID: PAT_MRT4530_9527C.1
atattaaactttttaaaaaaaagaaggaaaattttttttttggatttatccaactacaagtggaaaagcagcagaagatcacgagggtttgtagtaagcaagcaagtagcattacttgattactctgcttacaatctgtaacaaattactagttctactcggcaaaatggaacataaaacactggttcacaaaaagcctgtattgctaaaaccaaaaattacaacgataaaaaaaagaaacatgtgaaagtggacataaaaggtaaaaaaattggaacgcaaatggttttttttcttttaacaaaaaaaccccgtaaaacgcgaaaataccaaaaaatacatcccaaaaagaatagaatgccgcggtggaaaaagaaacgaaaaagaggagaggaaaacaaagaaaag

SEQ ID NO: 97259 - DNA, 274 bp, Oryza sativa
  Clone ID: PAT_MRT4530_95280C.1
atgctccaccatacgccacgcttgcaagcgagcacaacgtcgaccacctcttggttcatgtcaagcagggtgtcaaagagcgcaggcggtcatagtcggtctggccatggcgccgctgtcgccagcgaggtggctctctggggattcaagggggcccgcttgcctaggcccgtggctgccccattacataggcccgtggctccatatcgtttcagcacttgtcgttgctacagcatgagggccacgctggcgccggaaatgtcgtcgcctccat

SEQ ID NO: 97260 - DNA, 572 bp, Oryza sativa
  Clone ID: PAT_MRT4530_95281C.1
cgtcgccctctccggacgatacggggtcggcataggggtctacagaggcacccactgatccaccccacggtccgcgggactgatggcgggactagggcagatagctgtcgagatgctgttgcagttgttgctcaggttttgccacaagataaaccagaagaaattactgaacttgctgatgcactttctgttgcagagctcatgaaggcactgaaagatttgggtaacaaaatggggctggataaagggcttggtgaaagaactgctgcaagtcctcctgctaacttactatctaactccctaatgaatactatcattactgctcttgacaaacctgatgtcttccttcaggctggagcacaagctacagtggaaactgctatagttcatgcaacagtccgaacgactgatacagcggcacatgctattggagcttatattgaacctacatctgactatgactatgaccatgatcatccagacactgtaccacagaccgttgatgagattgctgacggtctggcctactttgtgttcaactctgaattctgctaacaatgctgtcgtcattg

SEQ ID NO: 97261 - DNA, 350 bp, Oryza sativa
  Clone ID: PAT_MRT4530_95282C.1
cccacgcgtccgtctaaatcgaagtgttgcttcgcaaaaaaaaaaaaaaaaaaaaaaaaagaaaaggtaaaattaaaaaaaaaaaaaaataaaaaaaaaggttgattaatttaatagttgccggcctttttacagcatccatgcttccttatgctttttttttactgtttcctttttttattttgctgcctaatatttatttaactggccgtctttttaaacctttgttttccaaaatcactggccttacccaacttaatccttttgcaagctattgtattttcgacagttcccgtactaattaacattcccaaccctttcgccctttcaatcagttttgcatcctgcct

SEQ ID NO: 97262 - DNA, 504 bp, Oryza sativa
  Clone ID: PAT_MRT4530_95283C.1
actagtggatccccgggctgcaggccactctcgtggcggttctgccgatgcaggagcagctgaacatgttcgccgagtacaaggagaagctcggtgggatcgccggcgaggccgccgccgcgaggatcgtgtcggagagcctgttcctcgtctgcgccggctccgacgacatcgccaacaactactacctcgcccccgtcaggccactccagttcgacatctcatcctacgtcgatttcctcgggaatctagcctctgatttcatcaagcaacttcaccggcaaggggcgaggaggatcgccgtcctggggatgccgccgatcgggtgcgtgccgtcgcagcggcggagcgtcgccgtcgacgccgcgggcggcggaagggagtgcgaagcggcccaaaaccgcgcggcgcggctgttcaactccaagctggagcaggagatcggctgccttcgcgagacgctgcagctgcagagcatcggctacgtcgacatctacggcgtcc

SEQ ID NO: 97263 - DNA, 381 bp, Oryza sativa
  Clone ID: PAT_MRT4530_95284C.1
atgcggactccgacaaggcggggcctcagccaccgctgcccctcttcccctgaattgaccttgggagacgatgtagactccaaccatagtcgaggggaccatggtgtagctggtggctcgggcgtaggaggtgatgatagcagtgccggtcggaagaggtggagaggcctggcgagcagcaccgacggagaagatgacggcagaaatccgccctccttgtcacctaccaagccagatccacccttcttccaccatcgccacctctctcggtcagggcactatgatgtgggcagcgagataggcggcaaaaaggttaaaaatgtccggtattggagtttaggggtaattcggacgatcgcaatagtatgggggttattttga

SEQ ID NO: 97264 - DNA, 2077 bp, Oryza sativa
  Clone ID: PAT_MRT4530_95285C.1
agttcataaaactgtgacactgcgattatatcttaattgtacaaagttataacaatacattgatcaaacataataaatacaacaattaaccacttaaaaaaggaggggaaactgcagaaacatattcagttcctcatccctgtcgccctgcttgtcctacgtaccctatatattttcaaggatacgtaccctatgtatgaaatacggtacatacatacgtatatacgtactgctgcactgtaggcctgtagctactggtacaacaaaaaaaatcaatggtaaattaattaatcacttagtaataagtaattaattagttactatgcttgatcgattaattagcttagctaattatcctttgctattagcttgcaatggatcgatatcgaatcgatcacggctcgagcttgacgaactcgtaatcgccttcctcccctttcttggaccccgacccgccgccggcttgctgctcgccgccggcctcgccgccgccggccttcctctgcgtgagcgcgacgccgccggcctcgcccttggggctgccggagtgggggctcgccgccgcgtggtcgccgccggcgtcgccgtgcttggatgaggacgccgccgccggcttcttcttgacgccggcgcgccagttcttgagcgccttggacgtctggtcgtcgaagattgactgcttcatcgttgaccccatttgtgagacgagtgcatagagggggagagtgacatagctacacaagaactgaaccacaactccgaggcagaggcgagcaaagacgaactctttggagtcattgaagcaggagtccatgccgtactcgtacagtatccagaggaagtagatgatctggaagccattctggaagagggtgaaatggatgaggaagaggacgaaggttggtcggctgaaccagaagtaggagtcgctgacctgcaccagcggtatcccctggatcaccgcgtgccgctccgtgatgtcgatcgccatcctgcagatgatcccctgcagcttcgtccccaccgacaggatcgtcaccactggcatgatggagatccaaagcatggtatgcaacccgctgacattgaggagcaggaagatgagagcagatgcccaaaggggagggctgattccgacaatgaccttgaaatcgtcctcgagagaccgtttgatgtacttctggaaatcgaacttgctgccaggagctaaatgaacgttgacgaagctgtgacgcaacgcgcagtagtcggccctcctggccgatctgaagaactgcctgaagaaattgctaatgtagaacgacgccggcgtcttgttcagcacgttcatgtgctgcctgacgaacgacgtctcgtgagtaaatctgaacttcgtcggatcattagcgaactcgaaatcttggcccgcggcttctttttcccactctttccatccacgaatcttggccctgccaagcgccatggtgatggcgctgtaggtgacgtggaagacggcgaggaagaagatgaagatgtgcagctggtgcagcgcgttgattgagatcagagacaccttcccatcggggcatttggttgccatcttggcctcggcgagcaaacggtggtgagggcgggagaaggcggcggtgaagggagggccgacgccgacgaggctgaagtgctcggccggcgtggcctcgtgttcgccgccggccggcgtggccccttgttcgccgccggccggcgtggccccgtgttcgccgcccttgccggtctcggcgtggatggtggaggccttgaggcggcacgggagcatggtgtcggcggccttctcagtgatgcagatcttgatgatgtagttctggccgaacacgagcagcagcgagatgaaccctagcaccatgagctctgtcttcaccttctccagcgcctccaccatcgccttcttcttccggtgcgagaagaactccccgatcttgtggagccccttctcgaggaggatggagatgagcacgatgacgccgcacacggaggcgacggcccatgtcggcgtctggtcgagctccctcgtgttgccgccgccgcctcccccgccgcc

SEQ ID NO: 97265 - DNA, 614 bp, Oryza sativa
  Clone ID: PAT_MRT4530_95286C.1
ggcggcgggcgggggaaggcggctgggggccgcgggagcggagccggctgggggcagcgggagcggaggcgaggccggaggcgggcgccgaggccatggctggcgggcacggaggcgaggccggcggcgggcggtgggcggcggcggaggcgggtggcgggcgtggaggcggctgcaggtggcgggcgaggcgcggcggccggcagcgtaaggcagcgcacggggcgggcggtggacggtggacgccgtcgcgcgggggcgcgggacgtggaggtgggagcgacggaacgtgctcaccgccggccgcgaaatggtgttcgacggtgcgtgcatcacgaagctctgtgtgtcgtcccatgccaaccccggcggcgacggcgacgtacggcggcgacggagacagtgcggcacggcgacgaggagcggcggcccgtcccctcgccgacgaggagctgccgctggcggacgccatggctcctgagaccgccgtcgctgcacctgaggcccgggatggtggtggagaaggggaggtgacggcgacctcggatggctccaccgtgcaggaccacgacgacgacgacgacgctggagccgccgcgggctgccgtggataa

SEQ ID NO: 97266 - DNA, 238 bp, Oryza sativa
  Clone ID: PAT_MRT4530_95287C.1
ggacattcaccactggtaatgtggggattcgaagagcaataatccaagcataaaagttaaaattaatctttaagtccagtcaatggacatgaagtatgcttgctttctttcgtacagtttcaatttgagcctttgcacattaatggttcttaggaaaatgacttatttcctcatgcaaattggcatgttcagtgacttgttcccctttattcgaaagtgaaacatctaaatctttcta

SEQ ID NO: 97267 - DNA, 712 bp, Oryza sativa
  unsure (1)..(712): unsure at all n locations
  Clone ID: PAT_MRT4530_95288C.1
atgctaacttcttgccaagcaccccatgncactgtgctcaaactaaatcgtgagncaaccacacaccaacccctgtgcgcacactcttcttcgctcaattctgggactcgcaacctggtcgattcaatgaatcaactcaaagaccatctcccgccctgttcaagttagcacatgttttggtcgttgcaccttttgtgatgaagcaagcaaaattttacatccaccatgtctatctggaagttatcctgatgatggtgatgatgccgtcattcatgactacgatgttactgatgccattcttatgtatggttctgtttaacccattcgtatctatgattttgtttcaccccaaattagccaagacaagggcaagttttggtcttaagtgcttgttaagaggatgagaagcaactccagaactcacggaagaagtgcctgaagaggatcagcttttgtaatttgttctgctggagtacccttttgtgtctgacacaaatgttttaagtggaggtctggtctttagtttatgctggatgtgactagattacttttgggtttatgctggatgccgactagattacttttggtttatgctggatgtgactagattactcgtggtgttggtaggtatttttgttcttgttttcttttgctgttaatgtttgcagcctggaagtgaaagggatcgtatttcactaaaaaaaaaaaaaaa

SEQ ID NO: 97268 - DNA, 575 bp, Oryza sativa
  unsure (1)..(575): unsure at all n locations
  Clone ID: PAT_MRT4530_95289C.1
aaaacancntggtttaaaaantggtacccatcnactgggacntctcatggncaacaatgagaanttgtttcaggatccttactgggctagccattggggcnagttgaaaggaagaggattgccggacgcgtgggtgttgagactgcgattccagttatgcaacacaaggaatgatcttacgtacatgattttggaaaagtttgtggttagcaagtcttgtgtgctcgatattgtgtaagatatgtgatgtacatgtgtactttaaatagactttgtatagtttttatgcgccgttgtacaatgttgaaagaagacgtgcaaagaaagcatattttaactttttttaaagaaaagaataactaaaaaaatcatgccatgcaaaaggaagtgaacgcttatggctacctgatattgcgggagcaagcacgaaagtcttaagaataataggggagaagaactcggtgcctttacttcttagatgggggggggtccaatttaaaagatcataattttacgaccctctgcaattgaaaaaaatttttttttttttcaacctaaaatctaaaaatttaaat

SEQ ID NO: 97269 - DNA, 361 bp, Oryza sativa
  Clone ID: PAT_MRT4530_9528C.1
atggtggaggatggcatcgaagaggcggaggcacatgtagggggaggcgcgcaaggcggcgctgtaggtgtcgaggaggtggatggccccgtgggtgtggaggcggtggagtcggcatgggtggaagcagaggtggcgagggagagggagttggtgtcgaggagattgagggccccacgagaatggaggtggtggaggagtgcggcggcacaggagaaggaagagggtcctcgtcgtggcggtggtgcagaggcagtcgaggcagcatgggcggcaaccggaatcccgtcagagcaccgccgcaatgagttctatcgcctcgtgcttccgctcggcgtgccactctcgtccgaacacaaga

SEQ ID NO: 97270 - DNA, 276 bp, Oryza sativa
  Clone ID: PAT_MRT4530_95290C.1
atgggcatgaagaagaggtggaaagctattcggtggataacacctaccataagaatgggatgtcacggtgccatcgccgccgccaccaccaccaccaccatacaacctactatgatggcgtacaggaatggtagtttcagtgatgtccccgcgtacaggaacagtgggttcggtgctgtgcccgcgtcgagcacggccatggccgagctgcaggaggcttgggcgagcgaggcaaaggagctcaattgcatgcgctgtttaactggaggtctttga

SEQ ID NO: 97271 - DNA, 498 bp, Oryza sativa
  Clone ID: PAT_MRT4530_95291C.1
atggggatgaggtggggcaagggaggagagggcctccccccatggcgacggcggcgtcctcactttcccatcgcgctcacgtccccgctgctcgttgccgtggcggccccagggcacctcgccgtcggcatccccatcccgaggcatggctcctccgggggtggcggggatgaggtgggggaagggaggagagggcctccccccattgcgacgggcaacatgatgacgatgacggatgaggtgggggaagggaggacagggccaccattcgcaatggccttcaccgcacaaccctttgcagccttggcgtccaccacacatgcgcggccagccatcccacgccgctgtccttcgtcgcctctccacctagagcgacggcgcgccacccacctccgccagtgctgcacggcctcccgcacccgccctcccacaccgcccggcctccccgacgagccaggcgccgtcgcgacgacgcggctgatggagaaggcgtcgtga

SEQ ID NO: 97272 - DNA, 344 bp, Oryza sativa
  unsure (1)..(344): unsure at all n locations
  Clone ID: PAT_MRT4530_95292C.1
ttcgacctcacacctaccgcaccttttatttatgaatatgatggaaattcttcaaagtcaggttactaccgagatagtgatggttaataaaaaagttngacactttatctgggcaccttcattagctggttatattttttttttttttcttatatatttccgttttttataattttttaaccttttacttttttatttattttcatttttcttaatatttatttctcgttcatatatttcttttatttactaccattcctatatctttactctttatatattttccatttcattttcttcttttttcataatattattctttaccttttattattttttttttt

SEQ ID NO: 97273 - DNA, 393 bp, Oryza sativa
  Clone ID: PAT_MRT4530_95293C.1
atgtgcagctcacagcctaggaacaacatgatccgtttggctgtgggtcatgctggcacgacccgtctagccacatcgttcttgggctactacccagcccatcgtgccaacacgacaagtgcatgtagtgagccagcacgacatagaccaggaatagcacacgccctggcccgcgcggcacgatggcgaccgacgattggtgaacaaccgccagttaagcaactaccatccgagcagaagccaggaggaaaggagaacgaaagaatcgaggaagccagggatcaggggagaggaagcgatgcttggggcgaaaaaagtaggaagcaaagggccacgacggtgcttgacgaggaggaagaggaatgtgctatcggccaacacgatatgacctga

SEQ ID NO: 97274 - DNA, 3276 bp, Oryza sativa
  Clone ID: PAT_MRT4530_95294C.1
ttatgtaacttcatctataccaggtgatgactgatacagcctccacggaggggctctgccatctggcaattgtcttaaacccatatctgcagttaagtgtttcaggagcagacccattgtatctgcaataaaactgaagacattgctatctggttggcgaccaactctcatgtacttcacattccccacagaaaatagttggaaggtgtatatctggagtggactgtagaatacactagcaaaaatgtaaaccaaagctttgtacagtaacgaaaattctgaacgacaggctaatgcaattactctataccttaaaaagcgctttagcactttatatactactgcaaacctacctactgcgcagcacagcagtacaaccctttcagcacatgagtactgaaaaccagcttgctcagcacctgtcataaatagttcacaaaaatcacacacgtcctccacattcacatcctcagaatccgtaatgttccagttgccatcctccatgaaaaccctcataaatttcatcacgtagaacccacatgtactcgtgcccggatcctggcgtgagcaataagggtggcaccagacccggaatgtatttgaacacggagcgtgttgaatacgcttcttatacttcacaagtgccttatctagggtgtcaacgagggattgaaacttggcttgcggggtcctcattccatccatgacaacaatcttggaatcgtttaaatggatagcaagaaggatccagtgaggcttaaagtggtagggcaaaaggatggtattcatgtcttgtagcttgacaaaggatgtgtacaggtagtccaacacttctttttcggacttttcacctccctcaattttagtggaattgactatttgtggatcgaggaatcctagtttgttatgggtcgttctacattcaagtgctcccattaatacccataactgaattagcgataagtctacctccttcagattgtatagctgaaaaagttctttaaatgggacccaaactataccatcacagtgatgaaagtcctcgtccctgtaaaagacggggaacatcaccttaccctccttggccatctgtaagtaccactcttctacccttctcatctgagtacaattgccaatgaccttgcgatattcgtcggtagttaaagaataaccgagcttgaactgagctgccaacggggacttcgcaatattgtctacatcagacaaactttggaggcctgcaccttccagaaattcctgcacattcttgttggcctcgtctttctcaaattctttctttgaaaattctttcaatctttttttcctggtcgtgcgtcggaagtctgaaataggtggttttggggcaagtggtcttgccatgcgattgaagtggtcatgtactgcaactggcactttcacatttgtcgcctcctttattttgtcccctttatgtttaaggagcaatgttatgctcccgctcatctcctttttttccttcaaagatggcaccaacatgttaggcagtggcaccttcttgggcttcttcagagatggtggttcagacatctgggaagttttacacaggcgcccccgcttcttcagcgggattgaagaagctaagctctgatgttttgacgatggaggagatgggctcttacagtgtgctggtggaggagacgggctcttacgtggcaacagtggtgttggcatccttcggggggagacaacaagcccttctgagctagacccaccatcgcttggctcatcatcgctgtctcctgaagggaagacaatgaaacgcttgcgccacaggataatgttgtggatggcttttccaagagtgttcaccccctcgtctggagcaaaatcaagttggattgccctgtatctactcgacacatactccacttcgacccttgagtagccacatggtatcggattaccgtgtatcctttcaccctccattacgggatgtgccataccatgtgccacctctacagtgatgttctgaagtggcaaatgcagcctgcatgcagtacgtacatggatgtcatctacggggtaacgagccatgcctagttcttgagtaacctcaattgaagcggaattgcttttcctcccacctggactgattacacggccaacatcgcctacatcctgcctttcgagcctcgccattatcaggtccattcgttccttcagttgccttatctcttctgattggtctccagaatttgtattactccgagaccggtacctacgtttgtcttcaggaaaaccttccctccatggaactaggcctactcctcttgtgcgtcccggatgctcagagttctgcaatgcaagtgtgagctcatctttctccctgttcggaacaaaagaaccctctaaagacttttgatgggcatcatggagcctttgggacacttcttgcgatcgtggacccttgtgtaccaactcgccagtatccgagagtgttgcccctcgggcgtattgataattctttcctcgttgggaccaatccttcgtctctatctcgattcccttttgtaatagctcatcttccctctcttgccatttgcctacgttcttagcatatccgctagggccgagacggtgagggtacaaatttttggccgcattggcctggttcctttcgctaatctcctttgcctcatctgatgttcttcgataattgggatcttcaaaatttggtgtcaaccccttcttgacaaacttcttggtaaggtccatcttaaacttcttgaagctgagggacatcctctgaagggccttgtgctttgcaagttcttctgaaccctcggggaactggaatgtccgcttcaacctttcccaagcaagttccttgtctctgtctggtaccatccactccaattcatctggatctctggtcttccagtgtcggtacttgatggggatgtcatccttcacgatgacacctatagcattggaatatggggtgagtgctgattctggagctgtagggttcccatctgcatctaacgctgtgatagtgtaaaggccaatgggcatcttggttggacctctaccccttcttatcgatgaggtggcagtatccccagagtgcgttgtggccgaaggattaacgtcctccatgttatcggggttatcacttgggctaacattaccaccatcgctttctccagaatttgcaggccaattgttatcttgttcccgtgacattttcctttgtagacctacagctacaggaatgatctcctctctgtacgccat

SEQ ID NO: 97275 - DNA, 219 bp, Oryza sativa
  Clone ID: PAT_MRT4530_95295C.1
atgcggcggcggtgggggaggagctgcgggcggggagccgcacctagtgaagctgcagccgtcgacgaggagttccttgccgtcgcggtggagcgccgacgccgggcagcgtcctgggtgggcgtcgggctcgccaccgaccagtgctgccttctccctttacaacctcaagccggcacccaccagtgctgcctccccgctggccgtcgtgctcgttga

SEQ ID NO: 97276 - DNA, 719 bp, Oryza sativa
  Clone ID: PAT_MRT4530_95296C.1
cacccttcctctcctcctcctcctcctcctcctcccatggcgccgcccagggcgcagcggacgatgctggtggtggcgggggacgcgccgcccaccgccggcggcggcgcaaggttcgcggcgccgccgccggagcgagaccacacgcaggacctgcccgacgagatcctctccctcgtgttcgcgtgggtcaccccgaccgaccgcaacgcgtgctcgctcacctgcgcgcggtggaaggaggtggacgcctccacgcgccaccgcccctcgctcgacgcccgcgccgcgctcgggtacgccgcgcaggggatcttcgcgcggttcacggcggtgagcaagctcgcgctccgctgcgcccggggctccgggacggacagcctctccgacgacggggcgcgccaggtggccgccgcgctgccgtccgcgcggctcgccaggctcaagctccgcggcctccggcagctctccgacgacgggctcgcgtcgctcgctggcgccacgccggtgatccgcaagctctccgtcgcgtccgccggcgccaccaccgccatcaccgaggagatcctcttcccgcccgcctcgtcgctgcggtcagtctgcctgaaagacctgtacagcgccctctgcttcgtgccgttggttgcctcgtcgccgaacctccggtcgctcaagatcttgaggtgctctggctcctgggccctcccattggaggtcat

SEQ ID NO: 97277 - DNA, 576 bp, Oryza sativa
  Clone ID: PAT_MRT4530_95297C.1
atgcatggtgagggaacctttgaactaaagccatatctgcacatgtggcaaattttggaagagttttgttttgaacaaaaggtggagataaaggttccaatggttgatgaaaagaagaagtccaaagttatgcaaataatatctaaacaatgtggaatcttgtccatcacggctgatatggagaaaggtaaggttacagtggtgggtaatgatagaatggatgtcacggatctgaccacagtgcttaggaagaagatgccgcatacctatatcattatcgacacggtcactcaggttgatgagaagaaggagaaggaggagaaggataggaagaagatggaagaagagtgcaaaaatctttggcccaatattatttatccgccatatcaatatcctccatacatggtcgaatcatcaggggctgcccacatctcaacccggattcaaaaatgcctgccgaggttcttcactgagtcactgattgtgattacaaaggaaatagcaaaactcaatgataccgacaagaccgtagtcgagtttgttcgactagatcacccggcgacttggctcctgtag

SEQ ID NO: 97278 - DNA, 270 bp, Oryza sativa
  Clone ID: PAT_MRT4530_95298C.1
atggcggtggttgggttcacggtggggagagcgcacgcggccacgtcggatggggaggcagaggaggccgggcaggctgatccgacggctcacgagacgagcggccgacggctcgggagcgagctctccggcctcgggccgaggaaggggaggaaggagggtgcccggagtcccgcgtcacgcgtcctcgcacgcaccggtctcccggtgctcggcggcggacggcgacggcgagagcagaggaagggcgacaatggcgcggtggagtag

SEQ ID NO: 97279 - DNA, 1860 bp, Oryza sativa
  Clone ID: PAT_MRT4530_95299C.1
atggccagcccctccccacccatcgcggctccagggatagagttcacggcgccgccgccggggcgcgaccacacgcaggattgctcgctcacctacgcgcagtggaaggaggtggacgcctccacgcgccaccgcctctcgctcgacgcccgtgccgcgctcggctacaccgctcagaggcaatcttcgcgcggttcatcgccaggtcaccaagctcgcgctccgctgcgcccggggctccgggacggacagcctctccgacgacggggcgcgccaggtggccgccgcgctgccgtccgcgcggctcgccaggctcaagctccgcggcctccggcagctctccgacgacgggctcgcgtcgctcgctggcgccacgccggtgatccgcaagctctccgtcgcgtcctgcagttttgggcccaaggccttcgtcgccgtcctccggtcgtgccccctcctcgaggacctctccgtcaagcgccttcgcggcctccctgacaccgccggcgccaccaccgccatcaccgaggagatcctcttcccgcccgcctcgtcgctgcggtcagtctgcctgaaagacctgtacagcgccctctgcttcgtgccgttggttgcctcgtcgccgaacctccggtcgctcaagatcttgaggtgctctggctcctgggacctcccattggaggtcatcgccgcgcgtgtacctggccttgttgagctccaccttgagaagctgcaggtgggtgaccgcggcctctccgctgtatcggcatgtgcaaaccttgaagtcctgtttcttgtcaagaccccagagtgtactgatgcaggcataatcagcgttgccgagaaatgtcacaaactgcgcaagctacatattgatgggtggcgcacaaacaggattggggatcatggcctcatggctgttgcacgaggatgtccagacctgcaagagctcgtcttgattggggtcaaccctaccgtgcagagtctccgtatgcttggtgaacattgccgctcactggagcgtcttgccctttgtgggtgtgagaccgttggggatcctgagatcatttgcctggctgagcgctgcgctgcgctcaagaagctttgcatcaagggttgcccagtctcagaccgtgggatgtgggcactgaatgggggctgccccagcttggtcaaggtgaaattgaagagatgccggggcgtatcgtatgaatgtattgagaacctgaaggtggttaggggtggctcattctctatcagcttggatattgtattggagcgtgatgctggaggtgcaattgaaaatggcgggcaagaggctggacaggtgcaaattacagagcttactgatcagatggcagccatggatctcccgactaacgccagcaatgcacaatcatctgcccaggcaagtagtaggatgaggagcgtcatgtcagcactcaggaggaggtttggcaatcctccagctctgtgatgtgagataaaaaaaattgatgaacctatttgctactttatgcattctaatctcatattcatgttccttaggttattaattttactatctagttctcgcaaaatcatcatgatggataattctgtgttaccattgctatttcatcagcagttgttgccctttctctgattaaaaaaaagggtttggtttagctttttgttgatgattaggatgcatctatacaaatttatttctttggttgcttcgagttgtagaaatctggcctgcaagcttaactacctcagtactaaaaatagctgccatcgctgtcgagcacattggaataattagctgtatagggcagcctacaacatggtatatataattggttgctctttgcactg

SEQ ID NO: 97280 - DNA, 810 bp, Oryza sativa
  Clone ID: PAT_MRT4530_9529C.1
atggtgcttgtgatgccatccagcaaaaccactggttattttgctggaaatgctgttgatcaatttaattttgtattacgctactgctctaaaaatggtatggaagataattacaagagaaccttaaaaggtaggcaaattttgctacagacacttcgacttcgtggttttagctgcgggacaccgcccaaactcacttttgggggaaaagattctataaacgtgaggggcatggggtggtgtcggtcaccaaggctcgagttcgtcgcggcagaggagatggcgaggacggcgggagcagccaccgcggctctcgcgcggaggacggcgaggaggagagtcgcgttgtcgtcgccaattgcggccactcccacagtggaggacgacgaggacggtcggagcggctgctgcagcgctcacggcgggagcggcggacgacggcaaggccgtggcgatgcggcacggggcagcgccgggcggaaggaatgcgtaccagagccagtcagtgcgcgggacggagatgatgagtgcgccgacgaggcggagctcggcgggggtgcgctcctcgccgctgaagaatggctggatggcgatgaggccggcgaggcggaggttggcgaaggtagtggaggcgagggcgtagcgacgggcaacatggtgggcaatgttggcgcccgcgctgtccctgacgacgaaggagcatgtgacgtcgaagcaacaagtgagttcgggcgatgtcccatgacaaaccacgaagtcgaagtgtcccgtagcaaaatttgcctaaaagatttgaagtattcatggtaa

SEQ ID NO: 97281 - DNA, 1191 bp, Oryza sativa
  Clone ID: PAT_MRT4530_952C.1
atggcctccctccggccggatctgggaggggaggccggggagccgccgccgccgcaccgggagagggccgccgctggaggggagccgcccatgttgccgccgccgccgccgtcctcccccggccctccctccggccggatctgggaggggaggctggggaaccacgtcgccgccgccggaccacataaggtgacctgcgaaaataaatgttcgcaggcgccgcttaggtggtccgccgtgttccggtgcggggagctttgcaacggatcccgcaagagcacggcgggagcggcgacggcgggctcagctcggctcggctcgtttatgggctcgagcctcgagcctggcatcaagctgcaaaggctttatgcacatgaggagaccgcaaaggctatgcaatcacataaacagtccacatgtgctgaagctatatggaacacgtgctttgacatacccgacaagacaaaagacaatgtgaaggcaagacaagatttggttgatatttacaaccgcccctcattacacttggatttgaagggcaatggcaagtggcacaagccgagggcagcattttgcatagataagaatgacaagactattatactcaaatggtttcaagatctgaagttccctgatggaagaataaccacttatggatgctatgatgtgaatggatatagatttcgttcagagaagtatgagagtgcaaaatcaggattaagtactgtcaatactggtgtttgtgtgtcttgcgttgacgatgataacaatgttattgactactttggtgtcatcgaggacatcatcaaaattacttgggagggcagcacgaacctagagttggttttatttgattgccgctggtttgatccaacaaattctggtgttaggcgaactgaaaatttgggattggttgaagttaaccacacatctaggctttcaaactttgaaccatttgtgctggcaagtcaagttactcaagtttattacttgccttacccatgggatgacattgaaatagcaaccacttacatatctgatgagataactaatgagaaagatttggactatcttgccaaatgtaactctccaacacaaggagatgaagagctggatgatgaggaagatgatgaagaagatgaagaagaagctgaacctgaagccatcatttatgatcctgaagatttctga

SEQ ID NO: 97282 - DNA, 1838 bp, Oryza sativa
  Clone ID: PAT_MRT4530_95300C.1
atggcgccgcccagggcgcagcggacgatgctggtggtggcgggggacgcgccgcccaccgccggcggcggcacaaagttcccggcgccgccgccggagcgagaccacacgcaggacctgcccgacgagatcctctccctcgtgttcgcgtcgctcaccccgaccgaccgcaacgcgtgctcgctcacctgcgcgcggtggaaggaggtggacgcctccacgcgccaccggcctctcggctcgaccgcctcgccctcgccgctccgggtacaccagcgcaaggggatccttcggcgccggttcaacggcagggtggcccagccagcagcttgccagttccagcagcaggcatcagcaaaggcccccaaagcttccaccaggcggctcgccacgctcaagctccaaagcctccggcagctctccgacgacgggctcgcgtcgcccgccggcagcacccccgggaaccccaaacccccccgcccgtcctgcagttttgggcccaaggccttcgtcgccgtcctccggtcgtgccccctcctcgaggacctctccgtcaagcgccttcgcggcctccctgacaccgccggcgccaccaccgccatcaccgaggagatcctcttcccgcccgcctcgtcgctgcggtcagtctgcctgaaagacctgtacagcgccctctgcttcgtgccgttggttgcctcgtcgccgaacctccggtcgctcaagatcttgaggtgctctggctcctgggacctcccattggaggtcatcgccgcgcgtgtacctggccttgttgagctccaccttgagaagctgcaggtgggtgaccgcggcctctccgctgtatcggcatgtgcaaaccttgaagtcctgtttcttgtcaagaccccagagtgtactgatgcaggcataatcagcgttgccgagaaatgtcacaaactgcgcaagctacatattgatgggtggcgcacaaacaggattggggatcatggcctcatggctgttgcacgaggatgtccagacctgcaagagctcgtcttgattggggtcaaccctaccgtgcagagtctccgtatgcttggtgaacattgccgctcactggagcgtcttgccctttgtgggtgtgagaccgttggggatcctgagatcatttgcctggctgagcgctgcgctgcgctcaagaagctttgcatcaagggttgcccagtctcagaccgtgggatgtgggcactgaatgggggctgccccagcttggtcaaggtgaaattgaagagatgccggggcgtatcgtatgaatgtattgagaacctgaaggtggttaggggtggctcattctctatcagcttggatattgtattggagcgtgatgctggaggtgcaattgaaaatggcgggcaagaggctggacaggtgcaaattacagagcttactgatcagatggcagccatggatctcccgactaacgccagcaatgcacaatcatctgcccaggcaagtagtaggatgaggagcgtcatgtcagcactcaggaggaggtttggccatcctccagctctgtgaccacaggcgagcggtatgatacatggaacttgtcttggtgctccccgtgtagaccaggcggccacccgctcccgtggcgcaccaaacaccggttctcgcagatgcttcgccttggtttgttctgtgttacccttgctatttcgtcggcgggcccggccccccctcggccctttaggagcggtttggtttagctttttgttgatgattaactacaaaaaaaaaaaaaaaaaaaaaaaaaaaaaaaaaaaaactcgagactagttctctccctcgtgccgaag

SEQ ID NO: 97283 - DNA, 853 bp, Oryza sativa
  Clone ID: PAT_MRT4530_95301C.1
tcaatcctcttgacctctcctctcccccaaaagagcggcgacggcggcggcggcggcagcggccatgagcctgtgatatacgtcgacctgcgacacgattctttggtggctgggctgcggagttagagtctcggaggcagcgacggcctcgacctgtagactcgcgacttggggctgctgaggaagaagtttctttcgagttttgagttttgacgccatgccctccctcaggcacgacacgaaggagctcgatggtgatagcgacgggaagctccgtgtggcatcattcttcttcgcgttcagtcctttttggttgtcgccgccactcaaagctctgtgctggggaacaggggcaccgcgtagtagcctcatgggcctgacaaaggaggagaccctaggagggtgggtgactgactgatagggcccatgtgtcaggttcgatgttgatggctggtggctggcagttgcggcgacgattcctggccaagagcgcacaattcccagccagcgagggcattgcccatgtgtcgcactacgattccatgcagcatgcagcttttcgagagacggcgaagcattgcggcctacggcgagaaactgcgaagacgggatgggggtcaaccgtgaaattgggagcgtttgaatcaagtggcacacagtgttatggaagacgaaatacggatgtcggacggggagagtactgccaaacgattaatcggaatacggatgattagtcggaatatgacggaaatttaacgttttgcaaatataagtacatagttaataatagtttgtccttttagaggtaattaaatccatatgaacacattctagtttcctagtatatatattt

SEQ ID NO: 97284 - DNA, 558 bp, Oryza sativa
  Clone ID: PAT_MRT4530_95302C.1
atggccaccgacgcccagctcctctttgtcggctgccacagccagggccacctctcgcatttgatgcttccggtttttgtcgagcaagcgccgtcggtgcctgtgcaagtattggcgcgtcgagtgatcaagaaaggagccgaaatcgggaatgctagataccgtctccccaacgggatagcttctcctccacaacgtgatttctgctcactcgctgccgtcgccgtcccccgccgctgccgcgcccatcccctgtcgcctccgccgtcgccgtcgccgccgcgcccgtcccccactgccgccgtcgctgtcccccgccgccaccgcgcccgtccaccgccgccgccgcgcccgtcccccaccaccgccgtagctgtcccccgccgccaccgcgcccgtcccccatcgacaccgctgccaccaccgtgcccatcccccaccgccaccgttgctgtccctcgccgccgccgccgcgcccgttccccgttaccgccgccgtcgccgcgcccgtcccctgccgcggctgtcgccgtcctcgtctacaagggacggttgtag

SEQ ID NO: 97285 - DNA, 426 bp, Oryza sativa
  Clone ID: PAT_MRT4530_95303C.1
atgaagtgcagcgccattttcatgctcttcctcgccctcggaagccttgccatcgtggtacatggtggccgcacacacgccgtcgtcgtcgtcgagccggcgaagaaatcagctgctggtggcggcgtcgtgcagccggagatggacccgatcaccatctgcagcccgtccaacttctgcatcccggaggcgtggagctcctgctacaggtgcatcgtgaagcccgacgacaactcgcccttccgaaccatcgacgagtgtaatagcaactgcccggagcacatgtacccgcacctggtgccggttgggcgtggcggcatgtttcttctgcaccacgtgccttctggcgccacgacagtgaggaagcagcggcaagggagcgtgtttctggtgccagagaatgagcttctggttaaggagaagtga

SEQ ID NO: 97286 - DNA, 236 bp, Oryza sativa
  Clone ID: PAT_MRT4530_95304C.1
ggtgagaagggtttaaaaaaaattaacactgcattttattcatcattaccataaacacaacatccacctgaccacacttaccatgcacccctcattcactaacacctcttacataatctaatggacatattacataattatttactacgcgagggggtttaattaaacattttctcatgtttttttaaaactcaacatataaatggagtagccaacgtcagcatagccacagctaa

SEQ ID NO: 97287 - DNA, 208 bp, Oryza sativa
  Clone ID: PAT_MRT4530_95305C.1
aagctttttttttttgggaacttattgttggttacttaatggaaattgtgatggtgaactgtgttttacccaaatacttattagaagtagtgagtgaagctttgttatgtgaattttgctgatacatctagaaaatgatattgtgcccaagttcttatacatcattttcacccttaacttgtgattccataggtgcgttgagaagctt

SEQ ID NO: 97288 - DNA, 193 bp, Oryza sativa
  Clone ID: PAT_MRT4530_95306C.1
atggcggcgtcggcggcagccacgggcagatccctccgccccctctcgcctccctcccgcatcggatccgatggcggtagcggcaacccgtggcgggtggctgctgcttccctccccggtgtgttggcagcagctgcccccctccccagctgcccctcacctccccgacatggagccaacggtggttctctcg

SEQ ID NO: 97289 - DNA, 1797 bp, Oryza sativa
  Clone ID: PAT_MRT4530_95307C.1
atgtcgacttccgccaatccatccgccgcgccattgtccgaatacgcagagaaaactgcccctgaaaaaagttggaccacgtggtacaagcgtgtatcgactagcaaggcagttcactgggatgagatcgggattagccaagcgcttgcccttaccatagccaattctgctaaggacgaacccctgatgtctgcagccacctatttctggtccaacaccatcaacgccttcctattcaaccaagggccgatgaccccgactttgatcgacatcaccatgatcaccggattggatgtaacttcatcggccaatcccatgagcttgaacaccaagaaccaatttgatttcaagaccaaaagcatagatggttggtctgggtacgtagcagcatacatgggtaaagggtctgtcactcataaagagcatgtagcatttctgctgatgtggctggagaaattccttttctgtggatcaagctgtggccctacaaccaattggcaatttgtagccgaagccctagaatcaaagaaacaatttcccttgggcaaaatcctcctcggctatctataccaaatgttgaataacgcatcggccaagatagccgtcagctcagtagttggggcaggtggaccatggtggttgctgcaaacttggctaaacttggtagttatgaaagtcgtcaattggccatctgtgacagaagctgaatttccaaggttggagccgattgtggaagatgatggagaagaacgcaatcatcgtagatgcatatcatatggagaatatgcttctacaccaactgatgctggagctaagctgtcggctgagttgcttaaggattggttctgcagcttttatgaaggctttcagaaagatgcccgggtttggtttccttatgaggactcagcagatcttgaacttccatcagacttcagattcgaagatatcaatcatgaaaaataccagaaatccagagaagttcttgcagctgcaatcaacccatgcatccttcctgttggcattcatcagggcagaaacatccaaacaacagaatcctctcctcctcgccagagcaacaatggtaaggatattgaatatgctccaggcctaatcagggaaccagccgatgcaggcaagaaaagaaaaaccagatcatcggctgtggacacatcagctccggctcccaagaagaaaatcaaatcaaagaaaaccaagccaactgatgacctgcctgtcttggatccatccatcgaacaagctctggatgaagaagccattgaagatgacattgatcaggctgcagccgaagtgagcaatacagagagaacaccatcggcttcgcctaagcaaactcctccaacttcttctgctccggctcatttttcaagattgcagaagaagaaaactgctgtgaagaagaaatcggtagtgccaactctcaaaccggctccaccacctcctcttcctccttcacctgctgtgcagctagaatcaggcaaccgtactccatcggctgcagatagtcataatgtcgaggaggaagaacaaccagctgctcctactatcccagattatctcgatgaaacagaggaggacaccactagtaaagccatagcccctctgtctgatgatgtgaagaaaacgcttgaggatatctctcatcggctagaagcatccctagacaatttggtgaccaactgtggctcaatccgggcaaggttcacagatatccaagctctactcccggatgaactagccgatgccctaactccggccgtgtcacgcccagaaatttag

SEQ ID NO: 97290 - DNA, 2391 bp, Oryza sativa
  Clone ID: PAT_MRT4530_95308C.1
atgtcgacttccgccgatccatccaccgcgccatcggccgagtacgtagagcatatgtccaatctggttgcgattccgagtctgtcgcacgagaaccactactttcttggtccaatcggcaaccttgaccctactgatttcatcactggtgaaaccaacagaatcccctttagattagccaaccttaatctgggtcactggaagaataccttcaaatcttggccatctcttgagaaaactacccctgagaagagttggaccacatggtacaagcgtgtatcggctagtaaggcagttcactgggatgagatcgggatcaaccaatcactttccctcaccatagccaattccgctaaggacgaatccctgatggctgccgccacctatttctggtggaacaccatcaacgccttcctattcaaccaagggccgatgaccccaactttgattgacatcactatgatcaccggattagatgtaacttcatcggccaatcctatgagcttgaacactaagaaccaatttgatttcaggaccaaaagcataggtgttatgaaagttgtcaatcaaccatctgtgacagaagctgaattcccaaggttggagccgattgtggaagatgatggagaagaacgcactcatcgtagatgcatgtcatatggagaatatgcatatacgccaactgatgctggagcaaagttgtcggctgagctgcttaaggattggttctgcagcttttatgaaggctttcagaaagatgcccggggcagaaacatccaagtttcttatgaattttaccacccaatgagctcagctagacaacttggattgggacaactcccaatcggcttattctttgctgacaaaatccagtgccgaggagaaatttcatcaactctgatgatggatcggctactcaacatcccaggaccccccttgggcagtattgagaacatagagctggcaaggctcaggagctggaactttgacagatggtggggtgaatggaaacaacatatcttccatcaaccagcttccatgaacataatagatctgttccctgatgttatccctcaggtaaatctttactttatcaatcttgctcgaacaactgaatcctctcctcctcaccaaatcaacagtagcaaggatattgaatatgctccaggtctaattccaaatggaggtggaccatctccccctgtcatcggctatcacgcccccattacttcaaccctcctccaaggcctaatcagggaaccagccgatgcaggtaaggaaagaaaaaacaggtcatcggctgtggacacatcagctccggctcccaagatgaaaaccacatcaaagaaaaccaagccagctgatgacctgcctgccttggatccacccatcgaacaagctctggatgaagaagacattgaagatgatattgatcaggctgcaactgaagtgagcgatacagagagaacaccattggcttcgcccaagcaaactcctccaactccttctgctccgactcatttttcaaggttacagaagaagaaaactgctatgaagaagaaatcggtagcaccaactctcaaaccggctccaccacctcctcgtcctccttcacctcctgtgcagctagaatcaggcaaccgtactccatcggctgcagacagccacaacgtcgaagaggaagaacaaccagctgcccctgctattccagtcttagccgatctgttctcatttgatatcaagaattatctcgatgaaacagaggaagacaccaccagtaaagctatagctcctctgtctgatgatgtaaagagaacgcttgaggatatctctcatcggctagaagcatcactagacaatttggtgaccaactgtggctcgatccgggcaaggttcacagatatccaagctctactcccggatgaactagccgatgcccttactctagccatctaccttgagcaacaccaattcaagctggaaaaggccagacagagattagccgatcgccgggagtgcaaggatattgaagctacaatccagcacaatcgacagcttgtgcatgtagagaaatccaagcttgatcagctgtctaagggcccgatcaagtcaaatatcgattggcttgaagctcgtaagattgacctcatggcacaacttcaagaatgcaacgccgagctggatatggagcacaaaaagttagccgatctcccgaagtctatcgaagatcaaaaagccagactcaaatcggctatcaagaatgttgcagatttgaccaagtctctgaaagtcatctctggaaccgatgctcaagatgcccaagctattgaggaagtagagcaaattaggcaaagggctatttcggctatccagcgatacttgtctcaatga

SEQ ID NO: 97291 - DNA, 249 bp, Oryza sativa
  unsure (1)..(249): unsure at all n locations
  Clone ID: PAT_MRT4530_95309C.1
cctttcccnacncantcnttcttngaaaaaaaaattgtnangggngtncctggncactagcnaantgtgctgacaattacattctaccttgtgcttatgttatgttacataataatccnttnantatanggtnnctgtntatnaacctaacnagttagttanaattggtancctcctgctcctgttaattggttaccaaaaaaaccgttgccgttttttgggccnttaaaaaggttttaccaacttccc

SEQ ID NO: 97292 - DNA, 753 bp, Oryza sativa
  Clone ID: PAT_MRT4530_9530C.1
atggggccgaccgtcacgcgggggcctccgagctccgtcgtggaggaggtgaggacggcaggagcagccgcccgtgcgctttgcggcgggacgggccggaggacggcgaggagggccgcgtcgtcgcgccaactgcggccactcccgcggcggaggatggcaaggacagccgggacggcccgccgcggcgggagcaacggaggatggcgaggccgtggcgaaaccggcacgggggcgggcacgatccgcgccgcatcccctcaaggagggggccgaccttgttgcttcgacgtcacatgctccttcgtcgtcagggacagcgcgggcgccaacattgcccaccatgttgcccgtcgctacgccctcgcctccactaccttcgccaacctccgcctcgccggcctcatcgccatccagccattcttcagcggcgaggagcgcacccccgccgagctccgcctcgtcggcgcactcatcatctccgtcccgcgcactgactggctctggtacgcattccttccgcccggcgctgccccgtgccgcatcgccacggccttgccgtcgtccgccgctcccgccgtgagcgctgcagcagccgctccgaccgtcctcgtcgtcctccactgtgggagtggccgcaattggcgacgacaacgcgactctcctcctcgccgtcctccgcgcgagagccgcggtggctgctcccgccgtcctcgccatctcctctgccgcgacgaactcgagccttggtga

SEQ ID NO: 97293 - DNA, 1653 bp, Oryza sativa
  Clone ID: PAT_MRT4530_95310C.1
atggactttaatttgagggatcttttccccaatccggaaaacttggattgtttggtggatcagttctacactcaggagaaggacaatcttattaaggacttctacagccgattctcgctctgtttccgcaacgttcttcgtcttcgattccacttcgatctaatcttcttttccgatgctgatattaccaaatctgcgatcccctcggtgcaccagcgatttcaaggcgattccgtccccgttcactgggatgagatcgggatcaaccaatcactttccctcaccatagccaattccgctaaggacgaatccctgatggctgccgccacctatttctggtggaacaccatcaacgccttcctattcaaccaagggccgatgaccccaactttgattgacatcactatgatcaccggattagatgtaacttcatcggccaatcctatgagcttgaacactaagaaccaatttgatttcaggaccaaaagcataggtggtctaattccaaatggaggtggaccatctccccctgtcatcggctatcacgcccccattacttcaaccctcctccaaggcctaatcagggaaccagccgatgcaggtaaggaaagaaaaaacaggtcatcggctgtggacacatcagctccggctcccaagatgaaaaccacatcaaagaaaaccaagccagctgatgacctgcctgccttggatccacccatcgaacaagctctggatgaagaagacattgaagatgatattgatcaggctgcaactgaagtgagcgatacagagagaacaccattggcttcgcccaagcaaactcctccaactccttctgctccgactcatttttcaaggcctcctcgtcctccttcacctcctgtgcagctagaatcaggcaaccgtactccatcggctgcagacagccacaacgtcgaagaggaagaacaaccagctgcccctgctattccagtcttagccgatctgttctcatttgatatcaagaattatctcgatgaaacagaggaagacaccaccagtaaagctatagctcctctgtctgatgatgtaaagagaacgcttgaggatatctctcatcggctagaagcatcactagacaatttggtgaccaactgtggctcgatccgggcaaggttcacagatatccaagctctactcccggatgaactagccgatgcccttactctagccatctaccttgagcaacaccaattcaagctggaaaaggccagacagagattagccgatcgccgggagtgcaaggatattgaagctacaatccagcacaatcgacagcttgtgcatgtagagaaatccaagcttgatcagctgtctaagggcccgatcaagtcaaatatcgattggcttgaagctcgtaagattgacctcatggcacaacttcaagaatgcaacgccgagctggatatggagcacaaaaagttagccgatctcccgaagtctatcgaagatcaaaaagccagactcaaatcggctatcaagaatgttgcagatttgaccaagtctctgaaagtcatctctggaaccgatgctcaagatgcccaagctattgaggaagtagagcaaattaggcaaagggctatttcggctatccagcgatacttgtctcaatga

SEQ ID NO: 97294 - DNA, 282 bp, Oryza sativa
  Clone ID: PAT_MRT4530_95311C.1
tcaaagttttctatgaaaatattccagggctcgattctatctggcgcccttacggaccttcaagaacgaggggtggccctgactggaggtcctaacatcaagtcccacataattatacgaggcgccaaaatttactcgcctacgggtgcccagaaggcgtaccccaataacatcaaatgcctgtcgtatcacttactcggtgacactgattttttgaaaaccctttgcgaaaagcttatagaattatatgtggatccatgtattttacgtcatccaaatgaa

SEQ ID NO: 97295 - DNA, 278 bp, Oryza sativa
  Clone ID: PAT_MRT4530_95312C.1
aaaaaaaatatttccattgctcatattataatcccatcagatggtgatggcaataataatacatgtcggcgatctctccatatatatatatcattttctctctggttaaccgccgcaagaaaagaagtagtccccccttaataataattaatttaaagccgtgcttgcttgccgatgccgatttttcaaaaccaaataaaacggttaattaataataacccatcatctcagctcctagctcatttgaatctccatatgatagggagatctcccggccc

SEQ ID NO: 97296 - DNA, 277 bp, Oryza sativa
  Clone ID: PAT_MRT4530_95313C.1
cggaaatcccgggtcgaccccgcgtccgctacatactttaaccttgcaccaggacagacatgtggcagttactcggcaatttgcacggccactcagaagctagaaacaaactgccaaaactataaaactctctgtatggccagaatattggtggcttgacgcttgagatatactagagccctactttgtggaaattagcggtggctataaggggaggaaaggaaaataccctccccaatgaacgcacaaactgacacgagacaagtccgcactctat

SEQ ID NO: 97297 - DNA, 292 bp, Oryza sativa
  unsure (1)..(292): unsure at all n locations
  Clone ID: PAT_MRT4530_95314C.1
aagcttgcaaggccccgtagccnggnggccgagtaggctgttttntcngtataatgttttggtctggtttgattgtnggaaantntcgcncctccaagtattcncctttnaatcgntgtggtactgtgaaagataactnttntgtcancctttttgctnccagcngctactctaatgtggccaaattactntcgcatnattngcctaaaaaaaaaaaaaaaaaaaaaaaaaaaaaaaaaaaaaaaaaaaaaaaaaaaaaaaaaaaaaaaaaaaaaaaacaaaaaaaaaaaaa

SEQ ID NO: 97298 - DNA, 1509 bp, Oryza sativa
  Clone ID: PAT_MRT4530_95315C.1
atggacgacatcatgcgggccatcttcgcctgcatccccggcatgcggtcacccgcgtcgcccggcggctgcctctccgctgcctttggcggcggggacgacgacggcgaggagggggagggggagggggaggaccgcatcagccgcctcccggacgcggtgctatcgagcatcgtctctcgcctccccgtcaaggacggcgcccgcaccgccgtgctgtccccgcgctggcgccgcgtctgggcctccacgccgctcgtcctcgacgacgccgacctcctccccgacgacgacggcccccaaatcttctggcgcgacgtcgcggacgccgtctcccgcgtcctcgccgcgcacccgggcccgttccggtgcgtccgcctcacgaacgcctgcagctacgcgggctcccgcggcgccgccgcgctctcgcgctggctcggcgtcctcgccgccaagggcgtccaggagctcgtcctcgtcttcctccatgcctggccggtacgggtcgagccccccgccgatgtcctccgcgtctcctccctccgccgcctctaccttggcctctggaggtcgttccccgacaccgagcacctccgccccggcgccgacgtcttccccaacctcgtcgagctcggcatctgccgcaccgacatcaaggccaaggacctcgaccgcctgctccagtgcagccccgcgctggagacgctcgcgttcgtcgtcagctacaacacgcagcccaacgtccgcgtccgcagccgcagcctccgctgcgtgctcttctggatgtccatcgcggaggagctcgccgtggtcgtcgccccgcggctcgagcggctcatcctgtggaacgggtgcccctgcacccgccgtgtccgccgtgatttccgcaccagggtcaagatcggctacaccccagagctcaaggtgctcggctacttggagccaagaatccacgtgctcgagatcgccaacaccgtcatcgaggctgggacaaagccgagccctggcaccatggttccaactgtcaaggtcctggctatgaaggttcgatttggagttcgacaggaggccaagatgctgctctccttcctgagatgctttcccaatgtcgagacgttgcatatcatgtctgctgaagctgatgaacccactggcaagctcaacttcaagttgaagttctggcaggatgttgcccctgttgaatgcctcaaggcacacatcaagaaggtggtgttcaagaacttccgcggagagcgaagcgagcttgcgttcctccggtttgtcttggagagagcccagatccttcagacattggtggtcgtgttgactgatggagatggagatcacgcttcgcaggaggagctgggtaacaggctgaaacctctgatttacagcacacatcgtgccagtaaatgcgcagagtttttcatctttgtgcgctgtggaggcacctcctggagcttccgaacagcgtctgatctctccaggagtgacccttttgactgctga

SEQ ID NO: 97299 - DNA, 522 bp, Oryza sativa
  Clone ID: PAT_MRT4530_95316C.1
atggcagcccagccaagtaaggaaaacaccctaaactacaaccgggggttagcccctgaactcaaaggcacaaaagacagtccaagaataggcagagcacaccacgtggcgcagctgccccctgagcagggtaggtccaatggttgccaaacggaggcagctagaggtcttgtcgatcgaggatgccagagtggctggggagacacctgtcatcacggggaggacagtagcattatgccttttagcacagggaggctagggaattatttgtcgttgtggaccacagcggaggagtcggactggacctcgcaaaggcaaagcgccttgactggtggtggaggcgtaggagtggcaatttccaccagagtcgaggacgggaaatttggtcccatgggtggattgggacagggccccgaggtaatatggggtggggatggcgacatgatttggaatcataccatgcacctatgttggcccgatagccctattagaggagttcacatacatttggagaaactctaa

SEQ ID NO: 97300 - DNA, 294 bp, Oryza sativa
  Clone ID: PAT_MRT4530_95317C.1
tccttctttctttgctggaaaggaatcagttgcaataaatttatcttgtaatgtcagatgtctagtgtagagtactagagttctgccagaactcagcagccgaaggcattgtatgtgcaccaaaaaaaaaatgaaagatggtgtttacaaaaaaaaaaaaaaaaaaaaaaaacaaaaaaaaaaaaaaaaaaaaaaaaaaaaaaaaaaattacatataaagagatccattcttagtgccccacgcatggaaggccaaaaagtttgcttcggggctttgaagggaaatcccttggc

SEQ ID NO: 97301 - DNA, 184 bp, Oryza sativa
  Clone ID: PAT_MRT4530_95318C.1
aaaagtaacatgcattaaggacatcaggtattctcattcagcttttacagcgtcatggaggaaagccgatgcaagcaagcaagcagcccttcttaccatatgagacgcgagttctcacagacacaaccgcccactggctaaaactcggcaataagttccaagctaaatgggagatacctaccat

SEQ ID NO: 97302 - DNA, 393 bp, Oryza sativa
  Clone ID: PAT_MRT4530_95319C.1
atcaaaaattcaaatgattttttaaatttatttgaatttaaggaggttaccgcggtatttatattaccgtacctcgcggtaagcccggtaaccgctcggtaaggtaaaccctggtaccagcacaatccgcaagcaaaaaaagaaaaaaaaaggggtcttagtccacggttcttcaacaatccaaccttagcttgtcttctgctccaatgccttcaaatgcagcatcgatggatatatttttcatcgaattctggactccttgtgggatcatgtccatgggcaccagcactgtctggaagcaatgataacaataacaaaaatcttctgccacgggtctttaacaatccaatccagcttgagtgctcagtgctcactctgttgcttccaatgact

SEQ ID NO: 97303 - DNA, 459 bp, Oryza sativa
  Clone ID: PAT_MRT4530_9531C.1
atggaggaggagaagcgcccagggagaggggggtggatgagagcggcgcggggatgcgaggagaagcgagagcggccggcggcgggcccgcgcttggcgctcccgattggggaggaaccgtgcgcggtcgcgtggggagagcgaccggcggcgggcccgcgcctggcgtgcgcgggggctggtggggaggagagaagtcgcgcgcgcaatgtgggagaggaccgcgcccggtggtggcggcggaagatttggtggctcggtggagggaggcaaaagagctgtgggatagaacacatcgaacccgattatgtcaagctattcggggtgaaaatgatacgaaaatttgcaaaccgggatggtggtggtgactcgagaggaaaaaatggcatggctgcatggcgaggcgaggggttgacaacagtggctgagagggagaggcgagtgattctgggccactaa

SEQ ID NO: 97304 - DNA, 1578 bp, Oryza sativa
  Clone ID: PAT_MRT4530_95320C.1
atggagtccggctacagcgacgtcgacgacgactacttcggcgactccgacgaggattatggcgacgacggcgattacatggatgacgatggcgacgactatggtgggcaggtggtcgaggaaacggaggcgccggcgatggagaagacgtacgttgttctaaccgaggacgacgtacgcgcgcggcaggaggaggacattgccaaggtgtgcgaggtgctctcgctctcgccgggcgccgccgccgtcctcctccggctgtacaggtggagggccgtcctgctccaggaggagtggttcctggacgagcgccgcatacgcgacgccgccggcctcctgccggcggacggcggcggcggcgaggtgcccgcgcgggtcaaccggcggcggctcacctgcgccatctgcttcgacgtgttcgacaccggcgggatgaggtcggcggggtgctcccacttctactgcgtctcctgctggcgcgggtacgtccgcgcggcggtgggcgacggcgcgcggtgcctgtcgctccggtgcccggatccgtcgtgcccggcggccgtcgtgcgcgagctggtcgacgcggtggccgacggcgaggacagggagcggttcggctggttcgcgctccggtcgtacgtggaggagagcgccgggatgaggtggtgcccggggcccgggtgcagccgcgccgtggagttcgtgggcggcggcgacggcgaggagagcagcgaggtgttctgctcgtgcgggcacgggctgtgctggcggtgcggcgaggaggcgcaccggccggtgtcgtgcaagacggtggcgaagtgggtggagaagaacagctcggagtcggagacggcgacgtggctgctcgcccacacaaagcactgccccaagtgccggctgccgatcgagaagaacctcgggtgcatgcacatgacatgccggccgccgtgcctccacgagttctgctggatctgcctcaagccatggcacggccacgcggcgtgctcccggtaccagcccaacggcacggtggtggcgctggccggcgccaacgccgacgacgagcggcggcggcaggccaaggcgtccctggacaggtacctctaccactacgagcggtgggacgccaacctcaagtcgctgcgcgtggcgctccgcgacatggagagcctggagcggtcggagctggaggcgatggcctcggcggcgggcgtgccggcgacggagatgggcttcgtgacggaggcgtacgagcaggtcggcgaggggcggcgggtgctcggctgggcgcacgcctacggctactacctcgacccggaccgcgacttcaccaagcggcagctgttcgagtacctgcaggaggacgccaacgcgtcgctggagcggctgcacggctgcgccgagagggagaggagggagctcttcgccgccggcgccgacgacaaggccgccgtcgacttcgacaagtacagggcgtacagggagaagctcgccgggctcaccagggtgacgcggcaatactttgggaacctcgtcaaagcgttcgagaccgacctggccgaggtctcctcctctagttaa

SEQ ID NO: 97305 - DNA, 1003 bp, Oryza sativa
  Clone ID: PAT_MRT4530_95321C.1
tgctcctccaactccaatccaatcgagaggtcgatctctgaatctgatctgatcaccatggtggtggcactgggtcccggccggttctacggcagcagcctcccacggccgcgcttcttctccggcggcgaccgcgtcgagccgccggtggccgtcaccgacccgctcatggcgtgggcgcacgaggcgcactggtccatgggcggcctcagctccaagcgcctccgcctgcagggccgcatcgagggctccatcgacaagctccgccgccgcgcccgccgcgacgccaggaaggcggccaaggcccgcgccgccggcatcaagccccgctcgctcgccgccctcggctccgacgacgacgactcctcctccgacgaggaagaggaggtcgaggcccagaagcagcagatcgtcgacgagccgtcggagtcggaggaggagcaggaggaggagaacgaggaagaggaagaggaggaagccctcgccaccctcgccgccgcggccaagaggaagcgggcgaggaagctcagcgacgagttcgaccgcgtcgcgaccatgcaggagggggaggccaagaagcagaagcccgcagcaacctctacaccggcgaggacttcaccgaggaggaaggccgccgaggtggctctcaccccggcgccggcgagggcgtcaccgagggggaaggctgctgccgagggggctactgctgcaccggcgagggcgtcgccgaggaggaaggccgcggcaaggaggacatcgccgaggatgaagcactgagagaggtggcctgcttaatgtgaaatcctagttcttgctctgttacattggtcgctctagagaatcgagatgtgattgatggatatgtaatgtgttatgtgtgtgtgctaagtatttagtgatgaaaccattgaaatgtgatgctaatctctgaattagtcatgaattcctgaatcaacacatttccagatctgaattctgaacaaaaaaaaaaaaaaaaaaaaaa

SEQ ID NO: 97306 - DNA, 336 bp, Oryza sativa
  Clone ID: PAT_MRT4530_95322C.1
atgggtggcgatgtcgaggaagcaggcggctgcagtaacttcaggatgaggccaccagaactcaactgcctccgcgtcctcgagcctcccctgccagtggatccgtcgcccgctagcctcgccactgccctcgagcctccactaacaccagatccaccgcccgcgcgtctcggccatcgtagctaccggtgccccgctgccggcagaggcgacttagagctggtggtcgatttggtcggtgacaacttgggtggaggagggagacagacgaagaaagactggatcatcgccgtccactctcttgcgtcgccggagattggatcggggagagagtag

SEQ ID NO: 97307 - DNA, 396 bp, Oryza sativa
  Clone ID: PAT_MRT4530_95323C.1
atggggtcccccgagatctacgacggatggccacctcgacgcgtgccctcaccgtcgcagccaccgcgttgcttgccgcgccagcgctacatggtcatagaagccaagcaccatgtttatgaggccattgcagagcgacaacggcagcctctagatccaccgcgtcttcactgctgcctgtcgttgggaggaccaccgaccagatttggtggttgtcgtcgccgctacagcccgtcgacggggttcgggactccgacccgaagggcgaagccatttgaggacaggagagggcggtatgagccggctgctagctcatacgcgctcggcatagtgccggccattgcctgggcgagcgtgcctgtgagagggcaccgcctcggtgagcgtgcgagctaa

SEQ ID NO: 97308 - DNA, 441 bp, Oryza sativa
  Clone ID: PAT_MRT4530_95324C.1
cttttctttttttttttctactgctctacctctcgtttcttggctgtgatggagatggagagagccacagaagtgggggccaagagcggcgcccatttttagtcagccacagctgagggaagaggagtctatcttgggcaaaccaccctctacaagaatgctcagctgatctctctgcgtgatgcgctcaattcaatttcttgctgggtctattttgatttcttggtatgcagtgggctgcacttatctcgccggctgcaccggtggtgtcggtagttgtgtggatggggcagagggcaagactccttaggttgccgtctccagtgcctatccgggtggtagctggccgccgcggattcttcctcgtctacaccgccggatgctaactctagcttgaactctaactatccggagagtgctggctgcggacaggaggtggat

SEQ ID NO: 97309 - DNA, 232 bp, Oryza sativa
  Clone ID: PAT_MRT4530_95325C.1
ttttagatcgcgagcgggcggccttttttttggggggtttttatagatggtggctgggtatagaaagaaacagtattactacatgcggatacacaacaacctgagaaaagacaagtacaagcataagtcgttgacgaaactggagagctttctagaatatcaggtggctctgaaaaatgaaaaaaggataaaacggcctatatatctgaatactaaaactgtggctgtttca

SEQ ID NO: 97310 - DNA, 1563 bp, Oryza sativa
  Clone ID: PAT_MRT4530_95326C.1
ctcgctcgcggtctcgtcccctatatatacctcgccgccggatccgcctcgcctcgtcccgcgctctctcctcccctcctcgacgaacagcaagcgcgcgcgctctcatctcgagatcgtagctgaagattacacattgggaaactggtgtactgcctgcctctgcgatcgatcgatcgatcgatcgccatggctgacgcgaagggcgacgaggtgttggcggagggacagatgcctctgggacggtggccgatcctgtcctacggtgtcggccacatgctgaatgacatcacgtctgcctgctggttcacttacctgctcctcttcttgcaagaaatcgggcttgctccaagggatgcagctattgtgatgctttctggccaggttgcagatggcctaatgacgattcttgcaggcgagatgatcgaccgatttgggcacttcaagctgtggcacatcggaggatcaatcctagtcggcatctccttctcctctgtcttcggtggatgtcttctctgcaccgtcctggggaccgattcctaccttgtgagaaccattggttacagcttcttcgctgccgtcttcaacatcggctgggcggccacacaagtttcacacatgtcaatggtgaactgcatgacactgaattccacaagccgggtagccttagcaagctgcagaaatgcgttcactatggtggcaaatcttggtttatatgcgatagctttggttgtatttgctttagtgagcgcgaaggcatgctcagacattgttcttcagtaccgttggatagcgtacgtttcaatttttgtgggatgctgcttcctagtggtgttctatgctggaacaaaggagccgactttgcagtcgggatctgactgcaagaaatcggctaggatttcctggggctactggttcaagaaggccttgtactaccaagtcgctctgttgtatatgcttgcaagattgatcacaaatgtctctcagtctctcatcgcgttctacgtcactagagacttgaagatgaatgagtactccaaagcgattataccagccatcatattttgctgcagcttcctcgtctctgttgttctccaggagataaagtggaacagccgccgcctgaagtcgctcctcaccatcggagcaatactctgggtgatcgctggagccgccgtcttcgtcctcccgagtcagatgcacaaccttatgtaccctctcgctatggtcatcggagctgcaaacgccctcgtcatggtgaccacaattgggctagagagcgcgctggtaggagacgacttgaacggctgcgccttcgtctacggctcgctcagcttcctggacaagatgtcgtgtggaatcgccttgtttgttctagaatcatacgaagattcgattagctgcggcgagacgagggggctgtacacggtgagcaggtttgggacaggtctgatcccctcgtgctttgcagtcttcgcgctgctggtcacctcaaccctgaagctccaggacaccaacccgagagctgccgccgctgcactggaagctccactcctcgtctga

SEQ ID NO: 97311 - DNA, 522 bp, Oryza sativa
  Clone ID: PAT_MRT4530_95327C.1
atggcgtcctgtgctggcgccgccttcgacggcttgttcctccccggtttgatgaacatggagcccttgcctccgatggctgtcgtgttttgcctgatggcctccttaccgcggagcttggcgttgtactccttgctcagcgggagcttgggcaagctcgccgggacaggagagggagggagaagagctgtcgagggctgcggcggtggcggtgccccggtcggacggctcgatgacgagcactgtgaagagccccgcgtgcgactagtcggggggcgtggtctaatcggccacaacgaggagttgccatccggggacggcgggaagcgagcggcggtgccggcaggggaggagggagcggcgcgcggcgaggtgctcctgccgctcgcggagctcgtggcgggcggcgaggaggcggtcgaagagctccctgagtctacatgctctgcagacacggcctacggcactatggaagcccatgagttgcaggtatttcaggggtacatgaacatgaatgcttga

SEQ ID NO: 97312 - DNA, 336 bp, Oryza sativa
  Clone ID: PAT_MRT4530_95328C.1
gtcctcggtggctgattttcacccgtctccctccaccagcgcgcgcgcaattccggccccccgtacccatcctgcgtgcgctccgtcctctatgagatgtagagcctacggaaggacttacaaatggattgagggcgagagggaagagatgactgctttggtgggagggacccctttgccggattcggtggctttggttgccagaggagctagagctctggtgttttaggaggcagggatcctctagatgatccgttctttgaagagtccattaggaagtgggaagtaccggtccagtccattgtgggcccaaaggcgaggttctatttgggaaac

SEQ ID NO: 97313 - DNA, 488 bp, Oryza sativa
  Clone ID: PAT_MRT4530_95329C.1
gggcaacaaaccctgggggcattttcattcggggataaacaaaaacattttcggccctgccattacccccacaaattctattcctaattcttacaaaggtcccccggcatattggccccattatacccgaaccctttggtacaacccaacccccaccggatcaaggatgcattggcttcatcgggccatttggtcattgctttgggggacaattaaatattgacccaagccccttcctaaaaccccaagcccttcctgcattttgcgggggccaaatctatcccttaatcttcaagaaacccgggggtatttcttaagaacacaaaacccccaaaaaccgggggcaggggaaaaaatttttcaattgccaactctgctcgttcccctgggggaaggaatacaggcgttgaaaagcccccggaacccaaaaattggcttggggcgacccccctgaccgacaacgtaaactggttgaccaacacaaaccg

SEQ ID NO: 97314 - DNA, 891 bp, Oryza sativa
  Clone ID: PAT_MRT4530_9532C.1
atgtacatgggcaacaacaacaacgggtgccgtccacaagtaggtcaggggtggaaccagccactcccgtattatcaaggaggtaacaacaacgtaatccagaagatccacatcaacgtgccactgttggatgctatgcaagtaccaacatatgcccgttatctcaaggatatcctcaacaacaagagatcactcccaacaacggaggtggttacgctgacggagcaatgcagcaatgtcatactccacaagcttccggagaagaagaaggatccggggtgtcctacgatcacttgcttgatcggggcacagcagttcgaccaagccttgtgcgatcttggagccagtgtcagcgtcatgccaaaagacgtctttaacaagctcaacttcacggatttcttcatctcggttgacttcgtggtgttggacatggacacaggaaaagagacgccactcatcctagggcgtccgttccttagcaccgcgggagccaacatagataatttcctggagaaggaaacaacaatgcacaggaaccgttattggaagacgccggtaaaaccaagtacactggccaagaaactagagcagtcggctccgaagaagccgccttccgtaccgaagccaaagaaggggtccggctcttcatcaagtcatcatgacgagtctagcactcgttcatccgtcgatgtctcgatggaagacgccaaaatcccgggacgactcctgaatgacaccgacctcgaccttgtcagtgatcgggaaagacaagcctacaacatgctgagtgaccgggagtatgctcacactcgagaatactctctggagttgctaaaaaagacagggctttatgacatcatcgatgatgtcatcaccggcgagaggctctga

SEQ ID NO: 97315 - DNA, 324 bp, Oryza sativa
  Clone ID: PAT_MRT4530_95330C.1
atgggccggcccgacaaggagggagagagggcgcgggaggaaggaaggttaggccgacggcccaacattatcacgccgtacatggagccgggggcttccaatgcgacgccttcaacaagggagagtgtggagcccacaatcatcaccaatttcggcatcaagcagaccaagctcccacgcgctggtactgtcaccaaaccatccatggtcatagtgccctactcgcctcgagctgtggatctagcaacgaaaggggcacgatcgatgctaggtgctaggggcgacacaatgacgagtatggcaagaacactcacaacgggctag

SEQ ID NO: 97316 - DNA, 653 bp, Oryza sativa
  unsure (1)..(653): unsure at all n locations
  Clone ID: PAT_MRT4530_95331C.1
ggaaattatcttaggacagtcaaacccggccgggaaaaccagttccatcccttcctacacttcctcaatacctttacaaggagccaggcaacaatgtctcactctcataatcaggtcctctatttccaagcccaaagaaaggtcagatttcaggataaccaagccaatattatgaaggaagtaccaataggaacaaatgagaagttggtgcatgaccaaaggatgaaagatgacaagaacaaggatgtagattcagtagcttcagacttcatcaagctcaagcacagggcttgggcactgcagaagagcgcaagcatgtatcaaccttcttaaatgcggttccaatagtatggtattctccacttatgcgtcttcactacataggctctggtttgaataagacatgttgcttgaaagagccatggctatcgccaagttgtgctactatggtattgctatttgcaatatatgaataagaaagtattgtgtctgtactattatttgccgcacgcccgcacaaatgtatgtgataccttttatgttaacatgaccatattttaaattgttaaaaaaaaaaaaaaaagggcggccactattgtttgcagcnggaaaaaaaaaaaaaaaaaaaaaaaaaaaaaaaaaaaaaaaaaaaa

SEQ ID NO: 97317 - DNA, 861 bp, Oryza sativa
  Clone ID: PAT_MRT4530_95332C.1
atggcagcttctgtcacctgcaagctacacccagggcactcgttaaagaggcaccactacggcggcgaggagggccatgcctgtgtctgtgcactgtgcgagcgcatcatcgccggctccggctacaggtgcggcgagtgcggcggcttcgacgcccacgaggcctgcctctcgctgccgatgcgcgtcgcgttcgtcgggcaccccgcgcacgagctcacgctctccctcctcacggccagccggtggtgcgacgcctgcagggtggcctcccacgccgggcgctgcgtgtaccgctgcgtggcgtgcgacttcgacgtgcacgcgcggtgcacgtcgctgcttgacggcgagcagcagcatggtaggaagcgtggggtggcgaggcgcgtcggcatggcggctctcaggatggggttgttcgggctgcgcgtggcggacgcggtcaccggcgggttcgggtcgccgccgcgacccgcgaccccttccggcaacgttgcctgcggcggggagttttaccacctcgacgatagagggaaccgccgctgccgccctcccccggtctccatccggtcggatctgggaggggagccgcaccgggtgccgccgccgccccgcgccatggtcatccccgcgcctcgccgcagccgccctcccccggcctccctccggccggatctgggaggggagccacgccgggtgccgctgccgccctccccccgcccccctccggctagatcagggagggagggaggggccggaggccgccgcggccgccatgtcgcgagggagccgccgctgcctccggccggcggccggcggctatttggctctgagggtcatgtccgcctccaaaaatga

SEQ ID NO: 97318 - DNA, 1407 bp, Oryza sativa
  Clone ID: PAT_MRT4530_95333C.1
tttgtttgatggtttgctcggttaatattcatcaatgaaatttgatgtacaaggggtgtgtcactgataagtgatcttattagcataacgtgtttaactctaacatgagtaattctcagtaatctgtctatgaaatccaaatggttcagagaaggaaccattgcaaaacaaatcataaaaaacacatgtaagtttgacaccatcttgtatatccagcaaggaaataagactattctcatcctgaactctgctggtctcagttttgacctttgccaacaactcaggaaaatgggaaacgttgagcacagtagcaggtacctcaagagcacaattactgattatactgcatgaccttgctggaattgacggtttctgcaccatgttctgagacacagatgatgcatttacccaaaggtataccgtgtttctaccatgtaaatgaaggcaaaacataggtgggataggagccatgcttgcggcacaatgaatcgatggcgtcctctccagcgatttctccaatctcattgagtccaagttcagttgcatgaatccctccagtaatgaatgcagaagcgactctagatgcgtttgcacctttgatgtcgtggtgcagtgaatcacctactgtgatacattcatgaggattaacccctgccagggacattgctgatgtatagatcaccttatcaggcttccccatccatttcacctcaccaccaagactctcgtatttggctgccagagtgccaggcatgactcgcagatctcgtgcttcaacagtaacataatcagggttagctactaccattggcagtcgcttttctaggcatagcattagaacctgctcaagctcctcaagacttttgggaagtggatcccctgaaggtagacccagggcctcagtaccatgggctaatataaactctgcctcttcgacattgctcacgacttgcaaaccaaggccctccagagaaattgcgcctcgattgccccatgtcagatggacgcactttcttccaagagctgcaaaccaaggatcatctctcttctgaaggtactgatgtgtgagttccccgctagtaatggccctgaggaaacaggatgggtcaaaaccaaggctctctagcttctccatggttacagacgacctcctcgacgaattgctaatgattaccatcttcgcccctttctcagcgagcttctccaacgcgagaacggcaccagggtaaggcttcttcccatcgtgaagaacaccaaactgatcgaggaaccacgccttgaagcggccggactccgccagtgcccggatcccggccagcctctcgaacgccggcgccgatgccgcggaggccatccacccccaccgccgccgccgccgccgcccgaagcccagcagggaggaaagaa

SEQ ID NO: 97319 - DNA, 491 bp, Oryza sativa
  Clone ID: PAT_MRT4530_95334C.1
atagtgaaactacctttggattcaggaggggagttatcaatttacgataaaataaacaacgaacacagagaaacaaaccgtgttaggttcgcgttctctctctcggcacacacaaacgaaacaacaaacacaagcgaaaagaactcaaaaacgatgtctaccagttgttcagtatgatgataactcagcttcattctcggtaccagtgccttgtgggtccgtcgggacagtcagtagatcgtcttgggacgacccagcatcagccaacatgagccccagggcgtcgggcttcacaaacaggacggagccattgtcaagcgcgaacatgatggagccaccagactgcctaacgatgctaacgcacgcggacttggctttgagcgtcatcgaactgatcccggataccatatcccacacccggattgtgttgtcgacagacgctgacaccagcgagcgcgcgtcgagtacgatgaccgccgtgatctctttct

SEQ ID NO: 97320 - DNA, 135 bp, Oryza sativa
  Clone ID: PAT_MRT4530_95335C.1
atggacgcccggacgagcgctgtgacctcggaacgttgttgggacttggctgggggtgaaaacggaactggagcaactgctggaaaagccatcatgctcaagaaccccccgcctggcaagctcaaggtcttctag

SEQ ID NO: 97321 - DNA, 2463 bp, Oryza sativa
  Clone ID: PAT_MRT4530_95336C.1
atggtaggaggaggtgggtacaggcagaagctgatccaggtatggaacgattggcaggtgagcgtgctggtgctgctcagcctcaccctgcaactcctcttcctgagcacggcgggcgcccggagacgggcgcagccgagctgggggaagaaaacctacttctgggctctctacatcggctccaggttcatcaccacctactccctcggcatcctctcccgcgcctccacgggcgacgccaacgccgacatccaggcgttctgggcgtccctcctcctgttccacctgggaggccccgacgacttcaccgccctgtccctcgaggacaacaagctctgggatcgccgctgcctggagctcttcatccaggaaataggaaatgaactagtctcgaccacactctatgtcttctcccgctacgtgctcgaccccggattccgccgcttcatcgtgccgttcgccctcatcttctccgccggggtggtcaagtacgtggagcaggtcgtcgcgctgcaccacgcgacgatggaggcgctcatcaagtccgtcctgggaaagcccgacgctggcccggactacgctgacaccattaaccgattggacgggattatgagatccggcgcattgccgtccctcgacatcaagaacgaacgagttgaccgcccaaactctgatccggaggccaacgtgcaggtgaaagattacagcgaagatgagcaggtggccatcaaaaccatccggtcagcacactctctgttctcgagattcagtgtcctgttcgcggacggcatcttcagcttcgaggacaggcaggagagccaggccatgttcttgcgcaaggacgcgaggtgggcgttcaagatcgtggagatcgagctgggtttcgcgtacgatcggctctacaccaaggcctcggtgtcccgcggggcgaggctggcggtgcgtgtgtgcagcctgtcgctcacgctcgccgccggcctctgggcggcgctggcgatcctgcgggcgagccagtaccggcagcggcaccggtgcgtgacgtacgcgctgctcgccggagcggcgctcaacgacgccgcgatactcgccgcccacgccttctccgtctggtccctggtgcacggcgactggctgagctggtgctccgtcatgctggtgaagcggaggaggtggtcggcgagcatggcgcaatccaacctcgtcaccttctgcctccggaagctgccttccaacaacgactccgacccggcgccgctctcgtcgtcgtttcttctccggcggctactcctcggcggcggccgaggaggaggagtgcaacaacaagacgcatcgcctgctcctgctctttccaccacgttagcgtccatggacgaattccagaagctgttcgagaggcgttccctgctcgaccaggtccgttctggaagcttctggagcaagtacaagcataccaagtatgtcccggtgagcgagaagctcaaggatttcatctacgcccagctagaggagaaggttcgccgtctcagcgagtacgacaagaggatggagagggagcgtgagcgtgagcggaagcgagtgagagctccatctccatctccatctccatctccatctccatctccatctccatctgcatctgctacgactccaacccaaaccggaacgtcgacgacgacgacgacgagtagcatgtacagcattttgacggattgcaggggggaccaagtgatgaaaaaggagcggatcagcaacctgagctggagcctggagaagaaggagttcgacgagagcctactgatatggcacatcgcgacggacctgcggttccgcgaggaggcacaggcggccggcgccgccgcctccgcggcgagtgcggcgaccgtcgatcagcgagagaccaggaagcacatggagatcgcgcgggagctgtccaactacctctactacatcatggtggtggtgcacccgctgatgctgtcgtcgtcgacgaccatggcgatcaagaggtgccgggacacgtgcgcggaggcgcggaggctgttcctcaaggaccacgtgatggcggcggcggggaaagggaagggcgaccggcggcgggcggtgggcgaggacaacgcgcacagggtgctcctggacgtggacacgccgctgcacgcggcggtggtgaagggggacaagtgcaagtcggtgctgtgggatgggtgcttcctggcgagggagctgaggcagagcatggccgacccggggaggaggtggagggtggtgtgcgaggtgtgggtggagatgctgggctacgcggcggtgcactgcggagggtaccagcacgcggagcggctcaaggacggcggcgagctcatcaccttcgtctgcctcctcatgacccacctcggcatggggaagcactaccggaccgaggttggggatgcctacgcccacctctcgccctacagcgccgcggcctag

SEQ ID NO: 97322 - DNA, 527 bp, Oryza sativa
  Clone ID: PAT_MRT4530_95337C.1
gtcgattctatgcatttgaaaaggctcacaggttagatccaacttcaagtggccggggtgtccggcaattcaagacggctcttttgcaacggcttgaaagggagaatgaacccaccttgagaggaagggcccgcaagagtgatgcacgggaaatacaggccttctatcaacactattataagaaatatattcaagcacttcaaaatgtctccgaccaagtggatcgtgctcaacttaccaaggcataccagactgctaatgttctatttgaggttttaaaggcagtcactcaacagcattctgttgaagttgaccatgagatcttggaagccgctgataaagttaaagagaagacaaagatatatctccctttcaatatactccctcttgatccagacagtggcaatcaagcagtcatgaaatttcctgagttggatgataacgcgctgaatgaagtgatgaaaaagttgtttaagaactacaaaaagtggtgcaaataccttgatcgcaagagtagcctttggtga

SEQ ID NO: 97323 - DNA, 1083 bp, Oryza sativa
  Clone ID: PAT_MRT4530_95338C.1
atggagttttgggcccacaaacccaacgaaataccagaaaatggacccaaccactatgccactggaccaaggacccacctgccagggcccaggagaaaacccagggccaggcaggggcggccgacccccaggcctgacccatctggccttcaattttcacatgccgtattagagattggtgtagaggtggtgacagccctcgagatcaccgtagtcctccctatgcagatgaacctaaagaagaccaaatacacatgttccctgtggaaattcaataccttcgaatactacaaggtgaagtactacatcggtatatccgtacgcttgcggattttatctgtgaacccaaagctccttgaaacatgggaggtggggtttgggcgggcggtcgaacaatcgtcgggtttaccgttggccaaaccaccaccccttgacttgctcctcctgcggtcagagccgcgcttggttgggtcgcttgctgcggtgattgtgtgtgtggctcacccgaacttagctgctggacctaagcttggaattgggcttggagggtcgaagcagcttcggccgtggattgggagggcgagatcagttgtgccaaaggctgtgttggtgcaaggcggacctgcacctgtgcaactgtgggtgatgccaaggcttgagtcgaagcttccacctcggggtgcttcgctgtctggcgatcctcttcgacgattgccacctgatcggcttcaacctccatgtcaagcgggctcggtcgaccttcataggatgcctccaacaacttctatttttgaaaaatcgcagttttgtatcactaatatcgatcagaaactaaaggccctgcgacatgcgacatgcctgaacaggcccttctggaagaattcagctgcaaaagcaaaagcggagatgaagaactggttaagagcacataggaaaaaaattaaagtgctgatcttgtttctgcaagtgattaatgtgctgtatatatcaagctctctcaccgcagaaagagaaacaaaggggcttgcaggacaccaggagggtgcaggacatggtacatacggcatgaaaagagctctgcca

SEQ ID NO: 97324 - DNA, 319 bp, Oryza sativa
  Clone ID: PAT_MRT4530_95339C.1
taaaaagggatttattgcgtcagccgagggggaggggcgcgcggaccgggtccacgggagtggggcccacgaggcagcctcacggtccacggtggaccgggtgcatccgggctcacaccggccggcgcccgtgggccccacgcgtcagccgcacccgagggcacgggcagctgacggccgggcccaacgcggcggccacacggcgcgcccggaggcggccatgacggcgcagctggcgggaggcggcgcctgcgcacctatggtcgccggggatcctttagagtcgaccgcaggcagcaagcggggcacgcaccctgac

SEQ ID NO: 97325 - DNA, 571 bp, Oryza sativa
  Clone ID: PAT_MRT4530_9533C.1
ggggggcaaaaattttcaagccctaaaaaaaaggaaacaaaaaacattgtttttttccccacaaacccagggggggggggaaaaaggaccctttaaaaaatctttaaaaaaagacccaaaaaaattttgctagccccaaaaaaaaagggcccccaaattacgggggatgggcaaaaaaaaacgggcccacaaggcccatcgcaacccttggaaaaaggggcggacttaaaccttgaacccccggggggtccccccgccacgggccttttaaaacttccttcccttggagcccacaaaaggcttcgggggggggggcggccccccaggagccctaccaaagggccggacggccccacgggcatttttgggacccccaaaaaggaccggggtccccccaagcggaccccggaaaaaaagctggccaaaggggaggcccccccccccagaattgaaaatccttgccctaaccggctccgggaacctcaggggagaaaccctctttttcggaaactctgggacccccttggccacagggacgggaccaacaaaaaaagaaagggggggccccccc

SEQ ID NO: 97326 - DNA, 264 bp, Oryza sativa
  Clone ID: PAT_MRT4530_95340C.1
gcggactctttctctctccccctttccttcccctcgggggggactcccccgtctctccgcgccagctcgatccccgccggcgccgaccagcgccgatctccgtcccgggggccagagcgggcgccagcgacctgctgcttacgcccgcatcctcggcgacggtgagcacccgaagggcccggctctgaagtaagcaggattctgaatctgagaaccaggaggtggattgggggactatggctcagaaccccaatttcgacaatg

SEQ ID NO: 97327 - DNA, 321 bp, Oryza sativa
  Clone ID: PAT_MRT4530_95341C.1
atggctggacacaaggtggtattctgcacttgcattctgatcttcatcgtcgtcgtcatctcaggccaggccgaagcccggaggctggcggcggtggccaacggcaatgaggatgccgtcgccgtggaaggtgacgggagcttcagagcagtgcaagaaactgcttcttctgcgtcgactgatcatgcagctgcaggtcgaggcggcggcggcgccgccaccgccgtacaaggaagcatgccaatgacgacgacggactcccgccctactgctcccgggaacagccccggcataggcaacaaggggaagatcaacaactag

SEQ ID NO: 97328 - DNA, 369 bp, Oryza sativa
  unsure (1)..(369): unsure at all n locations
  Clone ID: PAT_MRT4530_95342C.1
gttggggacaatatggattgatggcgcagagactatatgcttttcatctccatctatttgtacagccatagtttataacaatccacacaacaccctgcttctactgcaggtatttatgttcctgtagccatgtcttgacatcttccgcatctctctcaagccatgcggctttggcactgatggcgtcgatgctctgagacagcgccatatcgaagcccttggtactcttgctgctgaagaacgcctggatatcttcaatgtgttcccggtgagtgaagcccgatgttgtaatggcaacaaccgaacttagcatgctcaagctaggaggcagccttctctccagctccgaccagntgnccttgncccact

SEQ ID NO: 97329 - DNA, 467 bp, Oryza sativa
  unsure (1)..(467): unsure at all n locations
  Clone ID: PAT_MRT4530_95343C.1
tatgctccggcccgtatgttgtgtggaattgtgaccggataacaatttcacacaggaaacagctatgaccatgattacnccaancgcgcaattaaccctcactaaagggaacaaaanctggagctccaccccggtgcggccgccgccgctttcctgtagggaanaaatggtatccgccgccgccgacgtccgccgctcgctggcgttggcttgctggttcgtgtgtggcgtttggttgagtgagtaatcgccttgctaattaaggagggatttgtgatggagttcatgcttagattactcttgtttggctgtgaatctgtgtgggctagtaattcacggtgtttaggcgacgtggttatatgctagtacatccatggtcatgtgtaataaggtgccgtgtaataagtttttgtggtaattaagtatgttgccgtttaaacttatgtaggaaaaaaaaaaaaaaaaaa

SEQ ID NO: 97330 - DNA, 543 bp, Oryza sativa
  Clone ID: PAT_MRT4530_95344C.1
atggtcggtgagtcaaaactagacgagcgtgtggagaggaaggaggcggcgaggccaggagagtcatcggagtcatccccgttgttgccacagtcgtccgagccgctcccgccgaagtacaacgagcccaacctcccctgctgctgcgacgaccacctttggcccgacgacgatccccgtgcccttccgggcttccctgatgcctgctcgccaagatcgatgtctgaaggcgacggtcgcggggtagtccggtctcctcgtctcccgccctccatgccccactcgctggcctcatttcttttccgcccgctcgccagcctccctgcctcctcccttcccactcccctcgatggcgagaagggttggccactgccccccgccacctttttccctctccacgtgcaaagaagaagagctatcgagttctctgtcggatccggcaatgatagtcgcaccaaggctgttgtcggccatggagcgcgcaagctcagtggccgagaggagcagcacgcggtgcggcggtgggagagaggagaggagtag

SEQ ID NO: 97331 - DNA, 197 bp, Oryza sativa
  Clone ID: PAT_MRT4530_95345C.1
ttgtttcaccatcctgttgattcacttggccggacccctcttcgacacgccgattcactctgagggaaagagagagaggcctgcctgccacacaaccactgtccccaagcctcgtcagagcgccccggcgtatgattggaccggtggccgccaagaagatcctgatggacgtgaaggacctggagaaggaccctact

SEQ ID NO: 97332 - DNA, 218 bp, Oryza sativa
  unsure (1)..(218): unsure at all n locations
  Clone ID: PAT_MRT4530_95346C.1
caagaacgaaaggcgagagtnagaganatggtggagatcccggcgatcgacctgcggctggccggcggcggcggcggcgcggaggagacggcgaggctgcgcnacgcgtgcnncggctggnctgcttccggttttcggggcacggcgtgcgccggggctncaggccgaaatgaaggccgcggtgcgcgcgctcttcnacctccccnacgacgccaagc

SEQ ID NO: 97333 - DNA, 404 bp, Oryza sativa
  Clone ID: PAT_MRT4530_95347C.1
aggacaaaaggatatctctagagcatctagctttattccatgactactctcttttcttgttcctatctaggagccaatctgaagtaggaatcttgttgacatattgtcatctattataaatagcctgaatatgagcacatcttttgtgtggaaaaggacatatattgttgtcaagtcagtagaacgcatggctgtctaagtcagtaaaaaagggcaagtatggctggtcaccttgctcaataagtccacatcctaccatccaaggaaattaattgtatatgattcttgcttcttcactatccatggttgcatattctgccctcccaaacaaagcatctgtcatatatagctttatccagtcagtatctttcgtagctttattcactcccaatgatatgacttct

SEQ ID NO: 97334 - DNA, 374 bp, Oryza sativa
  Clone ID: PAT_MRT4530_95348C.1
ctcccctctctgcttctcgccgtcgaggtattgagaaatatgggccctggaaactacaatcctccggcatcagcaggtcagttttttttatcattcaagaatctctctcgctcccctaacaatggcgaacgtcgagtaagcaaaatgcatttctttttctccctctttttctctctttctttttttccatttgtttacatgctggtggccagtaattgcaattcaactctgccctcgacaaaatatgcaacactgacaaccgaattcatttcaccggacaaaggaaaataaatatctccattctgtagctcacatgcatgcttgggttcaaaaacagtttcagttcaagaaaacctgcttcacacaataaatcc

SEQ ID NO: 97335 - DNA, 1050 bp, Oryza sativa
  Clone ID: PAT_MRT4530_95349C.1
agattaatataattgatcaaatgtaacaactgcaggaagtcaataattttcaccagcgggtgcaattatgagaaaaataaattttctcagcagtggtgtcattggatttctaaaatggttgaaggaggaagtgtccgtataaaagtcaatgatgacttgggtaataattttcaaacgcacaaaggcctgcgacaaggggatccaatgtcgcctatacttttcaatattgtggttgatatgttagcggttctcattgagagagctaaaggcgatggtcaaattggaggagtcattccacatttagtggacgatggtttgtccattctacaatatgctgatgatacagtaatttttctagatcatgaccttgaacaggccaaaaatatgaaagccatcctgtgtgtgttcgaacagctctcagggctgaaaataaactttcataaaaatatcttggtattcctattcattatcggaaactccggaatgttgattggaaaggagttgaagatagatttgagaggaaactcagcacatggaaaggcaaaacacatgtcatatgatcaataccctacattgtataatgtgcctcgaaagaagcagtctactgtggcagaggtcatgagcacaacgctgctaaatatctcttttagaagagctattgttggccaaaagctaatcgagtggaacgatttgatcctcaggctagctaatataactctgtcaaatgaaaaggactgctttgtatggtcgctccataagaatggtcaattttccgtcaaatctatgtatgccgcgatcatgaactgtaatgttcggattaaaaagagaattctgtgggacttgaaaattccactaaagatcaaggtctttatgtggtttcttcacaagaaagttatcttcatgtcttcctactggctccacttctggtctacaatgctaccacaggaagagcaggatactatacgcaatggtgctacactcttggaatcggtagccaagggtctcttattctactatgggtggcgtagttccataagaattggtagctaa

SEQ ID NO: 97336 - DNA, 278 bp, Oryza sativa
  Clone ID: PAT_MRT4530_9534C.1
gaaaccatattcttattttccagccacgagggaggagcgagcggcgcagtggtggacggcggcggcagcggaatggaggggcccaagaggtcgcagctgaaggctggggaacaaagctaaagaacacggaagagcggcgactgaactaccaacggaagagggagaccatgccgaggccgcggggccctggccaagacacggctgatggactcgcccgccttcaactagggcgcgaagctgccaccgctccagattcggggcaagccaatcccctcgcg

SEQ ID NO: 97337 - DNA, 222 bp, Oryza sativa
  Clone ID: PAT_MRT4530_95350C.1
atggaggtgggcatggtggtggtggtggcggcaaaagtgttggtgagcctgtggtgcgtgggggcgtgctgcctcacggcgtacctgtaccgcgtcgtgtgggtggcgccccggcgggtgctcgccgagttcaggaggcagggcatcggggggccgcgccctttctttccctacgggaacctcgccgacatgcgggaggccgtcgcggccgccaggcattag

SEQ ID NO: 97338 - DNA, 1158 bp, Oryza sativa
  Clone ID: PAT_MRT4530_95351C.1
atgtcgcctatatttttcaatattgtggttgatatgttagcggttctcattgagagagctaaaggcgatggtcaaattagaggagtcattccatatttagtggacgatggtttgtccattctacaatatgctgatgatacagtaatttttctagatcatgaccttgaacaggccaaaaatatgaaagccatcctatgtgtgttcgaacagctctcagggctgaaaataaactttcataaaaatatcttggtattcctattcattatcagaaactccggaatgttgattggaaaggagttgaagatagatttgagaggaaactcagcacatggaaaggcaaaaacatgtcatatgttgtttaatggtgaaggcctatggcaagactttttgcgaaataaatacttaaagggtaaacctctttctggtatgtccagcaagataggtatttctcagttctgggccggtttaatgaaagtcaaagaccaatttcttaggtttggttcttttagatgtggcaatgggacaaacataagattttgggaagacacgtggttgggatcacgtgctttcaaagatcaataccctacattatataatgtggctcgaaagaagcagtctactgtgcagagaagagctattgttggccaaaagctaatcgagtggaacgatttgatcctcatgctagctaatataactctgtcaaatgaaaaggactgctttgtatggtcgctccataagaatggtcaattttccatcaaatctatgtatgccgcgatcatgaactgtaatgttcggatcaaaaagagaattctgtgggacttgaaaattccactaaagatcaaggtctttatgtggtttcttcacaagaaagtaattctaacaaaagataacctggctaaaagaaaatggggggagacaaacattgttctttctgctatgcacaagagacaatccaacatcttttctttgagtgtcatgtcgctcagtttgtttggagatgttatcttcatgtcttcctactggctccacttttggtctacaatgctaccacaggaggagcaggatactatgcgcaatggtgctacactcttggaatcggtagccaaggatctcttattccactatgggtggcgtagttccataagaattgctagctaa

SEQ ID NO: 97339 - DNA, 1473 bp, Oryza sativa
  Clone ID: PAT_MRT4530_95352C.1
atggagacaggtaccaagagataccaaatttacaatagaaaaaatgatacctcatggtatctcctcaaaaagggtaaaattgctctttatgaaaaagttcttgtcaagtatttcttcagctccaccacgaacaacttgacagcggaaaaaaaattccaccatttctgcttccaaagtcccaaggacacctgcagatcgcttcagcttctaaggttgcctcctcctagacggcttagaggatatgacctagtgacctctgcaaagaagtttgtgaaagaggcccagttgagattgagagctattgttggccaaaagctaatcaagtggaacgatttgatcctcaggctagctaatataactctgtcaaatgaaaagaactgctttgtatggtcgctccataagaatggtcaattttccgtcaaatctatgtatgccgcgatcatgaactataatatttggatcaaaaagagaattctgtgggacttgaaaattccactaaagatcaaggtcttttatgtggtttcttcaaaagaaagttatcttcatgtcttcctactagctccacttttggtatacgatgctaccacaggaggagcaggatactatgcgcaatggtgctacactcttggaatcggtagccaaggattgattttttatgagactaatgactactccctcagtccaaaaattgaatttagaactgtgatatatgctagatgggttcgtttggcggtgatcgggtctgaggatggagagattccagttcttgggaatgggctcgactctttgcgttggggagaacctgttaaattacgctgcagcctgaaaatgcaacagaacagagcagcaaagctaagaatctgtgctgatggaggtgccaatcgtatattcgatgagatgtttcagatgactaatgatccagactatgaaagcacccgaaaaaggtatattccagaaataattgagggagatatggattctataaggccagaagtgaaacagttctactctagccagggatctaaaatttctgataaatcacataaccaagagacaacagatttgcacaagtgtatttctcggatccatcgttgtacacctgatcatgaaaaaacaaatctttgtgttcttgtgactggagcacttggtggaaggtttgatcatgaggctgctaatatcaacattctgtatttgttctcggacatgaggattgttcttctatcagatgactgcttgattcggcttcttcccaaaacacacaagcatgagatctatattgagtcatctgttgaagggccacattgtggactttttcctgttggagcaccatctggaagcactacaaccactggcctgaagtggaacttgagtacatttctttcccaagttgcttattcatgcagttttcatgttaaactatatgcatcagttctttccaacagaaggatactgaagatactaaagcacatttga

SEQ ID NO: 97340 - DNA, 300 bp, Oryza sativa
  Clone ID: PAT_MRT4530_95353C.1
gtctaatcctccccctgacggttcgaatggggacggtttcagtacgattgcgctttaaactgtatatgatgccgttggtggtaaaagcatgacagagcaacatgaagatgaccgttgatcagacggtggtctcacctgcacacaccgactaccgatatactaaagccgacttatccacatatgacaaaatactttagttaagatcataaacgatcgatagacattgaggtcgctcgcattaaacatcgtgacgagcatctagcgatgcatgccatgcacgactcaatacaggggatgaac

SEQ ID NO: 97341 - DNA, 462 bp, Oryza sativa
  Clone ID: PAT_MRT4530_95354C.1
tgtgttaatatggagaattttagtcctttggttcgtggagagatattatgcgaaaatgagccagttgttaaaagtaaaaaaaaaaagggaaacttataaaactcggagctataactgggatcacatatttccgtcaaatctatgtatgctgcgatcatgaactgtaatgtttaaataaaaagagaattctgggggacttgaacattccactaaagatcaaggtctttacgtggtttcttcacaagaaagtaattctaacgaaagataacctggctaaaagaatctcgccgggatacaacattgttctttctactatgcgcaagagacaatccaacatcttttttttagtgtcatgaggagcaggatactatgcacaatgatgctacactcttggaatcggtagccaaggatctcttattccactatgggtggcgtacaataataaaggaggagttggggatt

SEQ ID NO: 97342 - DNA, 1418 bp, Oryza sativa
  Clone ID: PAT_MRT4530_95355C.1
atgagcacaacgccgctaaatatctcttttataagagctattgttggccaaaagctaatcgagtggaacgatgtgatcctcaggctagctaatataactctgtcaaatgaaaaggactgctttgtatggtcgctccataagaatggtcaattttccgtcaaatctatatatgccgcgatcatgaactgtaatgttcggataaaaagagaattctgtgggacttgaaaattccactaaagattaaggttatcttcatgtcttcctactggctccacttctggtctacaatgctaccacaggaggagcaggatactatgcgcaatagtgctacactcttgaaattggtagccaagggtctcttattccactatgggtggcgtagttccataagaattgctagctaaaatattttatgtgatttaacgctagtcaataataaaggggagttggggatttgtcccataaccttatttctcattttgatttacttttatcttacctttttattactatcccaaactccccaaccgccatgtctcctcaagctctcctcctcgccgccgccgccgccgccatcgtcgtcgccggcgccgcctccgcggccggcggcggcgtccagccgaacggcgcggcgaacgacctcctccccagctgcggcccccccccgggcccctccccgcacgctggtcggtgggtggcgaggaggccggcggggcgaggcaggagaggagggcgtcggcggccggcgacgggtgacgcgatggcaacactagagaagggaggaggctggcaggtcgggaggaggtcggcggggcgaggagggagaggagaaggtccaacggcagcagcggcgcgggagcaggccaccgtgttgggtggggagtcggccagccgatctcctctccgaacgtgccgaccctcttcccagtcgcgttggtgacgccgtcgccgcccctccgccccgtcgcccgcaccacctcaccctgacaacgacgcgcgaccatggcaatggcgctgcacggcacgcataggaggaggagggaaggcatacgaccgctgcggccatccgcgcgacggtaggcatcggcggcgccacccatcgcatcggccctccactccgccctgccggccctccccttcgccgcgccaccgtgcatcgccgcctcaccccgatgatgacgcacgaccacgacaatggcggcgcaaaaggcacgtgaaaggaggaggagggaaggcagacgaccgcagcggccatccgtgcgtcggtagccatcggcggcggtgcccgttgcattggccctcttctccaccacgcttctcccccgccaacagtcggccacgccgaccctcctcccaaagacgtggtcactctgacatgtgaggcccacgtgggtcccacgctgactcagctgccacat

SEQ ID NO: 97343 - DNA, 284 bp, Oryza sativa
  Clone ID: PAT_MRT4530_95356C.1
atatttgtggttttttttactacgccacacacaccgtggcactacgaccaacactcggggtaacgacaactacacttgtggcaaccaatcacacgcctcgccgtggtaccgtggttaaaccttgtgacttaaccactacaccacgactactgtgtgactggcacaccacttacggtttgtggacactcccatactgaccgtgtttctcccactggcacaacgtgtgtgtgtgacgataccgccctacggacacttttacactgtggctaaactccaactgtggg

SEQ ID NO: 97344 - DNA, 1458 bp, Oryza sativa
  Clone ID: PAT_MRT4530_95357C.1
atgaaggccaacttgtgtgtgttagaacaactctcagggctgaaaataaactttcataaaagtaagatttcttgctttgggaaaaccaaggaagtggaggatgaatatagacaactatttggttgtaattctggatctttcccctttagatatcttggtattcctattcattatcggaaactccggaatgttgattggaaaggagttgaagatagatttgagaggaaactcagcacatggaaaggcaaaaacttgtcatatggtgggagattggcccttctaaactcagttctttcgagccttcccttgtttatgttatccttctttgaaattccacgaggtgtgcttcaaagattggattactttaggtcacgtttttttagtaatgatgaccggaaaagaaaatacagactaactaagtgggaaaacatatgccgaccaaaagatcaaggtggactaggtgtccataaccttgatataaaaaatagctgcttattaagcaaatggcttttccagttgtttaatggtgaaggcctatggcaagaccttttgcgaaataaatacttaaagggtaaacctctttctggtatgtccagcaagataggtatttctcagttctgggccggtttaatgaaagtcaaagaccaatttcttaggtttggttcttttagatgtggcaatgggacaaacataagattttgggaagacatgtggttgggatcgcgtgctttcaaagatcaataccctacattatataatgtggctcgaaagaagcagtctactgtggcagaggtcatgagcacaacgccgctaaatatctcttttagaagagctattgttggccaaaagctaatcgagtggaacgatttgatcctcaggctagctaatataactctgtcaaatgaaaaggactgctttgtatggtcgctccataagaatggtcaattttccgtcaaatctatgtatgccgcgatcatgaactgtaatgttcggatcaaaaagagaattctgtgggacttgaaaattccactaaagatcaaggtctttatgtggtttcttcacaagaaagtaattctaacgaaagataacctggctaaaagaaaatggggagggggaggggagacaaacattgttctttctgctatgcacaagagacaatccaacatcttttctttgagtgtcatgaggagcaggatactatgcgcaatggtgctacactcttggaatcggtagccaagggtctcttattccactatgggtggcgtagttccataagaattgctagctaaagacgtaccgaatatgatcgattacctcatgataggaaccggtgatgacatgttttcagcgcagccctatcagaagagccggtgtgcatgtttcttgcagcttataattatcatatattcctttatttgtcctggtttacctacctacctacttacattctttattttg

SEQ ID NO: 97345 - DNA, 300 bp, Oryza sativa
  Clone ID: PAT_MRT4530_95358C.1
atgacatgtgctctcgcctctgacagcaacgggaacgtccacagcgggcagctcgcgccgcaacaggttgtcgatacgggtggcaaggaggaggaggatgcaggtgacagcggtggcagggagggattgcgtgaagcggatcatgggactccccgacgcgtccccgtcgaggagcgggccaaggtgctcaaccccctacagcgtgacgacaccctctccgtgctcgccaaagccaaggactcctccacgatcgcgctccaggggttgctgcctggaacgttcgtgccggcgtcgtcctaa

SEQ ID NO: 97346 - DNA, 264 bp, Oryza sativa
  Clone ID: PAT_MRT4530_95359C.1
atggccggaaggccgcaccgacaacagcggagggaggcccgcgtggacgatgacaacgggggactctcgcggccagtgcgggtgaggccaacgtggacggaggagaatgacggctgttgcggcgaggggttggaatggctgctggaagtgttggtcggcgtgggagacgacattgcgggaggcaacattgggctagcccacgatggggcgccggtgtggtggacctgcgagctggtagaggttgtttgggctaaggagatttag

SEQ ID NO: 97347 - DNA, 300 bp, Oryza sativa
  unsure (1)..(300): unsure at all n locations
  Clone ID: PAT_MRT4530_9535C.1
attgattagaccccacatgagctcagacttgcttcattcggnaaataccagtcatgaatcccttttagttcaagcttaattttacaggtnatgccatatggtaagtgnccataagactgcttcccccttcnnnnggtttgattcttttaatatgtccatttctttccttctttcccntttttaaatggaattgtacatccagttctttgccctgtgtatagccatgaggctcatagctaacatacttattgtattcataccacaatgttatagctgtntcactgtaaaaaaannaaaaaa

SEQ ID NO: 97348 - DNA, 660 bp, Oryza sativa
  Clone ID: PAT_MRT4530_95360C.1
atgggccgtctggcgatcgccggcctgatgggccggaaaggtttcctcggccctcgcgggggcgaacttgtcaaggcgaagtcatcctccttcggcagacagtcttcgccttgcacccttcgcctgagacgcctctggcctggcgctactcttcgccttgcgccgctctcgctccatagccttcgccatgggtttcggcaggtttggtcgcagggcctcatgccatccgccaacacagatcaacaggttctccacatgcatcttcctcttcatgatctgaacccatttatgagtacaaatgggtgcagcgactccgttcccatggttggtggcggcgcaggcagcggcggcgaggctggcgacggcggccaggagctggaggcggcggcggccatggtggcggtggttccggcgaactccggtgagggcaacgggcctggtaagcatcagggaaggaaggggagcgcggtggtggcggcaactcggcctggggcggtcgggagcggcggcgcgccgtacggctggcggcggccgaacagagggcgacgccgggaggcggcaccgcgcgagcgcggcgcgaggcggcacagggttggcgtgaggcagctcgagcgcggcttgcatcgggctggcttcgcctggctcggcctagccgagtag

SEQ ID NO: 97349 - DNA, 997 bp, Oryza sativa
  Clone ID: PAT_MRT4530_95361C.1
ggcacgagggccgcggctcagtgcgccgcgcattcgctcgcgcttgctcttctgcctcctccttcctccccgcgtgagatgcgatcacgcaattctataaatatataaacgagcttctcctcctcatgagctctcgtagtatataggagtagcctttgtggagagatacagagagaggcagaggagcacaagccgtcactcacgtcacctgccttcttcttcatcatcatcttcttcttcttcctcccgcttcgccgattcaggttcgccttcgctgcagatgagaagcggcgcctcggcggcggcggcggcggtgtgattctcctctccagagagagaaagaagagagagagagagagagaggagagggggagaggcgggggagaggagaagaagcgtgaccaccgatgggatcgctggagacgcggtaccggccggccggagcgccgtctgatgacacaactaagaggaggacccccaaaagtaggatttacaaagatgtcgaaaattttggagttcttgtccttgaaaagaactctggttgcaagttcaaaactttgagatatttgctcctagctatcacttctgcgacgttccttaccctcctaactccaaccttttacgagcatcagttacaaagttctcggtatgtggatgttggttggatatgggacaaaccaagttatgacccacgatatgtatcatctgttgatgttcagtgggaggatgtatataaggcactggaaaatctcaatgttggtagccaaaagctcaaagttggactcttgaattttaacagcactgagtatggatcttgggcacagttgctcccaggaagtgctgtttccattgtaagacttgagcatgccaaagacagtattagttgggacaccctgtatcctgaatggattgatgaggaggaagaaactgatataccggcttgtccatcacttccagatcctaatgttcgaaaaggctcacactttgatgttattgc

SEQ ID NO: 97350 - DNA, 466 bp, Oryza sativa
  unsure (1)..(466): unsure at all n locations
  Clone ID: PAT_MRT4530_95362C.1
cgatgttagctgcggattaaagntcaatccaatgccattgatctatttaatcgatcaccaattgtaactcagtttaaatncgatggttacagtatatataaaaagctgccggtgcngtgatcgcatttcgcggtngatcatgagcacctcattgggagatcgatgcgaattgctgagttttcagttgagtaggctgcngtaaaaaaatcagttaaaaaatttgggattgattgttgttagtactacctcagttccaaattataaggatatttaggctatttagtaaatagttctgaggttggcaatttttttttttgaattgcgtacgtcttaggggctcaagatccgctcatattttcacattgttgatgtcctaagatccgctcatattttcacattgtgcatttgattggctatggaatcattgaaatgatgggattcattggaaaaaaaaaaaaaaaaaaaa

SEQ ID NO: 97351 - DNA, 577 bp, Oryza sativa
  Clone ID: PAT_MRT4530_95363C.1
agagcgacagataacgactattattgcatctgaaaacatgatagtgaaatcaaatgagaaaggaaacatgaccaatggccgacgaatccacctgtctcaatcatttaaattttcggtccactccaatcttagcgatgaactcgacgatatttttgtcggagctgccaccttcacacatggcatttctggccttctccttccaaccattagcattctccatgaactccttgctcctctccccttccatcacctccctcacacacctctccaactcctccttcctcaccaccccctcgccgtcgggccgcacccgcaccccaacacgccacacgtcctcaatgtacttggcattcattgtctggtctgaccactgcggtaccgccaccattggtacaccggcactcaacccctctgtcgttgagttccacccgcagtgcgtcacgaagcaccccacagctggggtgtgccagcacctccagctgcgggcaccacgtcacgatgagccctctccttgcttcgccgccttggcggcgaagccttccggtatctttggaggtttccgatgccctcaccaccc

SEQ ID NO: 97352 - DNA, 3858 bp, Oryza sativa
  Clone ID: PAT_MRT4530_95364C.1
tgacctcactcttttgaggacgaactaacaatggcttatgggcttgatcactctgagtggctggaagttaaatatatcaacaaccatgctctgtttgtagggtacctgtcgatggccgtcaaaggggtgggcttcttggtgggtttatggaccaccgttgttcttcttggtggcttcgtctctatgcttgagaagaaggatttctggagtctcaccatcatcacactcgtccaaacagcaggggtgttcgatgttctcctgaacgaaaagctgcgccatgctgtgaattcagtcgatggcttcttggttactatggacatggtgttcaggtgcgaagacgaggagttcgactcgggcatccagttgtggcgttcacgagcaggacgtcttgtgacgttcatccaggcggtggtgttcgccatcatactgtgccctctggctgtgctctacctgtctgggctggtcatcagcactagtctatcgctgtggcgcctcatacagcacgactacggcgacggcgacggcagcgccaacctgactccggcgctcaatgtgctctactcactggcactcttccagggcgtcctcttcttctaccagtgggtgtcctacttcgccgggaaaaggttgatcgaaaaggtggccagtaaatattggcaaaacagtaaggaggctggcggggcgggggcgcgggcgggggcgtggcgcaaattggtgaaggtgtacatgaagaagaccaagatccggtgcgagaaggatccatccttcctagaagagtggaacctggtgacgtttgccgtggagctgatgaagccggagtccaagtccagcgactacgtgtccggggcgatgatcctggacacgatcctcgggcagaaggacctgacggcgcagcacgcgctgatcaggaagctggtcggctcggcgtcctccaggaaggtgatgaagaagctgctgcggtcgcttcggtccgcgagccagtacaaccggaacatccgggtgcacgccgcccggatcgtgtcgcgtctcgccggcgagatcagcctcgccagcttcccggaggcgctctcgtgcatatcgtcgctgctcgacaccaccaccacggagcagcaggaacagcagcagcaagacggagacagtgcgccgtccgctcactacagggatctcatggtgctgggccgcgtcatccttcagaagctcgccgccgccgacgagcacaacctttttctcatcggcaaaaagcagagcactatctccaaggccatgctgcccgtcagaaaagacctgctccacatccacaacaacggccatgtcgacgcatggaaggacatcgtgaccgagtcactgcagctcatgtcccagcttgtcagcgcccctgggaagaccggcgacgatctgcgctcccacatcttgacgattcacaaagacgacatcagagtgaataacattatcatctgtaagcaatgccaaagcaacaagaagctccacatgcaggccattaacatcttcacacagcaacagcatcctatggaagcactttcgacgacgtcttcgaatatagacacaacatatagcgaaacgaacatcaggctgctcgtagacatcttcttgactaacaaggacgcctccacaagaaaaatggcagttggcatactggcaatactgctgtccgaccaaaataaaagcaatgccaatgccaatgccaccattatcttcaaggcaagtgacaccgttgtccgtgatctcaagacagtgcttttagatgatgaggaaacagaatacagaatatgcgcagcagaaatactcgagcatctacacaggacaaaggaagcctcctatctcaagaaactgatggaagccatgcaaaatgtgctaccgaagattctcaacgaaatatttatctctctctctccacctaagcaaggagaaaagcaagcagaaaaggcagaaaaaggaacagacggaaccaagacagatcctgacattgaagaaggtgctggtgccgttgcttcgaaagataatgtcgacgtcaatgaccagaaggaggacattggtaagaaaaaaaaggacaggacgaggaaactacatgcagctttactgtcacttagtgtggcaatatttgaaaaacggatcagagatggtaaagatttggatacacttgctggtgaaattgcccgaggagactctgcatccagctttgtcggtaagctgaggacgatggtagatcaaaacagtgaacaaacagtcaattgcctgagaattctgaagattgccactaggatgatcatatcactgctaaaacttgaaggatgctaccccaaacaagagctggagaacttgatgatggatcggtcgtcatggatgtatgagatacggagaacgcagccgatatttattaaggaagcatctaaatttattgatcaggctaaggagcatgctttgagggagaatatgacaaagatcttttgtccgtgtcgtcattgcaagaatcagaaattgttggtagatcctggtgaaatattgggtcacataatggagtacggattcaccgccaactacaagaggatatgctacgccatgtctcaaccgtttcatagtgagtttttccatggcggcagcgccgccgccggcagtgtcgccggcgagagggtgacggtgctgaccatcgatggcggcggcatccgggggatcatcccaggcaaggtgctcgagttcttggagaccgagctccagcggctggacgggccagatgcgaggctggccgactacttcgactacatcgccggcacgagcaccggcgggctgatcaccgcgatgctcgccacccccaaagaggacggagacgggccgcggcggccgatgttcgccgccggtgagatttgcccgttctaccaggagcacggcccgcgcatcttcccccagaggtggggcaagctcgcctccaccgtcgccgcggtgtgggggcccaagtacgacggcaggtacctccgcgacatggtccgggaggtgctcggcgaaacgacggtggacggcacgctcaccaatgtggtcatccccaccttcgacgtccggctgctccagcccgtcatcttctccacatacgacgcgaagaactcgactctgaagaacgcgcggctctccgacgtctgcatcggcacgtcggcggcgccgacgtacctccccgcgcactacttccagacacacgacgacgccagcggcgaaacgcgcgagtacaacctcatcgacggcggcgtcgccgccaacaatcctacgatggtagccatgacgatgatcacggaggagatgatagcggaggagaaggcgccgctgctcctgacgaagccgccggagaaggagtgcggccggttcctcgtcctgtccatcggcaccggactgacctccgacgaggggctgtacacggcggagaaatgctcccggtggggggcgctcgggtggctgcggcacagggggatggcgcccatcatcgacatcttcatggcggggagctccgacatggtcgacatccacgtcggcgtcaatttccagctgttccacagcgaggggaactacctccgcatccaggaggaccaggatgactcgctcaggagcaccgcggcggcgctggacgaggcgacgccggagaacatgaggaagctcgtcggcgtcggcgagcgcatgctggggcagcaggtgacgagggtcaacgtggagaccgggaggtacgagaaggtgcccgacgaggggagcaacgccgacgcgctcgtcaggatggccaggacgctctccgaggagaagacggcgaggctgcagcggcggatggacgaagtgacggcggcggccagtgccactgggttttag

SEQ ID NO: 97353 - DNA, 851 bp, Oryza sativa
  unsure (1)..(851): unsure at all n locations
  Clone ID: PAT_MRT4530_95365C.1
ctaataatcaaccgactgctcaaccgattgctcccaatgtgccatcagctcagccaacagcaccagtatcggctcctgcacctgctggaccatcatcggcaccaggtcaaccagttcaacagcagccgattcagcagacgccaccgaggcagcaagttgctcagccgattcagcagcaaggtttcctaaatgcatcggctgggttcaggacgcccgacaatcagccgaggcagcacgctgcaaatcaagttgtcccagagcatttggttcataatgtgcaaccagatcaatcggtgatacctcaagttattcccgaacatttggaaccatgggccgatatgattgcagatgtgatgagagagcaatttgggatcaagccaaaagacactggaaacttgtatcggcatcgatatcctgagtggtttgagagggttccattgcctaacccgttcaagggtatgatagctccaatcagggagaaattctcatcccaggactttgatagtttgtcacatcttgcacaaaaggaaacctacatatatggatctgatgatgatgatgatgattccgaggtagcagcagccaagtgggttaggagcaagaaggttataccatgccaatgggtgaagagttctgaaaagaagagagtctttagacagcagatccaggcggctattgaggaaggcanaatcaagtttgatgattccaataagccgatgaaggttgatgncaatccttttcgtgtcaatatagtacatacagctggtcgaacagccgatgaaggaaaagctcgaggttttcaaatgaactcgcctatgattatcaataagtatcagaggaaatatgattag

SEQ ID NO: 97354 - DNA, 954 bp, Oryza sativa
  Clone ID: PAT_MRT4530_95366C.1
atggagactcgccaaggaacaattgttcagaggtacaagatgaaattagatgctgatgttgctgcgacaagttcttccaaggatggggaggtacaacaggtctcagatggtacggctcaatcaggtgataaaagtgctgcagatggctcaggtgataagggtgatggttctcagggagtgcaaggtgaggatcttagcccagatggcaacctggcgcagctacagtttaacaacttccaagatcggattgactatactgtgcgacatgctttgattaatcaatctggagtgttagtcaatactttgtcaaacatcgtgaagtcgatggttgatggctcaatagctgagtatcaggctacaggaccagtttatttaccaggagttcaacagcagtcgattcagcagacaccaccgaggcagcaagttgctcagccgattcaacagcaaggtttgctaaatgcatcggttgggtttaggacgcccgataatcagccaaggcagcacattgcaaatcaagttgttccagagcatttggttcataatgtgcaaccagatcgatcggtgataccacaagttattcccaaacatttggtgcacaatatacagccaaactttcagaattatcaagggggcaatttgaattatcagtatcagcctccatcgccgcaagttcagtatcagcaaggagggtcggctcagcctcggttcgctcctcagtacaaccagttcgagcctgtgccacagcaagtgcagggggtgcctcaacagagaccgtgggccaatatgattgcagatgtgatgagagagcaatttgggctcaagccaaaggacgctagaaacttgtatcggcatccaaaccctgagtggttcgagagggttccattgcctaaccggttcaaagttccagatttcacaaaattctcagggcaagatagtgtttcgacctatgagcac

SEQ ID NO: 97355 - DNA, 426 bp, Oryza sativa
  Clone ID: PAT_MRT4530_95367C.1
cttcgaaaattgtctacactcgtctaggtcgtccttacctgtcagtacttgattcaactccaaccatgcatctccgctcacgggattagaaaacgcgacctcctctctctctctctctccgcacgaccacgcgcgcgcaggcgcggggcattttcgccgccgccgcctcccctcctccgccgccgcccccgctcctcgccggccgtcaaccgcggcgccgcccgcccccacccgagccgccgccgggccccccactgctcgatttgttttcttctccatggagggtggtggcttcgatttcttctccgaagacccaaatccaagcgtctggccgtcggtgatcggcccccagccgtcggtgacatcaaggcagataagcccccccgcctccgcctccgccgccgcccacgccgtcgccgtcgccat

SEQ ID NO: 97356 - DNA, 1890 bp, Oryza sativa
  Clone ID: PAT_MRT4530_95368C.1
atgcagcgtttctcccattgtttccacttcaagtggtcgagttacgactacttcctggtcctcaaccagcggtgtagtgtttctcccaagtggtcgagttacgactactgcttggtcctcgaccagaggagagacgaaagcgctatctctgatctcgccgggcacggattcaaggagaaaggctaccctgttctcgactacgagtcagatcatcagaccgccatgtcgacaatagccagcgacgggcggtgctgtggggaggaggctgctagggggaggggagaggaggaggagtacgacgtcacctccgccgccgccgcggggccctgcgacgcctacctcgtgttccgctcctccctaccgctctacgcctccgccgtctcgatctccaacctcctcaacgtcaccgccaccaccggcggcgaggtcgtccgcgaaggagatggaggagcaccagagctagaaaaagaacgcgccgcctcgtccgtgtccatctcccgctcggtgccgcacaagggcgaggtcaaccgtgcccgctgcatgccgcaaaggcggtacatggtggctaccaagacctgtgtggatgaggtgcatgtgtaccatcttggcgacgacggcgagaagtgcggcgccgatgtggtgctcagggggcatgaagcggaggggtatgggctggcaccagctcagagtacggcgccgttccaggtgagcatcttcaccagccggtccaccaccgccgccgacgtgccgacccgccggagcgcggcctcgccaagccgtgggggagaagccagaggacggccggaagagaagtgcgacgacagtggtggggagatgtcgtcggtcgcggtctctaagcgaggacgaccacgccgggcgtggaaggagatcagagctggggtcgccgccgtgccgctgccgttgtcgacgccctccagatccgcgctgtcgtgccaccgtcgtcgacgtcctccagatccgcgctgccgtgccgccgtcgtcgagtcatcatcgtcgacgccctccaaatccgtgccgtcgctccggattcaggccgtcgcgtcggcctcctcaaccgccgttgctccggatccacgccgccgcctcggcatcctcgactgccggcgctctggatccacgccaccgcgtcgatctcctcgacatccggcggcgccggtgttcatcgtcgagagcggcacaccacgagaagatgatgtgcgctgtctcgagggcctcaagacatccctcggcgacccggatggccgcctcgcctcctggaccttctcaaacacctccgccggtgccatttgcgagctctcgggagtttcgtgctggaaccccgacgagtctcgcatcattgctctctcgctctctggctttggcctcaccggtgctatcccctctgagctccagttctgctccgccatcacaaccctcgacctttcctccaaccggctggggggacaaattcctcccgcactgtgcgactggctccctttcgtcgtcaacctcgacctctccggcaaccagctctccggaccaattcccgcagagctggccaactgcaagttcatcaactcgctgaagctgtcggcgaattccctttcgggaaaaatccccgcctcccttgtgctcctaggtcaccttaagtcgctagacctgtctaacaacaacctggacggcgatatcccgcctaagctagcggcctctttctccgcggacgccttcgccgataaccccgatctcgtcgagccacactccggttttaacctcggtgtcctcttcggaaggccggaggctgcagccgccattgccttcgtcttcggttttgttggcacactcttcttcggtccttccatcattagacgggtcgctggtcgcagttgttag

SEQ ID NO: 97357 - DNA, 2289 bp, Oryza sativa
  Clone ID: PAT_MRT4530_95369C.1
ttgcaggatcaaatcaactggcacgctcacacacccaaaggcaagttttggacctgcaatggagttaagcagatctcccaggcctcgtgtttttacatcaacacgcttttggcacgcccgttgggaccgactagaagtcagaaccgcaatagcgttctctcatggttgagaaaccaccagcaacgccgtcttcggctggcaaagagggtcctcccaaatctaggatccctaagcttggtgtgtctgaagttcatgagagcaacatcgtgctcatcactatagacaaattgacacctgaacaaaagaaggatctcgaggtgatgatgcagcaaacacagaaccagttcttgaactcattcatggagacccgtggaggaacaattgttcagaggtacaagatgaaattagctgttgatgacactgggacaagtttttccaaggatggagaagtacaacaggtctcagatggtacatctcaatcaggtgataaaggtgctgcagatggcttaggtgataaaggtgatgcttctcagggagtgcaaggtgaggatctcagcccagatggtaacacggcacaactacagtttaacaaattccaagatctgattgactttgccgtgcaacatgctttgattaatcaatctagggtgttagtcaatactttgtcaaacatggtgaagtcgatggttgatggcacaatagctgagtatcaggctataggaccggtttatttatcaggaggtgttttcccaaattatcggcccttgatcactaataatcaacagactgctcagtcaattgctcccaatgcgccattagttcaaccgacagcaccagtatcggctcctgcacctgctgcaccatcatcggcaccagggcaattaatcaatcctcggttgttggtgagagagcagccacaacatagtggacaaaatgtgaatcaactaactcaagagcaagttgcagctatgttcttaccaactcatccgattcagcagacgccaccaaggcagcaagttgctcaaccgattcagcagcaaggtttgctaaatgcatcggctgggttcagaacgcctgataatcactcgaggcagcatgctgcaaatcaagttgtcccagagcatttggttcataatgtgcaactagatcaatcgaggtgatgagagagcaatttgggctcaagccaaaggacactggaaacttgtatcggcatccataccctgagtggtttgagagggttccattgcctaaccggttcaaagttccggatttctcaaaattctcagagcaagacagtgtttcgacctatgagcacattagctgattcttagctcagtgtggtgaagcatcggctgttgacgccttgagggttaggttgtttcctttgtctttgtctggatcggcttttacttggttttcttctttgccatatggataaatcaacagctgggccgaattggagaagcaattccatagttacttttatagtggggttcacgagatgaaattgtctgatttaacagcgattaggcaaaggcatgatgagcctgtgcaggactacattcagaggtttagagagatgaggaataagtgctacagcttgagcttgacggatgcccatttagcggatttggcttttcagggtatgatagctccgatcagggagaaattctcgtcccaggactttgatagtttgtcacatcttgcatagaaggtaaccttgcatgaacagaggtttgcagaagccaggaagaactttaaaaaggtcaatcatgtctgtctctacatatatggatctgatcatgatgatgatgatgatgattccgaggtagcagcagctgagtgggttaggagcaagaaggttataccatgccaatgggtaaaaagttctggaaaagaagagaggtatgacttcgacatcaccaaggctgataaaatctttggtttgttacttcgggaaaaacagattcaacttcctgctggtcatacaattccatcggatgaagagctaggcaagaggaggtattgcaagtggcataattctgggtctcattctaccaattattgtaaagtcttcagacagcagatccaggcggctattgagggaggcaaaatcaagtttgatgattccaagaagccgatgaaggttgatggcaatccttttcctgacaatatggtacatacagctggtcgaatagccgatggagggaaaactcagggttttctagtgaactcggctaagattatcaccaagtatcagaggaaatatgataagtagtaggaaatgta

SEQ ID NO: 97358 - DNA, 594 bp, Oryza sativa
  unsure (1)..(594): unsure at all n locations
  Clone ID: PAT_MRT4530_9536C.1
agtgttaatttgtgctactcagaagtcataacacaacatacataacattacaaaggttcctctagattccggtttattccttaattttatacagaaactaacttaaaagtgcaacaaatagtaagtgcacactgatcatcatattactctcaaactaacttaagttcgtaccactgataatacaccaaactaaatcatgtcaacatcctcaatcataataagcaggggtaagcattcctccagcattgtacttttcaatcaactcgacattggccttgaatatctcaaagcgatgagccttctccacttcaattttctatgtatgtttgctccactccatccactgttcgtggctcaccttcatggccacttactttatagcctcctcgtcagtctgcttagagctcttgagcctctcatcgtagctcattttcatggtctcctcgctaatgagcttaaaaaactttaggatgcaggcaggtcactcatgcaagaatataagccgaacactatataataccacatgtcccttttgggtcatcgatacctctctncaaataccaaatcctcatatccctcatcttgctcatctta

SEQ ID NO: 97359 - DNA, 539 bp, Oryza sativa
  Clone ID: PAT_MRT4530_95370C.1
agctgctcaatagacacaggttcagggacagtatcctggaacgtgacagagcatctagcaaggatcgccatagaggagatcgaggcagcagccgtgatagggacagggattatgaccgcaggagaagccatgatcgataccatgacagagaaagtaggtcggacaaggacagagaatcagggagatcccatagttatgattcaaggggctaccgaaggtcacgctcccctagggaccgttccagagactatgatcgatacgggcgtgacgaccgtcggcatcgacgctagacacatggtcgagggttttagcatgaaccggatcgtttggtgtttcaattcagaggttcatgtgggaaagatgcttatttcctgagtatatccatttgcactaccaccaatgaacatggaactgatgtaatagctacgtgaagttaggattctagttgatgctgatcatgtacaacccaaattgtgttaaagagttgtggtatgtctcagatcatccaaatttaaatttgaagagatcctctcctcttg

SEQ ID NO: 97360 - DNA, 349 bp, Oryza sativa
  Clone ID: PAT_MRT4530_95371C.1
gttgatgtaaaaacatgaggcctgggagatctgcttaactccagtgcaggtccaaaacttgcctttgggtgtgtgagcatgccagttgatttgatcctgcaatcaacaagagacaaagacaaagaaaccgcggttaaatctataaacgatagccgatcggctaggactccatccacgcgtggcaatcatcatgaagcacgtcaacctaacccgacaacgtatgccgtgtcatattgttggattcggctcaatcggctaaccctgtccgactcgaactctgccgatcctagtcgctgccgtttcggacttcagccgattctactctgttccccgagcgattccatcttag

SEQ ID NO: 97361 - DNA, 498 bp, Oryza sativa
  Clone ID: PAT_MRT4530_95372C.1
tgggaccctcgaaaatgctcgccctccgcaaaaccctcctccacggccgcctccccgccgcgccgccggccgccgccgccgccgccatcgcgtctaggatccccgccctcctccgtcgcctctcctcttctcccggagacgggcagggcggggacgaatggggctcgtcctggtccaccggcatcaccaaggaacacttcgacggctccgacgccgcggtcggccgcccggtcacctccccgtccaagccggtctcccctgagcttgcggccgtccgggccatggacgaggaggacgagatcttccgcgccatggagcgcgacaacagggaggccaaggcgtacgtggactcgtggggcgaccggatgcgggagacgtgcgagctgctgaagcaggtgcgcgagccgggctcccggggatcctacctcaaggactcggagaagcaggagatgtaccggctgcacaaggaggaccccgagacgtacaccgtggagcgcc

SEQ ID NO: 97362 - DNA, 1675 bp, Oryza sativa
  Clone ID: PAT_MRT4530_95373C.1
acttctctctcccacacaagctgagcgcccaggtaggctgcctgctaggtctcgtgcatggccggacacatctgatcatagcccactacggcactattccccccttccgcctcgcacgctgagaggtggccggagagggagggaggccagcgagcagcagtagcagcagcaacgcggctaggagtaaggagtcccatcagtaaagcatgcttcctttcttcgattccccaagccccatggacataccgctttaccaacagcttcagctcacccctccctctccaaagcccgaccaccaccaccaccaccattccaccttcttctactaccaccaccacccaccttcctccccttccttcccctccttcccctcccccgccgccgccacgatcgcctcgccgtcgccggccatgcaccccttcatggacttggagttggagccgcatgggcagcagctggcggcggcggaggaggacggggcaggcgggcaaggcgtcgacgccggggtgcccttcggcgtcgacggagcggcggcggccgcggcggcgaggaaggaccggcacagcaagataagcaccgccggcgggatgagggaccggcggatgcggctgtccctcgacgtcgcccgcaagttcttcgcgctccaggacatgctcggcttcgacaaggccagcaagacggtgcaatggctcctcaacatgtccaaggccgccatccgggagatcatgagcgacgacgcctcctccgtctgcgaggaggacggctccagcagcctctccgtcgacggcaagcagcagcagcacagcaacccggcggatcggggcggcggcgccggggaccacaagggcgccgctcacggccacagcgacgggaagaagccggccaagccgagaagggcagcggccaacccgaagccaccgcggcggctggccaatgcgcaccccgtccccgacaaggagtcgcgcgccaaggcgagggagcgggcgcgggagcggaccaaggagaagaaccggatgcggtgggtcaccctcgcctcggcaatcagcgtcgaggcggccaccgcggcggcggccgcgggggaggacaagtcgccgacgagccccagcaacaacctgaaccactcatcgtccaccaatcttgtgagcaccgaattggaggacggctcctcgtcaacgcgccacaacggcgtcggcgtcagcggcggccggatgcaagaaatctcggcggctagcgaggcgagcgacgtgatcatggcgttcgccaacggcggcgcgtacggcgacagcggcagctactacctgcagcagcagcatcagcaggatcagtgggagctcggcggcgtcgtctacgccaattcgcggcactactgctgatgtgatcatccatccacacacgaacgaacgaacgaacggtacggcactaagatcgaactcctgcagctacataattatcctttgcttctcaagagtaataattcttgacgtgttaattaatccgggtgtgtattaattccctctttattattttttctcgcgtttatccggagttgactgtggtgaagactaactttggtttggtcatcgcatggtgtgcattgcatatatagctagcactatcgtctgatcgatgattcatcatcaatggagtcgtctagtattaaaaaaaaaaaaaaaaa

SEQ ID NO: 97363 - DNA, 2238 bp, Oryza sativa
  Clone ID: PAT_MRT4530_95374C.1
aataatacaagttcatatattgctcaaatattcaactgcaagaattaacgagcgagtttttttttcctcactcgatggatggatggatgcaacagcgtgtgtcaattaatcatcatatcaggatttatggctagcttaaccaatcaaatcaaatcaatttcaatttctccttcttggcatggatacggcgttgccgtcgaagagctcgtcgatgatggcctcgaggtcctcggcggagagcttgatgtacttctccgcctgcctcccggcgctgaagctctgcgagaacctccccaggaacgacctgtacgccggcacgacgacggcggcgatcgacaccctgagctccgactgcagctgctcgtcgctcaccacccacgcgccctgcgtcctctggatctcgtccatggctgcgttgaattgcttgaacctctccttgagcaccggcttctgcaccgaccccttcaccgtgatcaccccgtcgtcgcggagcagcgtcagcacgcggctccacgtctcccgctggtagttcttgtggtactgcctcaggtccgtcgaccgcttcctcgaccacgcctcgccgaccaccgcgttgatctccggcgatccccggatcttctgcagcatgtaccggccgttgttcatcaggaagatgctgcagagcgccgggtccttgtagagtcgggatttggcttctagattgtcgtggaggagctccatcacctccatcagctgcgccgcgaacgggtcgctgccctcgtcgtcggcgtcgatgtcggtgcggtggtgctcatggaagacttgctctagggtgttcttgtactcgcatgcgtacttgaggtagttcattaggtagcgggtgagtgggtgcaccgcgccgcccgggaccggttgcttgccggcgtcggcgcggatggagctctccaggtcgcagaagatggcggcggcggactcgccgaggcgggaacggacggaggcgagctcggtttttatgtcggtgagggcgtcggtggtggtgtcgggttcgtcggcggcggcgtcggtggtggagcaggcggcgatgaaggcgtcgatgacgggggcggcgtcgcggacggcctcgtacatgtcgagcaccttgaagagcttctcggcggcgcgcttcgtcatggcgacggcctcggtgaagttgagcatctggagcatggcgcagcgggcgaggtcgacgaagatggcgcggccgacggcggcgtcgcagccggcgaacacgcgggcgcagaggtcgtgctcggcggagaggccgacgttgatggtgtggtggaacgccttgatccacgtcgccacgtccgactccagcgactcccacgccatcctcaccacgtcgtcgatgctcgccttctcgtacccgaggttctgcagcgacgcgtccagcgcgttccggcgagccaccaggaacacctgggtgcactccgtcatgtaccccacggcgatcatggcgtccgccatggcgcggagccggtccacggtctcgggtgggaacggcgggggggtgtctccaccgccgccgccgccgccgccgccgtccgacgcgggatcgccacccgcatggttgaacgacgggccacgcctcatggacttgccggtggcgctcctcgtgtcgccgttctgcgccgccttggcgacgcgggggtcctcgagcatcgtgtggaactcgtcctcgacgaacgccatggcgcggtggagcacgccggtgacgcggtgcaccccgatggtgaacttgctcccctcggggaccgcggtgagcgccgccgccagcgcggagatgcgcctgatcgcggcgaggagcggcgccgcctcgccattctcgcccaccgcccacttatcgtcgtcgccttccgactgcgccatctcctgctcgacggcggacgcgaacttgtcgagcgtcacctccgagatgctcgtcggcgcgtcgccctccctcccggcgaggaacgcgtccacctccgccgacagcatggctaggtccggctccgcggcctcctcgggcggcgccgcctcctctccggcagcaccctcgccctcgccggcgccggcattgtcgacgccgccgcgaccttcctcggcctcctccttgacgcgcacagcgggggcatgctcgctgatcttgatggcgccgagggagaggttccggccgagcctctcctcccggaacgtcgccggcgagaagctgctcgacttctgcggcgggatcctatccat

SEQ ID NO: 97364 - DNA, 3105 bp, Oryza sativa
  unsure (1)..(3105): unsure at all n locations
  Clone ID: PAT_MRT4530_95375C.1
atggataggtgggtgactgaacccttgggtgatagctggttgttggcaacttggcgtgcaacttggtacatcactcattacagggagaagcgcatgctagttgagatggaggagctcctctgcttcttcacggtagaacatcactatcacagctttgcatataataggaaggtgatacacaatactcatagcgttggcatgaagcctattgcaattggacagtcgttcgttctgctactggtttttagtactgtgagtgttgtcatttgctctgatggaaatgagacagatcggctgtcactgcttcagttcaaacaggctatcagcctcgacccacagcatgccttgctctcctggaatgatagcacccatttctgcagctgggaaggtgtctcatgtagtttgaggtatccacgtcgtgtcacttcccttgatctatctaacagaggtttggtggggctcatatctccttcacttggaaacctgacatctcttgaacacctcttcctgaataccaatcaactcagcggacaaatccctccgtcacttggtcacttgcatcaccttcgatcactttacttagcaaacaacacgctacaaggcaacatacctagctttgctaattgttctgctctcaaaatacttcatctaagccgcaatcagattgttggacgtattcccaaaaatgttcatttaccaccaagtattagtcaactgatagtaaacgataataaccttactggtaccatccccacttcacttggcgatgttgcgacactaaatatacttattgtttcatacaattatattgaaggcagtatcccggatgaaattggaaagatgcctgtcttgacaaacttgtatgtgggtggaaacaatttatctggtcgatttccactagctctcacaaacatttcttctcttgttgaactgggacttggcttcaattattttcatggtggtctgccgccaaatcttggtacttctctacccaggcttcaggtgcttgaaatagcttctaatctctttgaaggacacctcccttattccatttcaaatgctactagtctttacaccatagacttttcaagcaattatttctctggggtggtgccaagttccatcggtatgcttaaggagctttccttgttgaatcttgagtggaatcagtttgagtcgttcaataataaagatttggagttcctgcacagcctaagcaattgcactgaccttcaagtgctggcactgtatgacaataaactgaagggacagataccatattcattaggcaacctttctatccagcttcagtacctctttctgggaagcaatcaactatcagggggctttccctctggcataagaaaccttcccaacctgatttctctaggtttgaatgaaaaccattttaccgggatagttccagaatgggttggcacacttgcaaatttggaaggcatatacttagataacaacaagtttacaggttttcttccatcatccatatccaatatatcaaacctggaagatctccgcctttccacaaatctatttggaggaaaaatacctgcaggcttgggaaaactccaagtccttcatctaatggaactttctgataacaatctccttggcagcataccagagagcattttcagcattccaacgttgacacgttgtatgctatctttcaacaaactagacggggcacttcccactgaaattggcaatgccaagcaacttggatctctgcatctatcagcaaataagcttactgggcatattcctagcaccttgagtaactgtgatagtttggaagaactacacttagatcaaaattttcttaatggaagcatccccacatcattaggaaatatgcaaagcttaacagcagtcaacctgtcttataatgacctatcaggatccataccagattctcttggtagattgcaatctcttgagcaactagatttgtcattcaacaatctggtaggagaagtcccaggcataggggttttcaagaatgcaactgccatacggttaaacagaaatcatgggctttgtaatggggcactggagctggacctacccagatgcgctactatatcttctagtgttattgctgtgaaagtcttcaatcttgacataagaggaacacagaggagctttatatcagaatgtaatgctttaagaaatcttcggcatcgcaacattgtacggattataacagcttgctcaacagttgattcgaaaggaaatgatttcaaggctttaatttatgaattcatgcccagaggtgacctgtatcaagtcctatattcaacctgtgctgatgaaaattcttcaactagccattttggtttggcccaaagggttagcatagtgatggatatagccaatgcattggagtacctgcacaatcataacaaaggaattattgttcattgcgatctgaagcctagcaacattctcttggatgataatatgactgctcatgttcgtgactttggcctttcaaggtttgaaatttattccatgacatcatcttttggttgctcaacttcttcagttgcaatcagtggaaccataggatatgttgctccagaatgcgcagagagtggtcaagtttcaacagccacagatgtttacagctttggtgtcgttctccttgagatattcatccgaaggaggccaacagatgacatgtttaatgatggactgagcatcgcaaaatttgcagagttgaacctccctgatagggtgttgcagattgttgatccccagctgcagcaagatctggagacttgccaagaaaccccgatggccataaaaaagaaactcacagattgcctgctttcagtcctaagtattggtctttcttgtactaaatcatccccgagtgaacgcaacagcatgaaggaggtggctatagagttgcatagaatttgggatgcatatctcagagaaaactaacacttttcctactatcagttatcgaattttttttgtgttaatcaggaggtatatacctctgatactatgatgtatttatatatatacctntnnatncctttctngaaaaaaaaaaaaaaaaaaaaaaaaaaaaaa

SEQ ID NO: 97365 - DNA, 951 bp, Oryza sativa
  Clone ID: PAT_MRT4530_95376C.1
atggatccggtcacggcatcaatacacggtcaccatcttcctccaccgttcaacacccgcgacttccatcaccatctccagcagcagcagcaccagctgcatctcaagaccgaggatgaccaaggcggcggcactccgggtgtcttcggcagccgcggcaccaagcgcgaccacgacgacgacgagaacagtggcaacggccatggaagcggtggtgacggcggtgacctcgcgctggtacccccctcgggtggcgggccggacggcgccgggagcgagagcgccacgcgccgcccgaggggacgcccggcggggtccaagaacaagccgaagccaccgatcatcatcaccagggacagcgccaacacgctccggacgcacgtcatggaggtggccggcggctgcgacatctccgagagcatcaccacgttcgcgcgacgccggcagcgcggggtttgcgtgctcagcggcgccggcaccgtcactaacgtcacgctgcggcagcccgcatcgcagggagcggtcgttgcgctccacggccggttcgagatactctccctctccggctccttcctcccgccgcccgccccgccggaggccacggggctcaccgtctacctggccggaggccagggccaggtcgtgggcggcagcgtcgtcggcgcgctgaccgcggctgggcctgtggtgataatggcggcgtcttttgcgaacgcggtgtacgagcggctgccgttggaggacgacgagctactggcggctcaagggcaagccgacagcgctgggttgctcgccgcggggcagcaagcggcgcagctcgccggcggggccgtcgatccaagcctcttccaaggactaccaccaaacctactcggaaacgtgcagctgccgccggaagccgcctacggatggaaccctggagccggcggtggccgcccggcgccgttctga

SEQ ID NO: 97366 - DNA, 616 bp, Oryza sativa
  Clone ID: PAT_MRT4530_95377C.1
cggcacgaggcttccctgtaatggagagttttattttccttgatttaccaaaatcaagcttagatgaaggtgtaacaaatgggtgttttgggctccataatcattttgttgatgctaaatgctgactactggtgctgcaaatggaagagctcttccagttgatatatgccatttgaggacatgtgctttgtcctcagtataagaacattgggctaacatcattgttggagttgcattgcccttagagtggggaaagcgacacctcttgcaagatagtaacagcaattatatcataaattacaagtcaggccttccaatgtggttttggatgaggcaattgatacactgtcatttgatgctgaattttttgttcgtctgacgactggaaagggggcacctacgacgattagcttagtacttagtgatggtgtatgaagagcattgatagtctcatggcccattgctaacatgtagagaaggattttgagttccttggaagtattgactggaggagtgtgaactacttcgcaaatagatgggtgtaaaatctgggaaagaaaacttaaagagctaaatgttttctaacatattagttgatctgaaggtgctttccaag

SEQ ID NO: 97367 - DNA, 352 bp, Oryza sativa
  unsure (1)..(352): unsure at all n locations
  Clone ID: PAT_MRT4530_95378C.1
taaattattaactatctagaactgtttctgggaacttaagttattacaaaaaactattctaggttaaactaatgttcttagtaggtacactaggaacttgagtattgttagtaggtaatccccttagacanaacctttgcattaatcgtatatttctttctatgtgttacagtcttacatgctacaataccgcgcgctgcgcgagctcactctagtatatataacggactaaatgtttatagaacatgccactctaatgtacagtatagagttaaggccaattatgtaatttctcgttacatatgcataaaagaaccccgagaggtaaaggtggaaaaaaaaaaaaaaaaaa

SEQ ID NO: 97368 - DNA, 119 bp, Oryza sativa
  Clone ID: PAT_MRT4530_95379C.1
ggcttggaggggagcgcgtgcgtgaggtgctcgacgaaatggttgggctggtccggtgcgatgcggtggtttctgggccgtggatcgtaccgattgttcttgggaataagttcatctaa

SEQ ID NO: 97369 - DNA, 514 bp, Oryza sativa
  unsure (1)..(514): unsure at all n locations
  Clone ID: PAT_MRT4530_9537C.1
ggaaaatgggtttaccggtgccccaacaatttccaaaaaggcagcggtgtttaagggggttgtccccaacaggtggacgaccccccccccaattataccccggggtacttataaaacccctcctcccaagaaaaagcggaccgtttcgataacgaaggtcggacagaaagccccaggaacctacaggggaaccgctgatctcattaatgcagatggcacgacagtttaccgacctgaaaagcgggcagaacaagctatgaccatgnnnnnnnnnnnnnnnnnnnnnnnnnnnnnngccgctctcccgctccccattcggcctgccgccgcccactccgcccggaactcgaatcatcactggccgtcgttttacaacgtcgtgactgggaaaaacctgcgttacccacttaatcgccttgagcacatnccctttcntaaaccagccccgacacccgcaaacaaccgtgacgcgcnctgacgggctgtctgctccngcatncgcttacagacagct

SEQ ID NO: 97370 - DNA, 297 bp, Oryza sativa
  Clone ID: PAT_MRT4530_95380C.1
atgggcggatgtgaggtgattcctagcgtagttttgtttgactactgcttggtcgtcatctatcttcagccggacacccgcagcttcccgacgctgtgtgaaatcatctcctccgtgaaatccgacgcagcggcgtgcggccatggcgcgatccatcggcgattcggccacgatgccggcacgatccatcggcgattcggccacgacgcgaggcgcggtggctacaggcaatccggcgacgacggcgtggtggttcatcggccgatcgtcctcctcattgttggtaccaatccttga

SEQ ID NO: 97371 - DNA, 299 bp, Oryza sativa
  Clone ID: PAT_MRT4530_95381C.1
gtgtttttttttggatgggagccaaaaatgagccattacacctcatttggtcaggcaggagggtaaaaaacatcgttgatgcagcggcaaaagatacaccgggcaggcaatcatgagtggagagcatacaaaaaacacgaggcagtaagtgacccagggcaactagagggatacattcgaatccagaagtgcctgtgatacgataagcttggtcaagagcactgcaggatggtattgctcagcttgtacgcgtgtgacaccaagaccagaatgcgtatccttgggtgtctagaacgaca

SEQ ID NO: 97372 - DNA, 462 bp, Oryza sativa
  Clone ID: PAT_MRT4530_95382C.1
aaggtcacaaaatatatttgctagcaaaacatggaaaatcccttgcattattactattgtataatttggctggacaaatcgaaattaatgctgtgtaatagtccttaatgtggtcctgacacagtcataaactaaagggataggatgagttgaggcacagagggggtggaaggcaacaacggagtgcttggagatgtggaggcatgaactgcccgcctttctcgctacacgtgcagcttctccacgcgcggggggggaaccgatctcgatagctcgtacaccaagcttcgcgtgacagacggaacggccagggaggggcagggccctgaatgatccccggacagttgcgggggcccacgcccaagggcaggaacctgaagtccaccttcccggagacggtggagtcaacgccgcttttgttctgcaagaaccggtcaggccggaactccttggggttctcca

SEQ ID NO: 97373 - DNA, 415 bp, Oryza sativa
  Clone ID: PAT_MRT4530_95383C.1
catactgcagcaactaataaacgatggatcgtggcaagctctccttggacatgggggggcgactggcagtggcggcggtgactctgccggcgccgtcatggcagatcttcgacctatttctgcccggcgggcccagtcaccggtcctactgcggaggggctggcaagtgggtgctgatgaaccacaaggagtacgtcgagaagaagtcgctgtacgccatgaaggccgtctgcgacatccgcgggaagaccatcaacacgagcctctatgatgtagatgaggcccaggtgacctaggatggtgagcataacgcactagtccctggagaaaccatcatcaccaattggccaaatgtagttagggcatgctatgccaacaccatgaatgcaaacttattcctgagcgatctcaaccg

SEQ ID NO: 97374 - DNA, 176 bp, Oryza sativa
  Clone ID: PAT_MRT4530_95384C.1
atctggaatcctccgaagtcccgcacatggctttgcatctgccaattgatggatcacaacacaattcggtatatggggtttaaagaagcgcccatctgaagcgcaaaggtatgttgctatcacacatggggatctatgccaaattgggtaatacaccccagcaaatggtgtggtac

SEQ ID NO: 97375 - DNA, 205 bp, Oryza sativa
  Clone ID: PAT_MRT4530_95385C.1
ctgctcccctcgtagcacttcctacccgctcgcgtggtattctggtatttgaacttgtaacacgtatagtagctaccacggacgcacgaaaaatataagtcactgcatcactcgtgtgtgacccaagttgaaacattcggggtgataccacaattctgaattagaaaatgtcaatgccaaattttaaaaaaaaaaaaaaaaaaaa

SEQ ID NO: 97376 - DNA, 2587 bp, Oryza sativa
  Clone ID: PAT_MRT4530_95386C.1
atgagggagaggggagagatgagggaggcgaaggcgcctctgatcgcggaggcggcggagcacatatcccattcccacggctccgggtcgtccggcaccggcagccacaccagcggcggcggcggcgggtggaggggctcgaggcagtaccagcgccgctcggacgccctcgcctacggcaaccggtaccagaaggcggccgccctcgtcgacctcgcagaagatggtgtgggtatccctgaggatgtcttgaatgacacaaggtttgagagggctatgagattctattttgtgtatctccggttggattggctgtggtcacttaacctatttgctttgattcttttgaattttctcgagaagcctctctggtgccggggatattctcaacatgcttgtgatcaaagggatctttactttctggggcagttgccatacttgagcaaaactgaatctctcatatatgaggggctcacacttgttattcttgtaatggatatcttctatccactgtcctatgaaggtttaaacctattctggaagaacacaataaataaactgaaggttcttcttctcttcatcttagcatgtgacatactggtgtttgcatttagtccccaacctttcagagtagctccttacatccgtgttgcgtttctaataatgaatatcagatgtattaactgttccttttgtgacagggaactgcgaatgtgtgctgttacactggttggtatggttgggacataccttaatgttttggccctttcactattgttcctcttattcgcaagctggctagcttatgtaacatttgaggatacaccacaaggaaagactgttttctcgtcatatggtaccacgttatatcagatgtttattctcttcaccacctccaataatcctgatgtatgggttcctgcttataagagctctcgttggtcctcactattttttattgtctacgtacttttgggagtttacttcctaacaaatttaattcttgctgtcatttatgatagctttaaggagcagctagcaaagcaagtttctcaggcagactgtacaaggaaaagtatactagagaaggcatttggtatcattgatgctactggtcagggttatctcaacaaagaacagtgcctatcattactagatgagctcaacaaatacagatcgttacctaaaacctcaagggaagattttgaattaatttttgccgagcttgatcagagtggtgattttaaggttacctctgaagaatttgctacactgtgcaataccattgcaataaaattccagaaagaaccacctccatcctatctcgagaagtatccatctttctatcattcagcactgtgtgaatggttgaaatcttttgtgcggagcccactgtttgagtatattgttatttttgttcttctgatgaatctagtcgctgtcattattgaaacaacgctggatatagaaaacagctcctcgcagaaagtgtggcaagaagttgagtttgtctttggatggatttacgttatagagatggcactcaaaatattttcattaggatttggtgcctactggatggaaggtcaaaacaagtttgattttgtgcttacttggactatatttattggagagactctaacatttgccttcccatcgaagctttcttttcttttcaatggagaatgctatcttctttttaacttcaatgactatccaagtggtatggtaactctgttcaatttgttagtgatgggcaattggcaagcttggatggagagctacaggcaattgactggaagttattggagcctgatttattttgtcagcttttacctcatttcagtattactgctgcttaatctgattgtagcatttgtgttggaggcattttttgctgagatggaactggagaaagatggcgaagctgatatccaggatcctactttggaaggaagaaacaggcggcgatctgtgcgtgtgaggacaaaggggaccatggttgatattcttcttcaccatatgttgagcaatgaacttgatggatctcaaaaccgtgaccaatagcttatcttcatggccctgcaggaagaaagcaagaacagaaaaaaaaaaggaaatgattagagccggttctcgagcatggagttatgttttgttatgtcaggtactcaggtgcaaaggaatcttggtgaggtgatggaaaggactctgcttgtcatactttagttgtcaaggagaacagcagatgtgttctctttctgctccaaaggagaccttaaaggagcttttttttaaaagtaaatattgtaggagattctcctacagtgcatatatatttatacaaaggagctctttttgtataggattaaaacctgctaatggttctggtgattttcttttttgaaaactttacaggttattatagccataatactccacatttccttattgttatactatatacacgttataagttttgatattttctctcatccttcaataggtatatacctccccatatctgagataaaaaaaaaaaaaaaaaaaaactcgagactagttctctctctctctctccctcgtg

SEQ ID NO: 97377 - DNA, 223 bp, Oryza sativa
  Clone ID: PAT_MRT4530_95387C.1
ataactacaccagcacaacccagcgaatgatatttaatccttataaacttctaaatcaattccaaccatttttatacatccctaccactacatatatctcatcctctaataataaattaataacattaattaaaacacctatacaaaaatttatcccacaattaaataaatcatatttttaatattacattcaaaaaattcagccctacaaaattactaattc

SEQ ID NO: 97378 - DNA, 828 bp, Oryza sativa
  Clone ID: PAT_MRT4530_95388C.1
ccttcgcaaaccaaaacggaggggttgaacaagtttgcaagattccggctaaaccgaaagaggcggcaccctaagttggaggccgttcaggtctaactccggcgggcgggaccggaagctccgggggcgtcggcgtaaaaaaagagctaccatcgcgaagctcgaattccggcgaagaaggaagggcggctaaaaggccgtaaacgcacggaagtaggtgcggggagggtttaaatcgggttggaagggggagagagcggccggaggggaaggaaaccggcgcgggaggtcggccgccatcaatggcgccggcgagatttgcgggggcaaatccgcccgtttgaacgcaagagagagaaggaaaaatggggggaaagggagaggggatcacggggactgatttcccccactttattgcacgtggggacggcgggatgtggcagatttggcggcggcgacggcgcttggcgcgggcggggcggcgggagcggcgggaggaaggggatgacgggtgggccccacccatcatgagtatgtggttagtattggctggtggtaggtttgggtagtataatacctagggtttcattatatttaagccgattgctaggatcacacatagcccgagagctaactgtgcggcgtgctgtggaggttgagggaatagtgaagctccgaccgctgtacgcatcgaggcatagggtgccaggagcagcacttcgaccttaggtttggttttgccgggctttacaaccaacggttcgacgtcggggatagtaaaccgcggacgtccctatggaaggcgtaaagttccaatcggcggctttt

SEQ ID NO: 97379 - DNA, 2893 bp, Oryza sativa
  Clone ID: PAT_MRT4530_95389C.1
agaaacttgaacgcctgatttgggggatcactttattaacaacctgaatcagttgaacttctaagggggatctaggacgcacttgcatttgattaccttatacgaatgaatatcattttacaataatacctactacaacacgatcaaaattttgttacctcgcgatccacacacaacactattctactatccttgaaaacttaacagagccttcgtccacaaggctggtttgctttctcttcttggatagcctctggaaaccactctgttcatcaacaaactgagcagcggtcctcgctcgtagttcttcaagagtctctccttccttagctcgctcgatcaccaaatgtcgcccgtagagatgagtgctcgcaagtgcttggagagcgttctgcgcctcttgctttgtgacgaattcaacaaatgcgaaacccctgtgactcccaaacttcataggcagtctgaggcttttgatctggccaaatgggctaaataattgccgcaagtccttttcagttgcttcaaatgctacattccgcacgaggagttttgttgaactcttatccttttcatttttcttagtctgaccatcttttctcccatgacacagttgcaagatcaaagcatgtccatccaaaaccgttccctgtagatccttgcagacactggttgcagtttcaactgagtcgaactcaacaaagccaaatcccatcgaaacattcttgccattcttaatgtgcttcttaaccgttgcacttttaagacttccactcttcaattttgtgctgaaatgctgcttcaaggattcatccgatgtcttgaaattcaaattcttgacaaatacagatcgcgactccaccctgtcaggatcaatctcttcagcactcactccttccacagtttgctctacaattgctttagtaacaatcctgtcaccaacaacatccttctcatcatcttccacaggtgctgaggtgggagataaaatattttcaggtgcccactccaaatacagtggagtatccttgtatcttgtgtacagtaactttttgaaagcatgccgagcttctgtcgcttcaacaaaaactaccaaggcaaacactctggttggagggaggatgattttatccaggcttccatgtttgcgaaacattgtggcaagatcttcctcacaagaactatatggcaagttctttaccaatatcacatggttgcttcttttaaacttctcatttcttttggaagcaagctcttccagtgcagcaacattaactccagaccttgataaatatttcttggtctctgcaatgacatgtgtctcaccaagagcaatacgaacagcaaggtcatctgcttctctatcaagtaattcacttttactgattccattcttccttgctatgttttcagcaacagtatcttggcgcatataaaagctgttccaagctctcgtatccccactgatttcagaagctttcctctgatccaacttttgttgtttgagactcattttcttctcttcgtaactagattcaatctttttattatttagtggcttagcagccttaacacgcaaaagtcgcccctgaaaacttgagttgtccaattcaagtgccctgactgctgagtctggaaggctaaagagcacataacctcttccagttgatagctttgtggttttatcaacgacaatacgtgcttgatcaacatcaccatattggctacacagctccactaaatcaccttcagtagttgcatatggaagattgcagaaaaataaacggccagtctccagtgccaacttcttctcgtcagtaattaaagcagcttcttcatcttccttttcttgattgtcatcttcttttagttggctgtcaagattttcaacctctttgttgtcagagtttcccgcctcttgcacagtagagccttccagagtcatttccttatctacattttttttcaagttcagactatccttctgatgagctatttcatccttttcatctgcatcgtgtgattcatcagatgagtcttcatcatcagtgctgtggtccgattgatcaccagaatcttcgctatcagattctgaatctgaccaatttttcttgattttactcttaaagaagtccatatctgtcatatctttgccttgtttactttctatttttagctcttctgaagcctcttctgaggaggaatcatcagattctgactgatcattcgccatttcctcatcagaagaatctccagaagatgagtcattctcagaaactggaacattcttctgaggtttctcaggcttttcactaactaccatgctatccttggcagaagcatcaagggtacccatcgtatcattagcccacatctttgcttttgagcggggctgcataacctcaagaaactcttggaacttgggatcactagcggcactgcctttagaacctcccacatcatcagatactttttggcccttggaacttttgagtggtgcactaacatctccagtcttagtcttgtctttgctattatattcaggcttctttaaagaatgacggctccaagggcgaggagcttcaggatcaccaatcttacgagcaacctcgcaggtgatcttacaagtgtcgatgtatgtgttgttgaaatacttgagtgcttcctctgcctcctcgttagttctgaaaccaacgaatgcaaattgcctgctctttccatccttggtgcggatgaccttggcgtcggtgacctcccccttccgcgagaacacctcccgcagccgcccctcgtcggcgcccttgggcaggttcttcacgcacagccgcgacgacatgggctggatcagccagccaatgggcctcgtcgcggccggcgagaggagaaattttctcat

SEQ ID NO: 97380 - DNA, 270 bp, Oryza sativa
  Clone ID: PAT_MRT4530_9538C.1
atgaagttaagcacgaaacgacccccgtacaaccgcacttctcgtatggacttctctttcccgggagcaccagaactcctcacactgctagaaacttgtacgcctagagtgcatgaggatgcaaaagttcatggagcgggtactgccaatgcgaggttatcgaaaagctttgccgtgacgtgtctcatgtgttaagacaaggctcatgtgttgggcagtcacggagtgtgggtaaagtgtacatccactgcagtgtgagtaaaccaaatc

SEQ ID NO: 97381 - DNA, 609 bp, Oryza sativa
  Clone ID: PAT_MRT4530_95390C.1
atgggtgcgtacgcagctctgacgccggttgttagcaagatcttctgcagcagctcgcaagccgtgctgatggtgcgccgccgccctcccacggtgaacggcggcgggttcgtcgtcaccgaccgtgatcagagggtcgtcttcagcgtcgacggctgcgggatcatcggtgctagcggccagctgatcgtcagggacggtgatggcactgccatcctcttcatccacaagaagggaggagttgttcaagtgttgagcattaacaattggtggaagggatatctcatggactatggtgaacccagcaagctggttttcagctttcaagatcctaagccggtgctctgcatgaacggcgatgtcagggtcgctgttgagccaaagggaagaaagaggcactgggattatgaggtgatcgggtcattttctcagagagcttgcactgtcaggagccgagcaggccatgtcgtagcacagattggagtgaaagggatgctggctggtaaggacttctaccatgtggtggtgcagccaggttatgaccaggcgtttgtggttggtgtaattgccattcttgacaacatccatggggaatcgacaaggtgttaa

SEQ ID NO: 97382 - DNA, 496 bp, Oryza sativa
  Clone ID: PAT_MRT4530_95391C.1
cgaagagaagaaaatgagtctcaaacaacaaaagttggatcagaggaaagcttctgaaatcagtggggatacgagagcttggaacagcttttatatgcgccaagatactgtatgttaatgtttgataccttgatgtggatttactgcattttgcttgtgttcaacgttttttcattgacatggttgctgaaaacatagcaaggaagaatggaatcagtaaaagtgaattacttgatagagaagcagatgaccttgctgttcgtattgctcttggtgagacacatgtcattgcagagaccaagaaatatttatcaaggtctggagttaatgttgctgcactggaagagcttgcttccaaaagaaatgagaagtttaaaagaagcaaccatgtgatattggtaaagaacttgccatatagttcttgtgaggaagatcttgccacaatgtttcgcaaacatggaagcctggataaaatcatcctccctccaaccagagt

SEQ ID NO: 97383 - DNA, 616 bp, Oryza sativa
  Clone ID: PAT_MRT4530_95392C.1
ggtgtgttcccctctctcctggttttgtaattagaagttgtttataagtagaaggttggctgtaccgcaccctttgtccagtgcgttttgagcctctctgtgcattctttctctccatcttaatacccagcgacatatgtaaggcacagatgatttcttattgccttctagctgaaaaatatgttgtcttaagatatctgaagcacttgtgtttcagtcgaaatgtagcagcaagtactgcagcagaaaatattgccatattggatggcaccggattaaaagctaacacaccaggaactctgcgagacgaggaccagttcttgactatatggttgggagctggtttcttcgacttgtttgtttttaattatattttttctgattaaatcattgcagaaaaaggtgtgtgacaaacctttctatacgcagtgagtggtgtggactgatagatgtaccataaatcatgcaaaatttatgcgcatttcgacttgcgaggcctagagtggttccattatcttaaaaatggtagaattttttaagcctatatttgaaaatatagagtagcatattcatggcagtataactgtgagtatgctggcaagctgatcaaatagaa

SEQ ID NO: 97384 - DNA, 1677 bp, Oryza sativa
  Clone ID: PAT_MRT4530_95393C.1
tatagggaatttggccctccgaggccaagtattcggtacgagggataacgtgttaagttaattatttagtgtagtaaacaatgcatgggatcaaggatagatagagtgatgtaaagggtagtgttacccacattctttacatcaacatgaggtgcgcgtagccattacgacaagaattacagcaacagagaaataatctcagctagaactggaaggaactggtgtggcaatattgcagctgctatccgcgacgtgagaaacaagctgctgtataaagtcgtcgatgtacctctcatggagttccttgtcagtgacaatcttttgcatcctgagggcgtttgctacgaacaccctcctggtttcttcctccaccatgacggcccggaccgcggctgcgacgccatggcggtcgaacgacccgtccgtgtcatcccgcctcacctgcaaccctaccttgttaccctccatgagccgcgcgttcggcccttggtccgtgaagatgggcaacatgatgagagggttcccaaacatgagcccctcgacgagcgagttgcggccgcagtgcgtcaagaacgcgcccaccgcggcgtgcgccagtatggcgatctgcggtacccaccccatggcgacatgtccatggccgttcgtccgttcccggtaacccggagggagcacgtcgtcggcggcatccacgccggcgtgcttcctcagcgcccacagaaaccgtgtcccggcgagctccagcccgagagccagctcgtgcacctgctccagtcgcagcggcacctcgctccccagcgccacgtacaccaccgacttcgccggctgcgcgtccagccactgcatagtggagttgtccgtcgacatgctgccagcacggcggcggcctccgtcgggcgacggcggcacgaggccgagggggatgagcggcttgttcttcttcttcaggcccgccgccacctgctggaacgcctcgggctcccactccgggcagctccgcatggccgccaccgtgcacctctccatcgccaaggagcagcgcttcatgatggacatgcccgacgcgccatcggcgacgaaaagagctgccttctgctcccactcgtagcatggcatgtccatccggcgttcttctacggcgccgagcacctcgaacatggaggcgccggctggctccgacgaccggatggcccatccgaccatcatggaggcgctcgggagaagcatcgcgcatggcaccttgtgctgtagcgcgacgaggggcgcccagtggtggaacgtgtcggcgatgatccaatcaggcctcctctcgccgtcgccggcgtcgcggcacgccgcgcccaagaactccgcgaacggcgcggcgagggcgtcgaaggccttccagaggaggtcgaacttgccggaggggacatcgttggtgcactcggcgccgtcggggaggccgtcgacgcgcgggagcggcagcgccacgaggtcgacgcgcgccgcggcggcggggcgcaccggcgggaggcgcgcgatgttgcgcggcgtggagacgaaggacacgcggtggccgcgcgacgccacgcgctccgcgagctcgaggtaagggagcaggtggccgaacgcgagccatgggaagatcacaaggtgcagcggccccgacgacgaggatttggagccggcatccat

SEQ ID NO: 97385 - DNA, 330 bp, Oryza sativa
  Clone ID: PAT_MRT4530_95394C.1
atgggtggcaagcgggccgccattgacgacgggaggaggagaacaaaggccggagcagctgggctcgatgggcggtgggtggtgggatccggcggccccgtgcaaggacttgccgactactcgactttctccacggttccaccaccttcagccgccagtacatcattatgcagttattcatgctccaccggtccacggacggagcagcacagattgacaactacaccttctaactcactggtcaccatagtgttcacggagttgctcatcgcgctcaagcgctacattgctccaccgcgacaggacgtgcctcaatgtagcaatgcgtag

SEQ ID NO: 97386 - DNA, 439 bp, Oryza sativa
  Clone ID: PAT_MRT4530_95395C.1
gggaccacaacaaaaaaaggggtttcaaaaaattggttgacccccccccaaattaagggtttacaaggggactctcaattttttgagggggaaaaaccaaaattgggggggcgcaaaagtcaaagttcggaaccatcaaaatcagggggtggaaaaacctaacatcctgaaaattaacctgaggccctgggggaacctcaaaaaaaaaaaatgggggggggggccaaaaaaaaaattcaattaaccaaaggtggcattggaaaagaatgttttttgaataaaccaactttatgaaagggggggtccaagatggaaggaacccccctttatggaacaaaggtttaaaaaaacaaagcccaaattggaaaaaattaaacctgaaaaaaaaccggcttaaaaggggatgccctaaaactttaacccgaccaggaataaaggg

SEQ ID NO: 97387 - DNA, 582 bp, Oryza sativa
  unsure (1)..(582): unsure at all n locations
  Clone ID: PAT_MRT4530_95396C.1
gccacagctccgtcatcgaggggctcggttcggccatcctctcgtcatgctgccactgttcctcgaccagttcacgaacgcgagctacttggaaggggcgagaggggttggggttcaggtggccacgggatggcgagcacggcagcgccttcgaccgggacggcgtcgccgcagccgtccggccccgtggtggatgaagagagcaagaaggcgctcgccgccaacgccgggaagatgggggaggtggtggccgacacggagtgtcacgagaggtgcatcgacgctttcattcagcagctcaggtcctatacaacgacaaggactggttattagtacgtacctccattggacacatcatccctgcctaagattcgcatgtgttttattcagtgcttgccaagtttgctatattacaaggaaaatgcctcaaatcaggagcccgatgttggcaacccaaacctccttnacccntccattcttcgggcgccatcctcaccacgtgttcctgcgccgttcctgccacgtgtttccaaccactgaggccgttgtaataaaccgcctttgtaaagtgaatccttttta

SEQ ID NO: 97388 - DNA, 241 bp, Oryza sativa
  Clone ID: PAT_MRT4530_95397C.1
gaacacaagcataaagaatccttactgtattaaaagaactagggcttaccataccatcaaaaggatgcttttacacgacaatctaaagtttcacgatgctagatttgatccatatgagcactagaataacacctcctaagatataaaccctattaccttcatgggcgaggtcttctacgataaacgtatttaatatctactcccatagtacatcagttgagctccatcaaaatatgatggt

SEQ ID NO: 97389 - DNA, 1562 bp, Oryza sativa
  Clone ID: PAT_MRT4530_95398C.1
tagaactagtggatccccgggctgcaggctgctctctctgtttttttttggtcaaccccaacccaagcaaagcagccgcatatctctccattaatcacctaccaaaaaaaaacaaattattttgtttttaaagatcatttccaacaagaacaccataccaatccttggtcaaattctgctagtatttatcctcctagagagggacatggggagaggaggagtggatccacgatgatgacgaggagcatgatgaagtttttctctccctcctcctccgctatttataccaccctctcctctcgtctcgccaggatcaacgccactcgccacacaccgccaccaccaccaaagagcagcagagcagcaagatcactaacctctttcttgctgattcgagcaaccatgtcttcttcgtcttcgtcgtcggatgctgtcgccgcggcggcggcggcgacttttgagaagccgaggacggtggtgaagaagctcctggcggagtcccagcccgagggcgacggcgccaccgtgcgaaggagcatcggcaggtacgagctcaggaacctggatcctttcctcatgctcgatgaattctctgtttccaagcctgctggatttcccgaccatccgcatagaggattcgagacagtcacctacatgctcgaaggggcgttcacccaccaagactttgcaggccacaagggcaccatcggcacgggagatgtccagtggatgacggctggccgcggcatcgtgcactcggagatgccggcagcggacggtgtgcagaagggcctccagctctggatcaacctctcttccaaggacaaaatgattgagccgaggtaccaggagcttatgagcaaggacatcagctgcgccgagaaggacggcgtggaggtgaagatcatcgccggcgaggccttcggggtgcgttcgccggtgtacacgcggacgccgacgatgtacatggacttcacgatgcagccggggtcgcagctgcaccagcccatcccggaggcctggaacgccttcgtctacatcatcgacggcgagggcgtgttcgggagggagaaggcgtcgccggcgaccgcccaccactgcctcgttctcggccccggcgacggcctgagcgtctggaataagtccggcgagccgctccggttcgcgctcgtcggcgggcagccgctcaacgagcccgtggtgcagcatggccccttcgtgatgaacacccgcgccgagatccagcaggccatggaggattactactatggcaggaatggcttcgagaaggcccgccattggagctccacagcatgatttcatcatcctcccttcataccatgacacaccatcaccatacataatgctgctgagctgaacatgatgctgtttttaggcatattagtatatcatttgattcagtaataataaataggtttattgtcataaatttttccttgattggctgtgtaataaaacgatatctgtgcaatgaaaatggtagtaatatgattggattttaaatggagctgcacaacagattatgcaaaaaaaaaaaaaaa

SEQ ID NO: 97390 - DNA, 966 bp, Oryza sativa
  Clone ID: PAT_MRT4530_95399C.1
atgtcttcttcgtcttcgtcgtcggatgctgtcgccgcggcggcggcggcgacttttgagaagccgaggacggtggtgaagaagctcctggcggagtcccagcccgagggcgacggcgccaccgtgcgaaggagcatcggcaggtacgagctcaggaacctggatcctttcctcatgctcgatgaattctctgtttccaagcctgctggatttcccgaccatccgcatagaggattcgagacagtcacctacatgctcgaagtacggatgactaaacttcttgtagttccatttcatcttttctttatgcccggggcgttcacccaccaagactttgcaggccacaagggcaccatcggcacgggagatgtccagtggatgacggctggccgcggcatcgtgcactcggagatgccggcagcggacggtgtgcagaagggcctccagctctggatcaacctctcttccaaggacaaaatgattgagccgaggtaccaggagcttatgagcaaggacatcagctgcgccgagaaggacggcgtggaggtgaagatcatcgccggcgaggccttcggggtgcgttcgccggtgtacacgcggacgccgacgatgtacatggacttcacgatgcagccggggtcgcagctgcaccagcccatcccggaggcctggaacgccttcgtctacatcatcgacggcgagggcgtgttcgggagggagaaggcgtcgccggcgaccgcccaccactgcctcgttctcggccccggcgacggcctgagcgtctggaataagtccggcgagccgctccggttcgcgctcgtcggcgggcagccgctcaacgagcccgtggtgcagcatggccccttcgtgatgaacacccgcgccgagatccagcaggccatggaggattactactatggcaggaatggcttcgagaaggcccgccattggagctccacagcatga

SEQ ID NO: 97391 - DNA, 305 bp, Oryza sativa
  Clone ID: PAT_MRT4530_9539C.1
atgaagttaagcatgaaacgaccccgtacaaccacacttctcgaatggatctttccttctcgggtgcgccagaactcctctcactgctagaaactgtgtacgcctagagtgcatgaggatgcaaagttcatggagcgggtactaccaatgcgaggttatcgaaaagctttgccgtgacgtgtctcatgtgttgagacaaggctcatgtgttgggtagtcacggagtgtgggtaaagtgtacatccactgcagtgtgagtaaaccaaaaaaagattgcaaaatgatttttcattctaaaattaacg

SEQ ID NO: 97392 - DNA, 341 bp, Oryza sativa
  Clone ID: PAT_MRT4530_953C.1
gatttgaagggcaatggcaagtggcacaagccgagggcagcattttgcatagataagaatgacaagactattatactcaaatggtttcaagatctgaagttccctgatgggtacattgggagacttagaaaaaaggttagaaataaagctcgtgttgagggatccattgttgaagcttatctagtggaggaaaacacaaatttcctctcactttatttcagccacaattaccctggtcggtgttttaatcgtcgcacatgtcgtgatctaacagtggaggagtacaaggctgctttcttgtatattcttactaatatttctgagatggacactttgtttga

SEQ ID NO: 97393 - DNA, 267 bp, Oryza sativa
  Clone ID: PAT_MRT4530_95400C.1
atggcggcggcgacggaggagccacgagaggaggacggcgaacacggccctgagtaccatccccctcctcggcacgtaccgcggcgcgacgacccggcgtgccggcggctgcggcggagccatggcaagcagtggcggcgcagcgcgcggtgcagctggacgtcgacggcgagtgtaggtgtatccatcagctcgcaggatatggcgtgtaggacctgtgtttatggtccacttactcattccgacgctgacagtgagatcgagtga

SEQ ID NO: 97394 - DNA, 163 bp, Oryza sativa
  Clone ID: PAT_MRT4530_95401C.1
accccacaaattaagagcacagaaacttaggggatttctaaaaacacaggattaggctttcctttcttcattcaaccaatcccttgaagtaatacattctgtcaaaacgacaaaatcaatgtttaacttcaaatatttacacatttcaatttggcgtttacac

SEQ ID NO: 97395 - DNA, 228 bp, Oryza sativa
  Clone ID: PAT_MRT4530_95402C.1
atgatgcgccggtttgagggtcctgaggaagatcctgtagtgggcgtagacttcagcttgcacatggagtatcaccggacagtcctcgagagtgttgggattgtcgatgttccattctccatcggagtgggaggaattgtcggcggggcgtcgtttctctcagttgtcgccgtacctttctcgctcccaatgatgatcgggccagtagagattggtgtaacggtgtag

SEQ ID NO: 97396 - DNA, 319 bp, Oryza sativa
  Clone ID: PAT_MRT4530_95403C.1
ggatccccgtggctgcaggaattcggcacgagggctgccatttccagaggatttcttgtggttctataggtgaggttggaggcgcagcttcgtcgtcgtctgatgtgcgccatggctgtgctggcggcgatggcgtcgtcccagctcgcgcgccgcgcggcgaggatgctgctttcgtctcagcatcgccgtcactgcgccgtgcccgcctgtccctggctcctggtgctcggcgccgccggttcttgcgccgtctccggtggcttgcgtgcggcggcgtggagatcgtcggggattctgctccgtccggcgtttcacc

SEQ ID NO: 97397 - DNA, 2944 bp, Oryza sativa
  Clone ID: PAT_MRT4530_95404C.1
atggcgctccggggcttcctctccgatccctccgagctccgcgagctccttttcgcctccgccgtcgcggtccgcggcgccatcgcgcacgcctacctcgtgttcgaccaaataccccgcccggaccgcttcatgtacaacaccctcatccgcggcgccgcccacacggccgcgccccgggacgctgtctccctgtacacgcgcatgctgcggcgcggcggcggcggcggcgtgaggcccgacaagctcacgttcccgttcgtgctccgcgcttgcaccgccatgggcgcgggggacaccggggttcaggtgcacgcccacgttgtgaaggctggctgcgagtccgacgcgttcgtcaagaacgcgctcattggcatgcacgcgagctgcgggaatttgggcattgcggctgctctgttcgatggcagagctcgtgaggatgccgtggcttggtcggcgatgatcacggggtgtgcaaggcgaggggacattggtgctgcacgggacctgttcgacgaatgtcctgtgaaggacctcgtgtcctggaatgtgatgatcaccgcgtatgcgaagcggggagatatggcattggcaagggagctattcgaccaggtacccgagcgagatgtcgtgtcctggaacgtgatgatttctgggtatgtgagatgtggctcgcatttgcatgcactggagttgtttgagcagatgcagcgcatgggtgaaaagccagatattgtcacaatgctcagcttgctgtcagcttgtgctgactctggtgatctggacgttggccagaggctgcattcctctctttcagatatgttttcaagaaatgggtttccagttgttctaggaaatgcactgattgacatgtatgcaaaatgtgggagcatgaaaagtgcacatgaggtgttctggtcaatgcgagacaaggacgtctcaacttggaactcaattgtaggaggactggcactgcatgggcatgtcctggaatccatagatatgtttgagaagatgctgaaggggaaggtcaggccagatgagatcacctttgttgctgtccttatcgcctgcagccacggcgggatggttgacaagggacgtgaattcttcaacttgatgcagcataagtacagggttgaacccaatatcaagcactacggttgcatggtggacatgctgggtcgtgctgggctactaaaagaagcatttgagttcattgatacgatgaaatgtgagcctaattctgtcatttggagaacactactttcggcttgtagggttcatggtgagatcgaactggctaaacatgcaaataggcaactgctaaaggcaaggaatgatgaaagcggtgattatgttctcctctcaaacatctatgcatctgttggagaatggtttgggtcagagaaaatgagaaagttaatggatgacagtggtgtcaacaaagaagcagactcagagaggttgcatcacaggctattgtttggatttctagtcaagcagataaacatcagcccaagctgcataagctacataaaggaatacaatccgaaaaagagcaagagcataaaaggatatgcattgcgtgacaaataccatgacttaaacgacacgtcgacccaacaagcgacaagctctgcgaaaaatatcagcaatgtcaaccttggaaggttgatgggaaaccagtccctggtttctgtgggaaaaaagaagtatgctgttgaaggatggcaatggcttctgctctgacgaactgttgggctatttctcgttcatctcagcgtggatccaagaataatagttctgatggttccttcatggtgccagctcggaaccacaatcggatcaacagaaagcacctcttgctccgagaaaaggatgcttcaactggttggcagatcaccaaagctgcaacagaaaattccaccaatgctgttcacaccccaatgaagactaaatggtgggaaaagaacatgaaatcctgcaacatgaaaaacattgaatcacaagacgattttgacaagcagctcctgttggccagcgataagctcaccgtggtgcacttcttttcccctatttgtggagcttgcaaggccctacacccttaggtatgtcaatttggctggcatgcatccggaactgcagtttcttatggtcaactccaatgaacaaaaggagatgtgccgcaggctcaatgttcatgtattgccaatgttccgcttttacagaggtgcagaaggccgtatctgtagcttcagctgtacaatttcaactatttataagatcaaagatgcattgaaaaggcatggggttcagctagagaatcttggaccagataagggcttggagaaatcagaacttcagaactctgatattgacgcttcatataacatggatggaggtgtgggtgctgtcgtgcccaacaatgaataggcatcaattttatgatgcaaattgcacaatttggtgctttataatttggatgtatgtttatagaagccaagagtctgattgtgggtgtgataatcttgaatattggcgcccatagatgctcataaaaatcctatatattaaaaggataaggcaatgcgccagtgtgtctctagttttgtaacattgaagcattttaagcttcttgtattccgcttacttttttcataataaatcgtactggtgtggattacttttttcataataaaaaaaaaaaaagtggagtcagtgcatctttcatggcaactcaagtgagctccagtgtgtctttcatggctagaagaagtgtctgcgcaagcacaactagtagtaacactgattgaaaaaaaattaatgagaagttgagtgcacactctatattgggttattcaagaaagcaatcgattacacaggctctaattgaagagaaaagtcgcaggggtgaatcacctctgatttgcggacgcgtggg

SEQ ID NO: 97398 - DNA, 1232 bp, Oryza sativa
  Clone ID: PAT_MRT4530_95405C.1
tggctcatggcggggatcaaatccctggtagcggtgaaacgcttgccagtcagcttgctattgttgcatcatagtgttgaaatttgcgagctgtgcaccaacagactgctgccattcccatgactgtaccacatcatcctccaaggtatgttgcatgttccttgcctgcagttcaagtgtatccgtcccccggatgagttctcccaaatcccttcgagaggagactgagcaatgcatccaagaggatggaggtagaccacttgaactgaaggagcgcgagtatccccagtgcagctcctacggctcatgccaccggctgtcgctggcactctgccaggacgaacctccgccgtcatgttgccggaattgggtccaaccaagggcatgcgcggtcgggtcccaactgtctccatacatctgcactggtggtgaagaggaagacgcctcttggggtgcttttctccccatacgccgtgttatcctgcgtgggacatcacgaggcaactccgcttggagagaaatggttagttctcggcagttatacaaatgaaactccgggttaggtaacggaatttcatttgtatagccgggaaacaaaatcatttggaccatgtttgagtgcgtggccttgaaccagataggcctcatcaacataagagccggtaacaagaatactagatacttgcatattaagcatagtcccaactcttcatgctaaacgagtcaccaaagaaatacactcaacaggaccagacaacttcacattttctaaccattgcttgatcatgggttgaatgggtgaaacgttgattttttttctaaccatggcatacaagaggactagttcgcgctatctggatatcagctctaagaaacgatgtgaaaccaagcaacttatgcaacagcctcaaggtaggattatggatgtcattagttctaggctttctataggatgagagacccgaaatactttgccaaaacatacgcttgttaaaatcaggaaatgcgttcctgaaattaattttgcatgttttgtcaaagcctagatgcaagctaaggtccttccaaaaaaggtgatattccttgcggaataaccggaaagtaacaccatcgcctacctctagcatggcacataaaaactgcacggttcgaagccaggaacccggctcgtctacacatgaaatttatcccaacctatagcacgccaaaaagtaatgaagctcagcatctat

SEQ ID NO: 97399 - DNA, 300 bp, Oryza sativa
  Clone ID: PAT_MRT4530_95406C.1
atggaggccggtgggcggagcagcggtaggcgagcatggcaatggtcgacgggcggagaggtggtgggtgagcgcggcagcgacgtgctgcggcgggagagcacggcagtggagcggtggtgctacgccgacaagctcaccatggaggaaggcgtcctgcacgggtctcctctgtgcccctaccgctgccaccccactccgcccgttgcttgcttcgtcccattgacctgctccggccgttgccactccgcctgcctgcctcgtgcgtggccgatccgccccgcgctgccctgctcctag

SEQ ID NO: 97400 - DNA, 192 bp, Oryza sativa
  Clone ID: PAT_MRT4530_95407C.1
atggctcgggcgcagacaggatttttcgccacccctatggcatacgcacatatacaagtggcggcgcccgcccccgcccccgccgccccctggagtcctttggtggcgcagaagtctactggagaggtggagcacttcaaggacttgctgcgtgccagaatcaaggagttggacgagaaaggaacaagctga

SEQ ID NO: 97401 - DNA, 488 bp, Oryza sativa
  Clone ID: PAT_MRT4530_95408C.1
ctgtgctcccggacgtctgttgctttggttttccacagtcaatcaaccacctttggagaccaagctctcgcagcagcgcccagttgcagcaccaagactccttccctaaaaggtccccactccctttttcaaaacaatcagcaaagatgtcttgcacagcaggaggacagatgtacaacgagaccctgatggaggtggagcacacccctcccgtccacaagcgcatcctggacatcatgcctggtgtgtctggtggtgttgcccgcatcatggtgggccagccctttgacaccatcaagacacgcctgcaggtgctgggcaagggcacaatcggtgctgccggcatgcccccagagatggtctacacaagcggcatggactgcgtcaggaagatgttcaaggctgagggccccttctccctgtacaagggcacttgttgcccccctgctgggcaacatggtgctgctgggcaattcactttcccacat

SEQ ID NO: 97402 - DNA, 351 bp, Oryza sativa
  unsure (1)..(351): unsure at all n locations
  Clone ID: PAT_MRT4530_95409C.1
gcatagttgggcaacccccctgtctgggcaacnncagctacgtttcaattgggataaacagacgcaagtcatggccagcaaccagtgttnngccaacagctcagggctggnntagcgcaacaaatctcacttannncaggccattagtnanngcgttcagggcgtattgttgtcagcaactacagcnntgcagcagggtcggtgtgtgtggtgacttgtgatcagacnntcaagctcaagnnctcaagctttgcgtggcgctgtaaagctgtgccactccatatgtggtactctacnncctaactactacnnattgctccgagggagcannttcccaccgttggtgggtgt

SEQ ID NO: 97403 - DNA, 425 bp, Oryza sativa
  Clone ID: PAT_MRT4530_9540C.1
aaaaacacgtaagacacatttatattatccatagcaccacatgtcacatatgatgcattttgtgctaattgttcactttcgaacctctctaccgattataactgattacaacgacacccacaacaccggcaagggtgctgatggcaccattggccctatggtacctaccatatatacatggcaccttaaacgccaccaagcttgaacttgagccttattccccgcaacctgaagatcacccaactgctcctatagtaagtgctgttctatgtcctgaacaatattaatgtacttgggacccgtgggaaaacccatgacattcaaaccggcaccctgcatgcgtaccagctgcatatatagtgaggcctgttagacctaatgagagacctggctaaaattgattgctgtgcgaaaactgtatgctt

SEQ ID NO: 97404 - DNA, 176 bp, Oryza sativa
  Clone ID: PAT_MRT4530_95410C.1
aggaattcggcacgaggccccccttttttttttttttttttttttttttttttcacaaaacttacatgccattttatatatgacataaatgttattttacaaattagcatgagtgaaggcccctgaatactaatctacacaagacaataccttggtaatagcagagaaaaggggaa

SEQ ID NO: 97405 - DNA, 388 bp, Oryza sativa
  Clone ID: PAT_MRT4530_95411C.1
acgaaatagaaaaaaagatgtctctcatatttaaattatgaaaaaaaaaaaaaaaaaaaatatatattttaaaaaaaaaatttttaaaaaaaaaattatttaaaaaataaattttattaaaaaaattataaaaattaaaaaaaaaaaggggcggccgttttaaagaatccatttttattttcccgtgcatgcaaggtaatagtttttttttagggccacctaattaaattaactggccttttttttaaaacgtcttaattggaaaaaccctggctttaccaaatttaattcctttgaaaaaaatccccttttcccaaattggcaaaaaaaaaaaaaggcccgaaccaatagcctttacaaacagttgcccaacttgaatggcaaatgg

SEQ ID NO: 97406 - DNA, 716 bp, Oryza sativa
  Clone ID: PAT_MRT4530_95412C.1
tcatgggggcaaaccggatgctaatccattaaagggcttccaagttccaactctgaagctgattaaagatatgtacataggggagggggattctgcacctcattcttctcacattttccttatccatcctcttctgggggtttcttgcttccaagaaaatgtgaggctctcagatcttaccctcgcctgctccatacattgggatgctgcaaaagcagagcgaatactagccttgcagggggcatctaatcttgaattaggcccaaattactgggagggcacaagggcggagagcacctcgcggagaaaaagagtcgtatcactgtagcacacctgcaccatggggtagctaaacttgttcgctaaatccgtgagcatcttcttgtgttcatcaatctcacaggagcaaatcacacggccgaggtcaatgtacaagaatgtagccttcaaccgaagatccctcgcaagaaggtcccacgagtcctcatcatcaatcaccaagtcctcctccattgagaagagttcaacagcgcagttgttgatccgacaaatgcagcccttcaattcaatcccacaatccataatttggcactacttcgtcttatcccaagttgtgcttggaatggtcaagaccttgccttttcttctctttttctttacctgcgttgcctgagcgtgtgactgcgtcttccgtagaaaaaggaagagggggatag

SEQ ID NO: 97407 - DNA, 2037 bp, Oryza sativa
  Clone ID: PAT_MRT4530_95413C.1
aagcgaaaaattggttattagtgggagcgtgcatgcctccatttctgccgctataaatactcatctcatctcatcatccaccatcagtccgtgcagtttggagcccacacaccacgatctcccgtaccttctctctgcgagatggggaggataaagagtagtagtgggcgatgcagcacggcgaggctggaggcggtcgccgtcctcgtcgtcgtcttcggcgtcgcgtcgtcgtcgctgcgaggatgcattgcgcagcagagcggaggagggctaaccaggggcagcttccccgaggggttcgtcttcggcaccgcctccgccgcgtaccagtccgacggtgctgggaaggaggacgggagagggcagaccatctgggacacgttcgcgcacacctttggaaagatcaccgacttcagcaatgctgatgttgcagttgatcagtaccaccgtttcgaggaggatatacagctcatggcagacatggggatggatgcgtatcggttctcgatagcatggtcaagaatctacccaaatggtgttggtcaagtcaatcaagctggtatcgaccactacaacaagctgatcgatgcacttctagcaaaaggaattcagccatatgtgacactctaccactgggacctcccccaggcccttgaagacaagtacaagggctggcttgacaggcagatagtggacgatttcgcggcgtacgcggagacgtgcttcagggagttcggggacagggtgaagcactggatcacgctcaacgagccgcacacggtggccatccagggctacgacgcagggctccaggcccccggccgctgctccgtgctgctccacctctactgcaaggccggcaactccggcaccgagccctacgtcgtcgcccaccacttcatcctcgcccacgccgccgccgccagcatctacaggacaaaatacaaggcgacgcagaacgggcagcttgggatagcgttcgacgtgatgtggttcgagccgatgtccaacaccacgatcgacatcgaggcggccaagagagcgcaggagtttcagctaggatggtttgctgatccgttcttcttcggcgactacccggcgacgatgagggcgagggtgggggagaggctgccgaggttcacggcggatgaggccgccgtcgtcaagggggcgctggatttcgtcggcataaaccactacaccacctactacacgaggcacaacaacaccaacatcatcgggacattgctcaacaacaccttggcagacaccggcaccgtcagcctcccattcaagaatgggaagccaattggagatagggcaaattcgatatggctgtacattgtgccccgagggatgaggagcctgatgaactatgtcaaggaaaggtacaacagcccaccagtgtacatcactgaaaacgggatggatgacagcaacaacccgttcatttccatcaaggacgccctcaaggacagcaagaggatcaaataccacaatgactacctcaccaatctggctgcttccatcaaggaggacgggtgcgacgtacgtgggtacttcgcgtggtctctgctggacaactgggagtgggcggccggatactcctcgagattcgggctctacttcgtggactacaaggataacctcaagagataccccaagaactcggtgcagtggttcaaggccctcctgaagacctgaactccagctgagaagtagtgctacaatagtttgggcgccatttccatacatccgatagatttattggtctgcacatatacgaatatacgataccctgcatatctcggaaatgttttgtggtttttgttttgtttgtgatacgatagaatgtatcactgaatcgtctggtctgttagcacacgagtgaaaaggggtagtactgcactctgcaccttgtcagcttcaaattggaagtccggattcggctaatgcagagggtggcattagctccaatcctatccatctatctctattcaacggctgtgattagttaaacatctttcttaaaaa

SEQ ID NO: 97408 - DNA, 363 bp, Oryza sativa
  unsure (1)..(363): unsure at all n locations
  Clone ID: PAT_MRT4530_95414C.1
acactttatgcttccggctcgtatgttgtgtggaattgtgagcggataacaatttcacacaggaaacagctatgaccatgattacgccaagctntaatacgactcactatagggaaagctggtacgcctgcaggtaccggtccggaattcccgggtcgacccacgcgtccgttttacangtttggttatataccatctctatggtctctgctcttaacacatatgtaataatctcttccctccctctccgatcggttattattgtaagagtactacaactatcgttgggtgaggatatgtgaaancaaagctccggctatataccccaaaaaaaaaacccnccaaaaaaaaaaaaaaaaaaaa

SEQ ID NO: 97409 - DNA, 1749 bp, Oryza sativa
  Clone ID: PAT_MRT4530_95415C.1
atggcttctcctggtgagctcgtcactccctcccctcccgatggctggaattttgatttcggaaagtctttctccgctcaagtgcaaaatctgttcaactcttcggttcatttctccaaattcttcagcaaaagacctttcttcctagttgttgatttcattcgcttcaacttttgtttaacggaaaaatcggtggctgttgctttgcaatcttgtctgggtggtactccttttggatttcatgtttcccacctcaagaataacagtttctgttttcaagtgtgctctaaacaagtgggtttccatattctctccttcaaaaatttcatctccaaagatttccatgctcgattcttcctttggagagatggtagaccgaattggcgttgggaattctcgcagtggcagaaggaggaagcagatatgtggactcttgtttcttatggcaaaaataagtcccctattcttccgtctggaaataagcaccaatgcattggcagatctggttcttctgctctgatcgccaagaaccgctctttatcaagtgacaaattgaaaccaggttctggcaaatcttcggtttttctcaggttatcttttcctccatcaaatgttcatgatggtattctcccaactcctgggtttcacaatgcatcgtcgtccactacacgtgatggaatccttccaacccctgtggatcgcaatacaacatgttcttcaaagctgtttcatacaaagttcttcagacgttcctgttgggccaaaagaaaaaatgacaaagcccattggcgagctaaatcacgctctgatccatctagagaaatccctgccaaaggaagggaattaatcatttttggaaataatcagtcgccctcctcttcttctccagctctctcgccctactccccaaactttccctcttccccaaaccccatctccccccaagtggtttccctcattgcctgggctgagagtatggcaaaccacactgatgaggagctccgcccagacctcttcctccccctgagagggttgggttatgatcctgggataccccctcgcttcagaactcctgctattattgaacagactatcattgagcaacaggatgatcagctgccttttgatggtcagattgttccttatgggctccccctaccacacctgcctctcactaaattccctcctttagtctgtattgctgttgctcagggagttttcaagccacttctccttgctacccaaccaattatcttcagatcagtccactcctatccatgttgggatcttatctctatcaaatggatcatcgacatccccaagttgccccagctctgcccaagtcctacttgccctagtcttgcgaagaagcagaaatcgattcaccctgatggaaaaagggttgcaaaagttatgtttgcttcatctgaaataactagtgatcctgaggttaggcaagggagagcaagaaagcacaaaattcaaaccccagtttctactgaaggccttagaagaagcccacgcttcactgggcttggtgagaagctggagatacatacagacacacccaagaagaaaactaaagtgaagccaatggtgacaagtttcaagcccagtaaagatgatagagtcaagcatctccccccggccatcccagtggcccagctgcaaaagattggtcttgagaaatgtggtcttcttcttgaggaagtggcagatgggaaacttctccagaacaaggatgattaa

SEQ ID NO: 97410 - DNA, 579 bp, Oryza sativa
  unsure (1)..(579): unsure at all n locations
  Clone ID: PAT_MRT4530_95416C.1
ccgattcccctaccctagactaagagaggacgatagctggcgccctccgccgccaacatgccttgcgcgaacaagcccaggcaggaggagcccggatggaagatggccggcaaggccaccgctgccaagaaggcaaaagcgtacaagcgcttccccgccatggcgggcgacacgggctgcggcgaggggaagaacngcggtgcgaggcgactgatgacgaagagagatgagacctacaagatctacattttcgaaggggtcagggacgtacacccggtcatcgccgttcctacaggccatgtgattatgaactcctttataccaaccttgaagataagcttgccgacgaagcctacaggctcaccggctgcaccgagaacaccaccataccctcctgacagatgcaaaccgccgaagcgctcagactcccccatgagcttgtgctcgcgtccgacatcgagggcacctggggcgctgccacgtttacttgactctgaaggtgcacctgttgctaatgtgctacgagaaaactctgcgagaacaatatatgtactatgctattggcctgcttgatggaaa

SEQ ID NO: 97411 - DNA, 554 bp, Oryza sativa
  Clone ID: PAT_MRT4530_95417C.1
ctcccctctcagatccggtggaggggatgggcggcagcgacggcacggacggaggggatcgtcggcagctgctcgggtggagggcgctggccacgcgacgacgacgacgactacagccggccgcatcgcttcccctcccctcccgtcagctcccaaatctggcggaggggaggggcgtcagcggcggcacgggcggaggggtcagcggtggcactctctcatgtccctcagctctactctcctgcgctgccggccacaatgatgatgactaccgcgcgacgacaacggccctaccgcgcgatgacgacgacgactacggtcggccgcgtcgctagctcgctgctcctcccagatatggacagaagaggggggcggagacggcactcccctcgggcattggcggcggatggaggaggagagccatcgaggggaggggaaggccggcggctttttttttttcactgaaaatattttcacaggggtgtggatctaccgcctgtaaaaatgatttttgcaatatataatgtgtactgagaaaaaaaaaaaaaaaaaaa

SEQ ID NO: 97412 - DNA, 300 bp, Oryza sativa
  Clone ID: PAT_MRT4530_95418C.1
aatttaagatccaaagagatcatcaagaatgatttgggtagcgataaagcggtggcagatctgatcaataagaccttggctaaaggtgcagttctaaaagaagactctagtataatcgacgtgctaactgacgtgaatgcctactacaaaaagccattgaacaagctgcgggctagctttatacacacctacttcagcaacccatgggtgttcttctcgcttatcggggcagtgatcctgctcgtcgccaccgtcatgcagactgtctacactattgtgcccttctacaagaataagtaa

SEQ ID NO: 97413 - DNA, 699 bp, Oryza sativa
  Clone ID: PAT_MRT4530_95419C.1
atggcagagcatcgtgcggatttggaggccgcggcggtgaggcgacaccatgcttcctggacctcccactctcctcgtcaagcctatgcttccccatctccaccagctcctcacaacagcggcaatgatatattgatgctttgccttctatggtacattctccggtatgtccttgggttctttcagaggtacaatcttcttccccgtgattcatttacctttcttgttggctgtaacctgaagaccattttgcaaggtgggaactatcttgtgcaaggcaggaaattgcattgtaaactgagcaaccagagaggaactgatgagatgtttgttgtaatttggacccatagtattgtccgtgattgctgtcacattgttttccgagaaaaccgcattagtatgccaagcgatctgaagtgtacaaaactacaaatttccttgggtgatttcatggtttttgaggaggtactgggaagtaccatatctactagtgtaaaagttggaacaactcaatatcagttgccacttgccagaagttcgttccggagcgtcaaccttagccactgtgacgacggtgccaagttgccagctgccgcgacgtcccttgccattcgcgacggggaaccgcatcgctgccgctgggaagttgcaccgctcgccatagagggcctcgcgcgcccgtcttctccagatgaatga

SEQ ID NO: 97414 - DNA, 363 bp, Oryza sativa
  Clone ID: PAT_MRT4530_9541C.1
atggagatggccatcgccatcgccgttggcctcggcggcagcagcggggaggcagacgtgcgcggtggagtcggtgcggctggagcagcggcggccaccatgcctgacgggcgaagggggcggtggccccgggagaaggaggcagtggtgttgccaccgccgttgaccacctcacctctctcgtctcccacctccacggccgacgggcgaaggggcggcggcaccgggagaggagggcatcagccggagatggcggtggcggattggagggggaaacgcggcagtggcggcagaccgacgagcggcctcggtgagatcgtctcgctacgcgtggcctcggcgggatcctctccccatgggtag

SEQ ID NO: 97415 - DNA, 232 bp, Oryza sativa
  Clone ID: PAT_MRT4530_95420C.1
cctggttcggaattttcggacccccagcttcatcccgtccaggatctgaaccaccatcgaacgaaggtaaggaaacaaattctcaccaccgatgtttctgcactcagtttgccagaacggaacagcgccaaaattaatcctattccatataatttggttctctgtatgtaaagttaaatttgtaatacagctcacatcagatcagctctatttaaaggattaagggataata

SEQ ID NO: 97416 - DNA, 811 bp, Oryza sativa
  Clone ID: PAT_MRT4530_95421C.1
ggcacctctgcacgtgtgcgggtaccagtaccccaacgcgaaccctagcgcgaagctccgccgctcccaccggaagaactgcgggaaggcgccggccgcggacgagcgggaggagggggaggaggtggacgccgacatggagcgcaatgcgggggaggggctcctgccagttagagcaggaggaggtgagtcggaggggaatgcaggctctccatcgctcggatctgcgagaggagatgctgatttggtggaggtgaaggagattgcagaacatgcttctccaaacgttaccggagttcaagtcatcactggttactgcagtgaagctggtgtgattaattgcgcaagtcattctgatgaaatttcaaaagaagttggacgtccggctgaacgagaagatagtcttgatgagtaccaggacgcgtctccttttcttcatcaaccagattctgaagttggtgcagcagtagcacataagtcagatttttctattgaagaaattaagaatttagtgtttcaccagcagcaagtgtagcagcaaatgaaatttctgtggaaatggatggagtatcgaagttatcaacaacccaatatgactaatttatctggtgaatccatagtaaatgagcctactgtgatgctgcaacattgctgcggatgctctttctagtatttgcattggtctacatttgccgctgtaactaaagctccccacatcttttgtgtagatagtccatgcaagtaagattgtttggtaaaaaaaaaaaaaaaaaaaaaaaaaaaaaaaaaaaaaaagtgggggggggggggg

SEQ ID NO: 97417 - DNA, 246 bp, Oryza sativa
  Clone ID: PAT_MRT4530_95422C.1
atgtggttactaggatgggattcagggctgacaccactggttgcctccgagcggccaccgctcctcccgccgcgcgtcgctgatgccgccgacgccgccgtacgctgctcctccagccgtcgcccgagcgagatttggaaggatacgaatgattgtgttgccaatggtgcaacccctagtttagcagcagttattcaaacaatggctaatgaaggaagatggtgcctgggggctcaaagctcctag

SEQ ID NO: 97418 - DNA, 136 bp, Oryza sativa
  Clone ID: PAT_MRT4530_95423C.1
gaacttctttcttcttcttttcttttgctgattacacagcacatgcatacgtatacgtacgctcactctttacggatgtaatgtaagagatggaagcctgacaataataaatccgtgaccctctggttcttcctct

SEQ ID NO: 97419 - DNA, 3231 bp, Oryza sativa
  Clone ID: PAT_MRT4530_95424C.1
atggagggggaggaggggaggaaggggaaggaggcactgagcggggggcacctctgccacgtgtgcgggtaccagtaccccaacgcgaaccctagcgcgaagctccgccgctcccaccggaagaactgcgggaaggcgccggccgcggacgagcgggaggagggggaggaggtggacgccgacatggagcgcaatgcgggggaggggctcctgccagttagagcaggaggaggtgagtcggaggggaatgcaggctctccatcgctcggatctgcgagaggagatgctgatttggtggaggtgaaggagattgcagagaggctgaaaaaggcaaaaagtatggctgccttttgctcatcagtcccccccttggagagggacaggaaactcacatggcatagtgagatggtactgttctggggtactggagtaaagtcttttgtatccttccatgcttttattggaaacacctttaatgaacatgcttctccaaacgttaccggagttcaagtcatcactggttactgcagtgaagctggtgtgattaattgcgcaagtcattctgatgaaatttcaaaagaagttggacgtccggctgaacgagaagatagtcttgatgagtaccaggacgcgtctccttttcttcatcaaccagattctgaagttggtgcagcagtagcacataagtcagatttttctattgaagaaattaagaatttggatagtgtttcaccagcagcaagtgtagcagcaaatgaaatttctgtggaaatggatggagtatcgaaagatcagttatcaggacaacccaatatgactaatttatctggtgaatccatagttggaaaagaagttgagcctactgtgatgcttgagagttcagatgaattctcagttaatgttcacagtgataatacatatattgttgacagcaaacctgataagacatctgagtttattggtgatgtgaatggttcaacttcatttatttctgacctaacatcccaatctacaagtcccataatggttgaaagcttgatggaagatagcatggatgctctgcacatcatatctgaagtatcaccaagtttggaagaaaaagcaggatcagccaatgctgaatctgtaacagaaaattccagaattgactttgtgcaaactgaagatcaactgaagctcaccaatgctgtaaataccttgacagattgctcttcacagtacaagtgtgttaaagatactttagatgcccagctgcctgttgagaatccgttcctgggtaattcagtatgttctttagatggtcatcagagtgaccatgttgttactaatatggatagcatgtggggttctgatgatgaagatatttgtagtgaaggcatcaaagcgaagggcagtgagttgggtttttcttgtgaggagaacccacaacatgtcgagttggttgataaagcagatgaaaatccttctgtagagaagcctaatggattatcagaagaggtggtctgcagcaaagagattggccctgaggttcctattataggccaggtctctgcaagtcagcatgttgccttactaatggatcaagtgtccacaaagaatccgttcattctagatgataccaggagcgacgacttatttgagcttccaactgagaattaccattcggaagcacaaaatgttgctgaatcaaagctgcaagttgactttacacctctgccattggatcagctgataattgtggaccaaactagcattgctgaaggccagcaatttgtcatctcaggtgatcgtgtaccagctatctcaagtacctgtggaaatgaacctgcagttggcacagaggatgtgtctgtcagtagcacttctgatcctgcgaagaacatttccttgcatgatgcctcagtgaacaatagcagacaggaagacggggagcctacaagtggcatcaattttgtgccatctgaagtatttcttccagcagagtttagcacaatgcctacttctcaggatatcaatgctctcaagaatgatggtaacgagaagacgccacttgaagacataagcaccaaggatatgactgcatcacttagtgaagataatgttgaagaaaagaaagagaccgaaggcactagtgtgaaggagatgaattcaatactgaaagcagacaatgttgaagaagagaagttgactgatgacacgagtgcagagaggaatgcaatgcagcacatagatgacgctgaaaagaagcaggctgctgacactgtttcgagggaaacgagtgctctacaaaacatagaagaaagggaaaacgttgaaggtactggtgctaagggagtgccagcagtagggagcttggaaaatgctgatgcggagaatcagactgaagacaccagtgcaaagacagaatgtaaatcagataatgctgacaacaagaagcagagttacgacacaagcacagaggagatgaatgccaagaatcaagctcaagatacttcctcaaaggagatgaacaccatacaaaacacatctaatgctgaagaaaagaaccaaactgaagacccagctgtccaggagggaaacaagcagaaggaaggcatctctcccacagtagcgaagcagagttcagaaagagttcatgtccctctcaaggtgctcctagccgaggcgagtgtggagacgaaagaaaagaaaaccactgccaaggagcgtgttttgtcattcaggcgccgagtatcgaaggacgactcatcgtcggccaagtccgggtccccaaaacctggtgctgatgacaacaaattctggagctccccagcaagattgcccgagaacaatgctgagaagaaatccaaagcaaggaagcagccatggatgccgttcatttgctgtcactcggtgcactaagcctgccatccatcttcagcagcacaaagcttctccaagctgctgctatacaccatgtgcatgttgcatcttgagttattattgatagcactagtagtagtaacagtagtaaagggcttggctatgctacgatgctctttctagtatttgcattggtctacatttgccgctgtaactaaagctccccacatcttttgtgtagatagtccatgcaagtaagattgtttggtaatgtcgagctgatacttgctgatctgcattgatgttcagactttgtgaatcatgtgcgattttgatgttcatagtaaacttgctcgtgaatggatgtgg

SEQ ID NO: 97420 - DNA, 282 bp, Oryza sativa
  Clone ID: PAT_MRT4530_95425C.1
cccttattatccccataacacggcaagaacaaaggggggggtttcataaaaatatcgggggggaacaccacccacccctaacattcgaaccttaggaatagaattttggagacaacacaaaaaaacaagaaccgaaaaaaaagccccacgaagacaagaagacacccaccgcgaagacagggccaccgaagaacaacacaacaccccaaggaccctctccacgccagcgggtacacaccgctgaaaaacccgcggcacaacaagggcttggcccacccagaa

SEQ ID NO: 97421 - DNA, 372 bp, Oryza sativa
  Clone ID: PAT_MRT4530_95426C.1
tacgcggggcagtacgcgcgggcatcggcttcttcgcggcttggcggttcggtcgaccgatcggtgaggtccaccggatcagccgctgctggcgcccaggacgagggatccaccggatcagcggatcagaggcaaggcaggcgggcgcgcgcggcgcgctgccgggtgagcgatcgcgacgcgggagagagcggagtccccacccccgccccgcgcactctgatgtgcctcgggccctcggctctcactcgctttcgcctccacggcacggatgacgcgccgcacacgcactacgcacgcagcgcagccgatggtgcgctccgttgcgagacagcgagagacgtgcccgctggccacttgtgctgctccatc

SEQ ID NO: 97422 - DNA, 367 bp, Oryza sativa
  unsure (1)..(367): unsure at all n locations
  Clone ID: PAT_MRT4530_95427C.1
agcacactcctacttgcagctagagctgagcaagccaaagctttttatcactcttggtggtgttcttagtagagcttttcgcaaagattgtgccatggatctttggcgagttcattgcttgggttggctccttgttctactcctcttcagccatgggggaggaggagcagagcaggtagcaacacaagcgcatcacgacgcgtcgcggcggactctccgcgcaggtggcgcacggcacgccggagcgggacgtgacctcgccgctcgccactgtcccggtggataacccggcggcgaaccccacngtgacgtcgacgacgaacccggcggcaatgccggggangcagacgacgccgtcgctggcgaa

SEQ ID NO: 97423 - DNA, 399 bp, Oryza sativa
  Clone ID: PAT_MRT4530_95428C.1
atggccgaaggcggcggtagaggtagaactcaccggagcgcgaggggatgcgaattccggcgacgaatcccgacggggaaggggcggaccccttctagaagtaatctagaaattgcagcggcatatggagtgaatgggccatatcacggtgcatcggcgtggcttcctatatggaaagttggggtgggaccctctaaattctccaagagctacctcgccatcgccagtccaacagtcagggaatttacgccaatcccaagcaaagatccacccaacattgacaaccaaattgctctcgaaatcgccgtttaccctcaatttgttggtgacgatcttcctcggctctacatatactccactgtaaagtgtctctcctacttcctccgttccacaatataa

SEQ ID NO: 97424 - DNA, 807 bp, Oryza sativa
  unsure (1)..(807): unsure at all n locations
  Clone ID: PAT_MRT4530_95429C.1
aaccctcaataaagggaacaaaagtgggagttccacccgcggtggcgcccgttctagaattagtggatcccccgggctgcaggaattcgggcacgaggacaactctttctaaggaactcggcaaaatagccccgtaacttcgggagaaagggtgccccctaggtattctctacctacccacctgtgtcggtttcgggtacaggtacccctttgttgaaggtcgttcgagcttttcctgggagtatggcatgggttacatacttcagcgccgtagcgcctggtatgagcctcgtggagaagcaatggctagtccacggggctcatacttcagcgctgcagcgcttggtactcggacctcggctcgagggggggcccggtacccaattcgccctatagtgagtcgtattacaattcactggccgtcgttttacaacgtcttgactgggaaaacctggcgttacccaacttaatcgccttgcagcacatccccctttccccancttggcgttatatcgaaaaaggcccgcaccgatcgcccttcccaacagttgcgcaaccttaatggcgaaatggcaaattgttaaccgttaatattttgtttaaaattccccgttaaatttttgtttaaatcaactccattttttaaccaatanggncgtaaatccgccaaaatcccctttttaatcttaanaattaaaaccnaaattagggttgtattntttgttccncttttggnaacaaaaaattccctattttaaaaaacttggaatcctcaccttccaaaggggcgaaaaaaacctcttntca

SEQ ID NO: 97425 - DNA, 453 bp, Oryza sativa
  Clone ID: PAT_MRT4530_9542C.1
agttgcttgacattttgctctcagaaggttgatgctactggttcattttttctgcttgttagcatatctgctcaagaggctggtgcaaaagacatgtccgagtctccttatagtgtttattcatataatgatgtgccaccttcgtcattgacacatattataaggttgagatctggcaatgtgctttttaactacaaatactacaataatactatgcaaaaaaccgaagtcactgaagatttttcttgcccattttgcttggtaccatgtggcagctttaagggtctaggatgtcacctaaacgcatcgcatgaccttttccattatgagttttggatatctgaagagtgccaggctgttaatgttagtctgaagactgattcttggagaacagagcttttggctgagggagttgatccaagacatcaaacattttcgtaccggtcaagatta

SEQ ID NO: 97426 - DNA, 179 bp, Oryza sativa
  Clone ID: PAT_MRT4530_95430C.1
caccttgatctgtgtggtttaccagatgggtggaatcgtcacagaacgggttagactgatcttctgagattttcctgaagaaaaagggagaggcttaacttgatttccatgatgtactataactagtccactgacagctcgtgttactggaattgtgagggattggactcttggtgttg

SEQ ID NO: 97427 - DNA, 441 bp, Oryza sativa
  unsure (1)..(441): unsure at all n locations
  Clone ID: PAT_MRT4530_95431C.1
ctgagctacacctgtgtcnccgctggcactgctggattattcttcgtgccaatctacctactggtggatgtgaaaggttacaagagcccggttttccccactggagtggatgggcaagcatgctctgatgatctttgttcttgtagcatgcaacattgtccctgtactggttcagggattctactggaaagagcccagcaacaaccttgttgaaactcattggaatagggggctgagcgatgaatatatatcttccggaagttcatgataggggataattaagctgcaagcacaatatcatcaattccagtgttaggaantctactgctgattagttttttttaaaaaaaaatagaagtgagccaagccaaaaatcccatcaatgatcaataaaatcaaccagctccagatctgattaaagtgattaaaaaaaaaaaaaaa

SEQ ID NO: 97428 - DNA, 453 bp, Oryza sativa
  Clone ID: PAT_MRT4530_95432C.1
atggcggattgggcgatgcaccactacctcctactagccaaccagcaacgccaccgagccctcgccgacgtcgccgtcctccgccgccagctgctcctcgactccggccgcgtcttcatgctcctcggcgccgtcatcctcatgcacctgctcgccaccggccgcggagcatcgtccggctgcatccgcggcgccgaaccttgcgtcgccctcctcctgtggctgctcggcgcggcgctcgccatgctgtcgctcgtcgccggccgattccccgttctcgcagccgccgctgccaccattgctaaggagctcggtgatcacctgcttggtgatcatcttcttctccgtgcttttgctctggagttgagtacggattgcgtgtattgcatccttgcattctccctacatgttatgctttcgaaacatcatctttttttcagtatagttcaataa

SEQ ID NO: 97429 - DNA, 1898 bp, Oryza sativa
  Clone ID: PAT_MRT4530_95433C.1
acctaggtcgccgcgcagagattggggacgccgcacaccttcgccccacacttacaaaccaacgcgacgcacgacacgcttgggacctggcgcgcgggcgagactcagagaggaggcgtgttggttagctcattggcagcagcacacacaaaccacatctcctatatatagctcatttttagcttttggaatttgagagaggttttgagagaaatggctagccaaggtgtagcctccatgttcgctctcgcattgctcctcggtgcctttgcctccattcctcaaaaggcggaggcgatcggggtgtgctacggcatgagcgcgaacaacctgccgccggcgagctcggtggtggggatgtaccgctccaacggcatcacgtcgatgcggctgtacgcgccggaccaggcggcgctgcagtcggtgggcggcacggggatcagcgtcgtcgtcggcgcgcccaacgacgtgctctccaacctcgccgccagccccgccgcggcggcgtcgtgggtgcggaacaacatccaggcctacccgtcggtgtcgttccggtacgtcgccgtcgggaacgaggtcgccggcggcgccacgtccagcctggtcccggccatggagaacgtccggggcgcgctggtgtcggcggggctgggccacatcaaggtgacgacgtcggtgtcgcaggcgctcctcgccgtgtacagcccgccgtccgccgcggagttcaccggcgagtcgcaggcgttcatggcgcccgtcctgagcttcctcgcccgcaccggcgcgccgctgctcgccaacatctacccctacttctcctacacctacagccagggcagcgtcgacgtctcctacgcgctcttcaccgccgccggcaccgtcgtccaggacggcgcctacgggtaccagaacctgttcgacaccaccgtcgacgcgttctacgccgccatggccaagcacggcggctccggcgtctccctcgtcgtctccgagaccggctggccctccgccggcggcatgtccgcctcgccggccaacgcccggatctacaaccagaacctcatcaaccacgtcggccgcggcacgccgcgccaccccggcgccatcgagacctacgtcttctccatgttcaacgagaaccagaaggacgccggcgtcgagcagaattggggcctcttctaccccaacatgcagcacgtctaccccatcagcttctgatgcattccgtacacatatacgcatacgtatgcgtatacgtgaccgcaggtagtgtagtatacacgtacacgtacctgtacattacagtattgtacagagggcttggcttgcgcaccgctgagaggacacgtacaccaagtgtacgtctgtcagatgcgtacgcgatagtatatatattgggtatattatatatataccgtattattacggtatgtatagaagggaagctacaggtacaaaatacggtacgctgtggtaggcgaattagcccccattttcccttcctagattactattactatatagagagggttgcaatatatatacatgtatatgtacgtacttaggaggtgtattttgtacgtacacagattgtaatactgtacatttgtacgccgtacgtcgaggctattttgcctcacgtaggcgtttgagaaaaaaaaagaaaaaatttaaaagattttaaaaaaaaaaaaaaaaaaaaaaaaggggttttcaattcactgggcggtgtttaaaacctggtgctgggaaaccccttgcgtacccaaattaatcgtttagggttgggtttcccgtgctaacgagtagtaaaatttcggtttcccgtcctttcgtacgtgttgaattgttgttattacttctcaccggccaaactgattgtacgtgttggtcatttt

SEQ ID NO: 97430 - DNA, 493 bp, Oryza sativa
  Clone ID: PAT_MRT4530_95434C.1
cttcccggtctgtcgttattgcttgctgttggaatatgtgtggacccggtatcaaaccaaggtgacaccaccagggaaaccacgctctatggacccactgatttacccgcccatagtcttctagatgacgactcacttatagggtataatcttgggtacgccctgcaaggtaccagtgtcccaggaattccaccagggtcagacacacacgctgtgcacaggagtacttcaatttgttgttgtggtattgtgggtaatgtggatttcgttggaccgattttcgagattcgagaagccgtgagggatgttttaacttgggcgtaacgtgctcccgatataataggggtattaaaaactccccgatcaagcttcttcccatagaataaaaggtgaaaagttggtattgaagctgagccactcgatggttgattggggatagttttattgggaactaatggagattttcttttctcaaaaaaaaaaaaaaaaaaaa

SEQ ID NO: 97431 - DNA, 204 bp, Oryza sativa
  Clone ID: PAT_MRT4530_95435C.1
atgccgctaatgttgttgtcaagctacggtggcggtggcggtggctctctctctctctctctctctgccgcccaacaacatcacgaagcagataaggtgtcgtttgaagtgttggataaaaatccagccctatttttggatgacaatgtggtagacaggggccaagtcgttctcgaaggtgcttggatccgagtaggtgcataa

SEQ ID NO: 97432 - DNA, 308 bp, Oryza sativa
  Clone ID: PAT_MRT4530_95436C.1
ctgcaggtccgtacaaccgcaatccgggggggccttttatcacctcttgcctggtgacactgcaatgcaaaaacccgtcattttgctgagaaaatgaatataaaccctctattctgcggcactatgttgctccattgccactcatgctggatacgtcgaactgaaacatgcagcagctcatacataatatagccagacttctgaatgtgatgctctggacagatagctcaagacacgccacggcagcatggaggcctgagtactgagcaaaatgaacattaatgtgactctttggaagagacgactat

SEQ ID NO: 97433 - DNA, 306 bp, Oryza sativa
  Clone ID: PAT_MRT4530_95437C.1
atgtgggagcgagcgactggggaggttggggttgccgtgggtgatggtagcaagcggccggcgcgaccgatggcgatggtagaggccgacgtagctgagggttgcaggagaggctggtgtggcctagtcgccaagagaggcacgcacaaccgagggctacgagagaggccaaagcggccgagggtgtcgggagaggccgatgcggcgaatggcagtgggttggcgtttggtgtggacgatggcaggtatggctccttgtggtggttaggtgcaccggtagcggacgcggatgacggcggcggctga

SEQ ID NO: 97434 - DNA, 362 bp, Oryza sativa
  Clone ID: PAT_MRT4530_95438C.1
cttttttaatttttgctcccatttctggccatgtccttttctgatttaaccaaatgtcccttcttgcttgcttgttcctcacatggggctggttgttgttcaagaacttgtgggatttttgtttttcttttgagaccgacgctttgcaaaccaaagaagttttagttagtttctggaattggtggtaggactggtagttccttcatgtttttttttttactttttaggaggtgatgttttgaagaagcaaacatcaactaattgtaagagcatctattatttatttttttgattgttttgtttctacttagtaagatacttagattccgattggcacactttttccaaaaaaaaaaaaaaaa

SEQ ID NO: 97435 - DNA, 804 bp, Oryza sativa
  Clone ID: PAT_MRT4530_95439C.1
cccacgcgtccgcccacgcgtccgtggttttatcagagacttgtagtttggggaaccctaggcatctttattttcttagatatgtgcctgatatattttttttttgctagttagtaatgtaggcctagttttgtactgtttttttttctgttatctctatttctcttggtagaatatagattgacctgaggcttcttccttgatagaagcttgacatactgtctctagtttacttccattgcttagcatggaatttttaggtttagtgtggtgcccgttatctcacaagttatctgagatagcaactgttgaggaatttttgtctctaatttcagatgtgcaagatattcttatctataatttttagatgtgtccacatgacattttcatttttttggtctattgttctctgtgtgatattgactgggttatatgtgtactttttagcaactttgttttggcttttgttgctcttgcatgtgttgattctgggagcaagggccttggagctgcttggattgtgggatgacagcaatggaaattgatgtcaacgtgggtgaagggatcatgttcattgaaggacatactagttgtgatcaacagaatatgttttgggatgcaaaagttagagatatgtgcactgtatgatgtatgttcttctggtgccctatgtttccccttatttcaatatgaaacttatagcttattagaaggatctttttgaatcaaaagtcatgtttccctactcagtactgcttgatgtaaaggaatccaaaaaatcatgccatttcaaaaagagttttc

SEQ ID NO: 97436 - DNA, 478 bp, Oryza sativa
  Clone ID: PAT_MRT4530_9543C.1
tgaaactaggagaagctatcagattctaggatgatgtctggataggggagatgccattaaaaactcaatttccttatatttatagcatctgttctgaccctaacagtattgtaaaacaaatgttgatagagggggaatgggagatcaatctgagaagaactctgggtcaaaatgaattggttgaatggatggagctgcaagagaggcttgctccaatccagttgacaacagaaaaagatagtatggtttggaagctgactcagtcaggacaatttaccacaaagtctccttacagagaaattgtttttgggggagtcaaagatgtttgatcttctgaatttaattcagaaccagaggggagttgaaaacaaaaccttgtggtattattttgctgcaggggcgtatcagcaccggacctgcagcccacaagatgaacttaatataagataaatataagttcaagcaaaaggtaaatagt

SEQ ID NO: 97437 - DNA, 679 bp, Oryza sativa
  Clone ID: PAT_MRT4530_95440C.1
cacgaggaccggatgagatcactgagccccgggaagaatttcaaatgattgatgttgggagagaaagatgaaagtagtgggaggccgaagactacgccgatgaagctgaatacaatgggtgtcaatgccgtcgagcttgagaggagctgcacgagctcctccatcagaggaaccaggagcggatcgaagagctggaactcgcgctgaaacgcgcggagaagaagctcgtcgagaaggagatggaggtgtccactgtggaaggacacagcgaagctcgcgctgcgacaggacagtagtactatgttgtgacatggtgattgcaaagctggcatgcttcatgtgcgcaatactgcaatttgtacatgatttaggattattgcttcatggggcacacacgcagacacgctggagcgtggcacttgcgacgtatttttgtagagttttacgccagttatagtgaactgttcataccgaagtttagtgttagcctttcttaggtgatctctaagcaagtttgttgtttcgggtttggggcaaatgcagttcaattagtctgactgatgtccggttctatatttgtttgtaccatgtgtacgtctcttcgtatttgagaattcagatggccatttggttgcctgtttttaggcttttagccaaaaaaaaaaaaaaaaaaaaaaaa

SEQ ID NO: 97438 - DNA, 1433 bp, Oryza sativa
  Clone ID: PAT_MRT4530_95441C.1
cacctacctacccagccagcaagaacgagacgtggccggcgcccgaacccgccggagcaatggagctgctgaccacggcgccgatgctgaactgcgccgccaagagggcgggcgggtccgccctgggcccgctggccgacgcgctgggcagctggatcgcccgcgccgtggtgccgccgccgccgccgccgcggatctgcgggtcgcccggtgggccgcccgtggcggcgccccgggtgcggctgagggacgggaggcacctggcgtacgcggagtccggcgtgcggaaggaggacgcgcggtacaaggtcgtcttctcccacgggttcaccggctcccgcctcgactccgtccgcccctcgccggaggtggctgaggagttgggcgtgtacatggtaggctttgatcgcgctggatatggtgagagtgatccaaaccccaatcggtctgtgaagagcgctgccctcgatgttgaggagcttgcggacgctctaggattaggccccaagttctatgtgatcggtatctccctcggctgccatgctgtttggggcgccctcaagtacatcccagaaaggattgctggagcggccatgatggcaccggtggtgaactactggtggccggggttccctaccgatctggctgccgaggtgtacaacaagcaggaagtgggtgaccagtgggcgctgcgtgtttcacaccatgcacccagcatcctccactggtggatggagcagagctggcttcccacctccaccgtcgtggctggcaccactcccctccccaacaagcgtgatgccgagatccgcaaaaatatgaaggcggatggctcgttccagaagaaaatggacttggcgacacaacaaggcattcatgagtcgtactaccgtgacatgatggtgatgttcggcaagtgggagtttgacccgatgagcttgccgaagccgccatgccctgtgcatatctggcagggcgacgaggacgggcttgtgccggtggtgttgcagagatacctcgttagccggctcagctgggcgaactaccatgagctccccggaaccgggcacttcctgtctgcggttcccgggcttggagacaccgttcttaggaccattttcggttgagtatatgtagcagtcagaagaagcaacagttcagaatgctgatactaagttatagtgtcccacccggtacattacttcgtttaaatggtaaggctgttcgttactcgctgattagcgatgatgatgatatagatgaaagggcagtgtaaaatgagctgctctgttttttttttgtttttttggtgtaaaatggcgtggcccagatgctacccaaaaatgttctttgaccttggaaagaaagtgatagtattatacaatgtggactcttttgtttcgtactccaaaaaaaaaaaaaaaaaaaaaaaa

SEQ ID NO: 97439 - DNA, 345 bp, Oryza sativa
  Clone ID: PAT_MRT4530_95442C.1
ggctgcagatgaacataaaaataattcctcattgaaatatctaactaatactatatatgtgcaacatttttaaagtccattgcactatgggaaaggtaaatcaaatcgggaagaaagaggaggcgtccaaagtagcgtctgattggacgctcgatggaaagcatttccgatttcttttgggctggtttattgtgggccaactactgttgataactggttactgtttagggggcctcgtactgtttatgtggttggctggttactgacgatgaccgtctattcacatgagcaggtcttgttcaatttagctggtgccaaagtcagttaaattgtgtgcggtgagga

SEQ ID NO: 97440 - DNA, 2775 bp, Oryza sativa
  Clone ID: PAT_MRT4530_95443C.1
atggcgagttcttcctcagcggtggtgatctccaacccattgttcgggatccaaatcttggagaaattcaccaagcaaaatcactccctctggtctgcacaaatccttaccaccctacggggtgcgcagctagaagggtacatcaccggcacagctgaagctccggcggccgagtgtgagaaagaagatggcgacaagaaagtcaagaccaccatctccaatccagaatacatcaagtggttcacccaggaccaacaggtgctggggttcctcttctcctccctgtcacgggaggtcctgcagcaggtggctggcgcaaagacggcggcccaagcatggagcatgatcaacgacatgttcacctgcaagtccaaagctggtgccatcaacgttctccttgcactaacgacaactcagaagggacccatttccatctccgagtacatcgccaagatgcgatctcttggcgacgagatggcgggtgcagggaagcctcttgacgatgaagagctgatagcgtacatcatcaacggcctcaactccgacttcgacgcaacagttgaaggattgatggcaacagcaagaatcgcacccctttcaatttctcatgtgtattctcaactcttgagttatgaaaacaggattcggattcgtcaagcctacctcaccacgtcggcgaacgctgcaaatcgcggtggtcgtggtggccgtggtggaaatcgtggcgggcgcagcagcgcacctcacggcggccgtggtggtggccgtgggaacacaggcggtgccaatcctgggcgagggcgtggcaatgacactcgcccggtgtgccaagtctgtcacaaaagaggtcatgttgcaagtgactgctggcatcgctacgatgagaactacggccccgacgagaagctgggtggtgcggccacatatgcctatggtgtcgacacaaactggtatgttgacactagggcaacagatcacatcacagggcagctggacaagctgaccacaagggagaagtacaaaggaacagatctgatccacacggtcagtggcgaaggggcaaagaaatattatgtcagttttattgatgattacaacaaatttgtttggatctatttccttaagcacaaatatgaggttttccagaaatttcataagtttcaaaaactttttgaaagacaatttgataggaaaattcttgctatgcaaaccgattggggaggtgaatatgtcaacaatctccacaaggggttcaagtgcctagatgtgtcttccggcagggtgtatgtttctcatgatgtcacgttcgatgaacaagtttttccctttgcaacacttcatccaaatgccggtgcccgtcttagagctgaaatctccttgcttccttctaatcttatgaataacacattggatcaagggggagaggaacagtatgatcaaatgtttaatattcatgtaccaaatgctactgatgatgcttgtatagctgtagaatcttatgataggaacagcgcagaaaactgcaatggaaatgaaagatcaggcgagtgtggctgctacgcacagccgggtgcacggagcgccggcggtttcggcgggagaatccccctcggcaggggactagcagcagcgctctcctgcgcgtccgacgcgttcgccgatgggaggccagtcagaagctggcacgtcgcctgccgtcaactctccccgctagcccagcagcatcatcacgtgcccagagcaggacgtgcagcagtcccatccacctggatcatctgtgcaaatggaggccgcacaacaggatatagttgctttacatcttctggggaaccacaaactttggatgaggctctaggggataaacattggaaagaggcaatggatagtgaatatcatgctgttatgaaaaataaaacttggcatctagtacctcccaagagaggtttaaatgtgatagattgtaagtgggtatataaaattaagaggaaagctgatggcagtctagacagatataaggctagacttgtagcaaaagggttcaaacaaagatatggtatagactatgaagatacctttagtcctatagtcaaggctgctactatcaggaccatactgtctatagctgtctctagaggatggacactgcgtcagctagatgtgcagaatgctttctttcatggaattttagaagaggaattttacatgaggcaactacctggttatgaacaagatgatattataatagctagctcatctaacagtgccactgacaccttgttgaagaatcttaatcaagagtttgcactgaaggatctaggtgagttacattacttcctaggaattgagttaagtgctcatgaagggacacctcttggaccagtggatagtacaaggtatagaaaccttgttggtgctttgcaatatctgactctgactagaccggatctatctttttcagtgaacaaagtatgtcagtatttgcatgctccaacaacagaacattgggctgttgccaagaggattctgagatatctaaagcatacagttaagcttggtttaaagattagtaaatctaactccttgcttgttagtgcgttttctgatgcagattgggcaggatgtttggatgacaggctatcaactggaggctttgctgtgtttataggacccaatcttgtgtcatggagtgcacgtaagcaagctactgtgtctagttcaagtacagaagcagaatataaggcattggctaatgcaactgctaagattatgtggata

SEQ ID NO: 97441 - DNA, 528 bp, Oryza sativa
  Clone ID: PAT_MRT4530_95444C.1
atggaggagtgcggagcagatgagtcgcgggctcgcatccgggtgaggggcgggggtgtcttttggtattcctttgcccagtgggtagcccaggcgcagaaatttccaagacgcactatgagtgcccttgctagcagagagggagattcgacaaaggcatgtatgtgggaatcgaagaataggagggctagagcctggaggggacaagagtgcgcgacgttgtacaacagagaggagacgagctggatttgttttggaaatcgcaaaggatacgatggaaacgaggtacgaaggaatcgaggcggcattgaaatgtatccaaatcagaatcaggatttgattgcttatcttttagctaatggtgttggggtgcacaatcttttaatcatgctttggcagatttgtaaggcaaggaacgatataaatttcaaaaacaagaaatgggagcctcaacaagtttgtacaacaatctatgtggatgctttgtggaaggagggtcaggaattggaatcttcattcacaacctag

SEQ ID NO: 97442 - DNA, 792 bp, Oryza sativa
  Clone ID: PAT_MRT4530_95445C.1
atgaagaagaagacggccgcatccaaatacctttgctttgcgagtttcaccatatgtatcccctccgctaagcagccgtccggcggtgacgccaagaatcgtctcagcttctccttcccggagagcattaacggcggcaaggaccggcgttgtcagcagcacacggaggaggagcataagtccgagagcatcatcgacccggcggcttcggtcgtcacgaggacagacggcaagcactgcaccatcatcgttggcaccatctttggccgccgcagcggccacgtcaccttctgcgtgcagcgcgacgcagccatgccgcctcccttcctcttcgagctctccgtcccgatgctgtcacttgccgccgagatgggctccggccttctccgcatagccctcgaatgtcaccactccagcggcaaggtggtcgtcggtgctgctgacggcgacaccatcaacaacgccggtacgggcggcggcggctcgaggagtgtctggaaggcgtcctgcaatgggcgggacgtgggttacgccgtacggcggcggcccaccgaccaggactgccgcgtgctggagagcatgaggatgacgacgaccggcgtcggggtgctaccgtcgacggggttcagcgaggacggcggcggcggagatgtgctgtacatgagggcaacgtacgagagagtcgtgggttcaaaggacgccgtgtcgtaccacctcatcactcccggaacagccagcggcagcccccagcaggaactcagcgtcttcttgcttcgcaccaggggtgactga

SEQ ID NO: 97443 - DNA, 178 bp, Oryza sativa
  Clone ID: PAT_MRT4530_95446C.1
catacttactagataaaacagcatggacgttaattaacttggacccagacccaacttagcaggcaaccggacaacatgaggaggtttggccgtttggaacaacctacaagggacactgaaggacttaaaacgggcacgcccacccgggggaagaaagatatccaaaagatcgccccca

SEQ ID NO: 97444 - DNA, 783 bp, Oryza sativa
  Clone ID: PAT_MRT4530_95447C.1
atgtacttccctcctgggttgttggcgcttggcaacatgagtggccattattaccatcacctgacctccttcctcctaggagctgttctgcccaccgtgctgctcttcttcctcgcctccgaccgggtgagcgagcggctgcccaccatatcgagcttgggcaatggagctctcgtgatcggtggccgtgctactgctcgagaaggtggtgacctcacaggcgtcgatggctcagcacctgccccagcagaaaaggagaaattccccggcctggcggagctgctgccggaggtggccatggaggacaagacggtgatcatcacgtcggtgaacgacgcgtgggcggcgccgggctccctcctcgacctcttccgtgacagcttccacaacggcgacggcatcgcccacctcctcgaccacgtcctcgtcgtcgccgtcgacgccggcggcttccgccgctgcaaggccgtccacccccactgctacctcctcgacgttcctggacacggcggtcttcgccggcttctgcgagtaccgccccgacgccggcagggtgtgcacggtgcacgccaactgctgcgtcgggctggagaacaaggtgctcgacctcaagaacgtgctcgccgactggaagaactacacggccggcctgacgtcgccggagaagaagggtgccaacaagttcaggtggacgttcccggccaagtgcaaggcgtcgttgaaacggcactgaccatgaagtccgggaatggtcaaagattaattattctatacataggttaa

SEQ ID NO: 97445 - DNA, 324 bp, Oryza sativa
  Clone ID: PAT_MRT4530_95448C.1
aagctttagagcggggaaagagaaatacgagatcatattactgaacgaatccaatatgaattaaaaggcacagctgccctaacagaccgaggaacgtcgtattataaggttccgaaatcggatgacggtaattggcgatttaggagaaacgtgaagcgttttcctcacttaggtcatgacacaattgatcttgaagccctgtaaccatccttgtccaaggtcttatcaaattagagagccacaacagctgttctatatcaagtctaaagatattgtagtttgatatgttgatacaaccttgtttattgtaaaaacaaaaagctt

SEQ ID NO: 97446 - DNA, 498 bp, Oryza sativa
  Clone ID: PAT_MRT4530_95449C.1
atgtttttcaccggaatgaagaacttcaaaaagcaccaaaacatgatttttggacatattggagtatgttgggtgagtccgtgtcgaaaaatcactccgtgactcgcgcggcgaacttttgtcaattaatgccaatattggcctatattgggacgcgtgggtgcgatgttttgcaccggaatgaaaaacttcaaaagccaccaaaacacgagttttggacatattggagtatggtgggagagtccgtgtcgaaaaatcactccgtgactcgcgcgacgaacttttgtcaattaatgccaacattggcacacgtgggtgcgatgtttttcaccggaatgaaaaacttcaaaaagcaccaaaacgtgatttttggacatattggagtatgttgggtcagtccgtgtcaaaaaatcactccgtgactcgcgcgacgaactgtcaaaaatgaatgccaatattggcatatattgccacacgtgggtgcgatgtatttcaccg

SEQ ID NO: 97447 - DNA, 766 bp, Oryza sativa
  Clone ID: PAT_MRT4530_9544C.1
ctagatgcctatggcggcggtgacggcggacggtggcaggacgaacctaaggaggcgggcgtcaacttcagtgccgccgtggcgtagattgcgcggtggtgggtgaacgggaggagcgacggcgacagggtcgctacagggctccacggtggcagccagggcggggcggtgcacggcatgtgcgtgggtatcgatgcgacgcttgcggaatgccgggcatggagggggcggggtggcatgccctatagcaccagcacgtcgtggtggcgcgggggcagctagaaagaggtggaggttggagccggaggcgaacggggacgttgggccgctgccagggccgaggctgaggtggagccatttcttgttctacaaggactagtatttacccatgggtataaatatgtacacccggggttattgtaaattatctcttgatcaataatactactttcggcgcatcgccaccctctttcccgaggtttttacatatcaaccggcagaatttggcacttgacgcggggctgcatcggttcagttcgatctccagcgaaggggtaagtcctacgttccaccagccctggtgaatctgccggctacgttggtgttgttcaaggctgcatcgcttcaatatcttagatcgctctggtttggttgatacatttgcctacctgatatctcaattctatctctagttgcattgtgtctagagatgcatcggtttagttgggactgtctcagttaggtccaatcttctgccttagccgat

SEQ ID NO: 97448 - DNA, 614 bp, Oryza sativa
  Clone ID: PAT_MRT4530_95450C.1
tttttttttttttttttttttttttttttttttttttttttttttttttttttttttttttttttggacacccccaaacggggggttaagaaatttccacacaaattctactattttatgctacaactctacaaaaagggaggcagggatgtaaaactggccagcctcaacagggatcatcaccaggcattaggggctaagggatcaccccccccaaaaaaaaaaaaaaaacccattacggtttcccccaaaatccaaggttccccctacaaaacccccctttttataaagcttacggggccccccccactgggctactttggtttccctttcccaagggtttcaggggcaaacctataaaaacgggggggcggggagggaccgccaaaactaaacttaaacttcattggggcgccaaatgggtttttaaaaaaacaaaaaaccttttttggccggggagaaaaactgggggcccccccaggggagggattttgccaaaaaccccacttaaggcgtgggccccaaactattttaaaaaataaccccgcccccgggcccaagtattggacccccccccaccatcacggccactagtttacccctggccctttttt

SEQ ID NO: 97449 - DNA, 2470 bp, Oryza sativa
  unsure (1)..(2470): unsure at all n locations
  Clone ID: PAT_MRT4530_95451C.1
cccagcaagacacgaaacaacngcagccagaaagccaggaagaagagatgaacaaagtagagcgaaagagagaagagaaggaggcagagacacaccgcgcgacgccgaaaacccacgcaaacacccctcaaaaagaaaaagagaaagagcacaaagaacaacgttttgtgaaggggaaggagggagagacgaacgacaccacgagaacanacagaagcggggaacggacaacacgacccaacgggaccaccccagacttaaggagaggagacagaggcaccgagaccaggcagaangcgaagacggacgaacaacgcacngcgaaggagaagcagaagaacacgaagccacgcancgcgtgagagcangaggagcancaagcgcgctacgaagacaagagcacgacaggagcagaacaggaggcacacactcnaagcatgacgaacancacgtagagggacagcgacacgnacgcagngcggcacgagagggtatgagncaaacatagaacgcgaagagaggacgcgtggagaangagcgcagcgacgcngnctggagaganaacnagcagacgaccgagcgacacgacgtacgcggacacgcaacacgatatgnacatgagaccagtggaccagacgcgacgcgcgagccgcacagngcgacgcgccgcgaagcctaccagcgcgcactcacaaggcagagcacgcgacgagcgatcaanacgcagcaccagagccctagacgagacagcacgcagacacacggaactagcgaagctagcgtgngagcgcacacgacagngatgaacnanagcgcactagtgcagncgcagcagagccncatcgcagcggagccactnagcanagcacacagncgacgagagcgagtagacacgcgcacacgcacgacgnagcgcnacacagaacagacagacgacgacagagtagcaccgacgagcacgacagcacagcgaaagcaacatgcgcgacgcgcgctgccgaangcacgcgatcgacgagacgcgagcagggtagaaggacgacagaagaacgagcgangaagagcgcgcgancacacgacgcgcacgcancgcgcacaaccgcggcaccacaggcaccaggaggaaaggagagacgcggcatcgaaacgacagaccgangaacacagcaggctcaccagaagagacacaggaacggnggaggaactacgagacacagcgccgagacgcgcagacacagaagggaagcacgacaacagagaagaagcaggacagcagcacacggcgaangcacgggcatacaacgcaacgcagcgcacagaagaacgacgggagactgacgcaacgacgacgacggaaagacggcgcgcacacgcgcacgccaacggatcgaaagagagagagaagagaaagagcaacagcaacagcaggcacgangacgacaggcacaacaggaagaggcaaacacacgacgcagacagcaagcaagagaacaacacacacatcgaaagcacaccagcacacgaccgacggagacganagaggagcggacgacgagcagganagagagagacgcacacaacagatcaaacgaacgatgacacgaagcgaagcgacgagcaataccgcaagacacgggaaagcgcgaagacgacagcagacgtacgacgagancgcgcaacggacagcccgcaggcgcagaacacgcgagccaacgaccgcacggcaggcacgcgcgcgtgagangtacgccgccacgcaggcgcgcgcgccaccgcgangacgacgacagacgctggaaagggacggcgcagacgcacagaggacagcacgngcagcgacgacagaccgagagcgagtagtagagngcgcagatganacggagcgcacacgcgacagagagagagcgngaagagaacagacaagagtatatacacagtgcaccaatagacaagaagacggaacgagatgaaggagnagagcgagaagtaagggagcgaggcagcgcgccgcgacgngaagacagtacgtacaccaccgacagaagacgtgtagaagagatcagatcacagacggacagcgagaaagagagagaacgagagacgagacagacgaacagaccgaagacgagcagcacaaacagacagaaaggacagcacgcaacggcgcacaaaaacacacacgacgaaaacaacgaggtagcaacagagaagaagcgaagacgacagagagcggacgcgacggtgcatacacgaggaacgagagcccgacggcgcggagncggcagacagaggaaagcgcagacggcgagaagcatcgcgcccagacgaggagagagcgagcggaggaaggaggagaacgcggcgacgcagcgaaagaagcgaggacacggagaacgaagaagcacacagcacagcgaagggcggactaagagcgaaacaacaccgcagcacgacaagcagacgcaggccn

SEQ ID NO: 97450 - DNA, 486 bp, Oryza sativa
  Clone ID: PAT_MRT4530_95452C.1
atgtttttcaccggaatgaaaaacttcaaaaagcaccaaaaaatgatttttggacatattggagtatattgggtgcgtccgtgtagaaaaatcaattcgtgactcgcgcggcgaacttttgtcaattaatgccaatattggcacacgtgggtgtgatgtttttcaccggaatgaaaaacttgaaaaagcaccaaaacgtgatttttggacatattggagtatgttgggtgagtccgtgtcgaaaaataactccgtaactcgcgcggcgaacttttgtcaattaatgccaatgttggcacacgtgggtgcgatgtttttcaccggaatgaaaaagttcaaaaagcaccaaaacaagatttttggacatattggagtatcttgggtgagtgtcacaccctgagatttttctcccaagcctaaattgaatttataaatggtctcaacaaaataccgctgcaaaagcaagagagaaaccctaaaataatt

SEQ ID NO: 97451 - DNA, 510 bp, Oryza sativa
  Clone ID: PAT_MRT4530_95453C.1
atgtttttcaccggaatgaaaaacttcaaaaagcaccaaaacatgatttttggacatattggagtttgttgggtgattccgtgtcgaaaaatcactccgtgactcgcgcggcgaacttttgtcaagtaatgtcaatattggcccgtgttggcacacgtgggtgcgatatttttcaccggaataaaaaacttcaaaaagcaccaaaacatgatttttggacttattggagtatgttgggtgagtccgtgtcggaaaatcactccgtgactcgcgcggcgaacttttgtcaattaatgccaatattggcctatattggcacatgtgggtgcgatgtttttcaccggaaggaaaaagttcaaaaagcatcgaaacatgatttttggacatattggagtgtattgtgtgcgtccgtgtcgaaaaatcactccgtgactcgcgcagccagcttttttcaattaatgccaaagttggcttatattggcccacgtgcgtgctcggagtacgtgccta

SEQ ID NO: 97452 - DNA, 243 bp, Oryza sativa
  Clone ID: PAT_MRT4530_95454C.1
atggctaccatcaatggcgacgccgagctcatcgtggcggaggccaaggaggaagaggaagccacccacgacggcggcagcgtgcactcctacaacggcctcgtctccaccgcatcgctcatgctcggcatcagcgcggcgcgccccgccgacaagcgcaccgtcctcctgtccgggctagccggcctcgtcaccgacgcctgcagcatggccatcggcgagtacatctccatccacgtgtag

SEQ ID NO: 97453 - DNA, 505 bp, Oryza sativa
  Clone ID: PAT_MRT4530_95455C.1
atgtttttcaccggaaagaaaaacttcaaaaagctgcaaaacatgatttttggacatattggagtatgttgggtgagtccgtgttgaaaaatcactccgtgactcgcgcggcgaacttttgtcaattaatgccagtattggcatatattgccacacgtgggtgcgatgtttttcaccggaatgaagaacttcaaaaagcaccaaaacatgatttttggacatattggagtatgttgggtgagtccgtgtcgaaaaatcactccgtgactcgcgcggcgaacttttgtcaattaatgccaatattggcctatattgggacgcgtgggtgcgatgttttgcaccggaatgaaaaacttcaaaagccaccaaaacacgagttttggacatattggagtatggtgggagagtccgtgtcgaaaaatcactccgtgactcgcgcgacgaacttttgtcaattaatgccaacattggcttatattgacacacgtgggtgagttgtttttca

SEQ ID NO: 97454 - DNA, 333 bp, Oryza sativa
  Clone ID: PAT_MRT4530_95456C.1
atggcgatcatgccccggtcaccggtgccagcagtggcaatgaacgtcacaatgaggcaggtcatgtggcatcgccagcatggcccttttgggctggccgccggcagcggcaatgccgccacgagtagtgttggcgaggtcgtgacggcagtctggcgagaccagatatcagccttgacgagcctcaagatatataccgacatgggtggtgaggctacaaactggtgcccctccaccaccttcctcatcgttgcacagcatgaaggcttcgtgctggccatcatcgtcagcgtagagcacgacaagcgcatatctctatctctactattataa

SEQ ID NO: 97455 - DNA, 937 bp, Oryza sativa
  unsure (1)..(937): unsure at all n locations
  Clone ID: PAT_MRT4530_95457C.1
gctctctcctccgtcgcncgaantcggcccggtcnatnnnctngggncgtgnntnncgncccncaaccnctnnanaaccctnnngngncccccgcggggccccccccaccccccgccccnctcgcccccccccacncccaccacgnntaccaaccccaaccccccccccnngggcnttcncgcgccnnccccccgcccccccccccccccctnnnccgccaccgccggnccgcccccccccccgcccgccctcccgcccgccccccgggagggngcccccccggccgtttccgggtcgggcccngagggngggncgggccncgggggcntgggggccctccttgtcggtgccccgccctttccctcccccggcggttgctggtgtcgttaagccgcccctgccccttcgcagccaccccgggcgctcctccgcagctgtcagccctccgtagttgcccccgccgcagttcctccgccgcaaccgccgctcctccctcagcaaccgttgccgccgccgctcctttgccgccagcgacggccctcctcatcgctggcccgacgcttcccctccaccaccgctcctccctttgcccctccgcaactgtagccgccgccgagccgtcgctcctcctgctgcccctccgccgagctcatcgtggcggaggccaaggaggaagaggaagccacccacgacggcggcagcgtgcactcctagtggctgcgtgccgtggtgctgggtgccagcaacggcctcgtctccaccgcatcgctcatgctcggcatcagcgcggcgcgccccgccgacaagcgcaccgtcctcctgtccgggctagccggcctcgtcaccgacgcctgcagcatggccatcggcgagtacatctccatccacgtgtagctcgatgtcgagctagacgaaatcgagcaccggcgacgccac

SEQ ID NO: 97456 - DNA, 1506 bp, Oryza sativa
  Clone ID: PAT_MRT4530_95458C.1
atggagataaactcagaagccaccgtcaccctcgtctccgtcgtcaccctgcccattcttctcgcgttgctgacccgcaagtcgtcgtcaaagaagagacggcctccggggccatggaacctccccttggtcggcggcctcctccacctcctccggtcgcaaccgcaggtcgcactccgcgacctcgccggcaagtacggcccggtgatgttcctgcggacggggcaggtggacaccgtcgtgatctcctcgccggcggcggcgcaggaggtgctccgcgacaaggacgtcaccttcgcgtcgcggccgagcctcctcgtctcggagatcttctgctacggcaacctcgacatcggcttcgcgccctacggcgcctactggcggatgctgcgcaagctctgcacggtggagctcctcagcaccaagatggtgcggcagctcgcgccgatcagggacggcgagacgctggcccttgtcaggaacatcgaggccgccgccggcggcaagaagccgttcaccctcgccacgctgctcatctcgtgcacgaacacgttcaccgcgaaggcggcgttcgggcaggcgtgcggcggcgagctccaggagcagttcttgacggctctggacgaagcgctcaagttcagcaatgggttctgcttcggcgacctcttcccgtcgctgcggttcatcgacgccatgaccgggctgaggagccgcctggagcgactgcgcttgcagctggacaccgtcttcgacaagatcgtcgctcagtgcgagtcgaatccgggtgattcccttgtcaacgtcctgctcaggatcaaggaccagggcgagcttgacttcccctttagctcaacacacgtcaaggcaattatactggatatgttcacgggagggacagagacgacatcatctaccaccgagtggctcatgtcggagttgatgaggaacccagaggtgatggccaaggtgcaggctgaggtgcgaggagtattcgacaacaagagcccacaagaccacgagggcctgcttgaaaacctatcatacatgaagttggtgatcaaggagaccctgaggctgaatccggtgttgccgctgctactcccccatttatgtcgggagacctgcgaaatcggagggtatgagattgtggagggcaccagagtgttgatcaattcgtgggcgatggcgaggagccccgagtattgggacgatgcggagaagttcataccagagaggtttgaggatggcacagcggacttcaaaggctcccgttttgagtacttgccatttgggaccgggagaaggaggtgccctggtgatatatttgcaatggccacgctggaactcatcgtggcgcgccttctatactacttcgactggagcctcccggatgggatgcagccaggtgatatcgacatggagctcgtcgttggtgcaacggcgaggagaaagaatcatctccagctagtggcatcaccatataagccgatttccatgcaaagttga

SEQ ID NO: 97457 - DNA, 273 bp, Oryza sativa
  Clone ID: PAT_MRT4530_95459C.1
tcaaccagtgagaccgcccaacgccgtcgccgatgccatcctaccagggggaccacccaacaccattgccggtgccatccttcgcgtctccagctcatcgccaactccatccttctcactctccacaccatctaggctcagcttggccaccgcctctactccagccgtgtcgtcctctccaaatctcggtcgccagcactgttccaaggggacccgccaccgaccacgctgatctgctccgcccaagccgccgggactctggtccacggtcat

SEQ ID NO: 97458 - DNA, 1133 bp, Oryza sativa
  Clone ID: PAT_MRT4530_9545C.1
ctatgttctcccgtacgccgtgcccagcccaaccgcggctcaggacgacgctagctcctcgccggcggcgactcagttcgctcgaccgggacgggacgacggctcccctctcccgcgaagctcgccgacggcgacggcgaccgccacatctcgtccatgcgcagctccggtcggaggtacccttctccccgacctctaacaacgagcctcctcctgtcttcagtgtcaaatactctcttgctgagcaacttgtaggagtcgtcataagaaagaggttttagttcataaacagcaccaccgacacgttctgcaacagccatttttcgggtggttgtgattattttgcttccatgatcaccatctagcaaagcaagcttgataacatcccagctcttattctgcaggatttctctaattttatttataagttggaagtctgctagtccttcaaatatgttggctttgttgtcaagttgatggagtatactctttagaatattcctgatatcagatttgttggacaccaatgcaaagaaatggcaatcaaactttactctgagctcatgaagcaatgcgttggcaatcgttgtcttgccgaggcctccaaatccaacaatcgaaattatatctcggtgtttcctcaattttccatcttcctccatgagtgtcttcactagcacattctttggcccatcgagaccgactagctccgtctcctttttgtacatagcacctagccgaggatcaatactctccgatcttcgtgcaatgacagcatcatcaatcttgtacctctcgcggcgcttactcgcatcctcaagaagtttcttgatgtcctttatctcccttgcaatctgatggtgagccacaaccttcttgaataagttgttagtcctgtcaatcatccccttgaagctgaacaacttggcaacggggtgcccatccttaccggcactcaccatgaaggtatcgatagaatcctcgatgtcgtaggacagctccctaacatcaacgtactcctcctggagggactcgatctccttcttcacgcccttctgcagcttgtactccccaaccagcagcttcgcaaatttgaggagcagagtgtttattgctcctgttacaatctccat

SEQ ID NO: 97459 - DNA, 434 bp, Oryza sativa
  Clone ID: PAT_MRT4530_95460C.1
ccgccttatccccaacaccctatcgatcccctcccctttcctcctcacccatggcggatcacgctcttgtgcaccgccctctccccgtacctcctaccaatcccctccacctccttcaaccacgactcagcctccctcttcgtcctctgcaagccgatggtccccgacctacacgcagcgggatgggcgaggaggagaaccagtgcccttgcgtgaccggtggtcggggccgagctggaggacgtccatacggaggaggacgaggtggacgaggaggagggctccgactgctaggagctctccgacaacccgagggtgctcctcggcaacctgccctggagagtcgacagtacccagagcgccggactgtgagacaatccggatcaggagacatgggggaggtcaccaccctgttcgcctcggctgactatgaa

SEQ ID NO: 97460 - DNA, 640 bp, Oryza sativa
  Clone ID: PAT_MRT4530_95461C.1
tttttttttttttttttaactactggagaagatcaatactgaagaagtgatctttgccggaatggcaaaaaccacattagtcctggttttaatagaaaccggaactaaaattaaaattgatctttagtcccggttcaaaaggttaggggcaccttttgatctttagtcccggttggtcccggttgatgttactaaccgggacgtttaatacagtgcaatgcggccctgtctttaccaacaagtaatcaagaattaaaaatatagagagtggagcaaagtacacgtcctcggtcaaccttggacgcatttttcactgccagcgttagcgcaagaacgacctttgtagggcttatctttcttagctttcagcttgggaagagcatcatagtttatcatctctgccttatctttcttagctttcagcttgagatgatcgtccctggcgtggggctggatgcgtcgaccgattgctggctcaccgccagcatgacgcccaataacagcagtgccaccaagcccaacctcgtgctcatcttctccatttgaaagtaggtcaccctccgtagggatacggtaatataaataccgcggtaacctccgccggggtgcggtaaccctggccccgacggtttgggaaacc

SEQ ID NO: 97461 - DNA, 2181 bp, Oryza sativa
  Clone ID: PAT_MRT4530_95462C.1
atgggggatgaatgggagacttggatagctgcagatatgggccaaaacaaaggggccttaataaatgatggggagcagagaatgagtattccagcaagagaattatttgcagcaattgaggccgactcaggcttgttgcctgtgaacagtagcaacactaatgaaaaaaggaagaggcgtctacagaggctcactggcaaacagtcggaggtacttgaggggtttttcagcatctgtgggcatcccgatgatggacaaaagaggcatctgagtgagacaacaggtcttggtttagatcaagtgaagttttggtttcagaataaaagaacacaagtaaagactatgtgctggaaggaagagaactataagttgtcggtggagaatgaaattctgagggatgagaacaggagagttaagatagctcactgcactgctgtatgcctcacttgctgtaattcatcagtacagaaccagcttgccgttgagatggaaaggttaatggggcagagtgagtggctgcaacaagagattgcacggtcgaatggaacacccccggctgcaaaccttgcctttcaacttaattcatcagcagactatgtattttcagggcaacatgaccaacaaatgattgctgaactagccaaaaacgcaatgcacgcattgattattttggccgaatcccatgtcgctctatggtttcccgtccctggctgttcttatgaagtattgaacaagatggcttatgaccaagcatatcctggggataacagtgcaaacgccattggattcaagacagaggctactcgtgcagtttctatggtgatgatggactacaaaagcgttgtggatttcctcatggatccttacaactaccgaactttctttcctgaagttatttccggggcagtaaccaacaggatctacacgtggcctaccagtgatggttataatggggttatacaactgatgactgtcgagatgatgttcccatcgcccctggtaccggctaggaaatgcacattcctgcgctattgtaatgtgctgaacgaaggattagtggtcgtcattgatgtgtcattggacgatggcagtatcttctccaaatgccgtaaaatgccatcagggtttctgatccaatccataaggccaaacagctgcaaggtcactgccatagagcacgtccttgcggatgacaccggtgttcatgagctctaccagccttgtatgaatggactcgtcttcggagctcggcgctgggtggcgaccatggcgcggcagtctgcacgcatgagagatgttcatcacaacaagacagctccgcaagtcagcacgaaggggaggaagaatctaatgaagctagcggacgacctgctcgcgagcttcgccggcggcatcgccgccactggcggaggaacgtggaccgtcgtgatcggcgccggcacggagaaggacatcagggtcgcgtacaggaggaccaccgagggcagcagcagctacaacgcgatcctgtccgtcaccgcgtccctgcgtctgccgctgcccatgaggaaaaccttcgatctgctcaggaaccttactcaccgctgcaagtgggacgtcctggtgcacggcagcgtggtgaaggaggaggtcaccatcgccagaggcgtcgggaacgacgacactgtcaccgtcctccactgcaagcgcgccggcagggaggacaggggaaggaccatgatcctgcagaacaacgggtacgacgcgtcgggctcgttcatggtctactcccagatcgacagcgagctgatgaacaccatggtcctgagccccagcgacctgccgcccgggcggggcgggccgtccctctaccccaccggcttctcccttctccctgacgtcgaggctgcccaggacagcagcggcatcgccctcggcgaggttgggggaactctcatgaccatgggcttccagattccggtgaagctcgccagtggggatcgcatgtattcccggtctgcggcatcggcaatcaggctcatgactgacaccattgccctcgtcaagaagacgctgatgaacgagcattctggtatctacgggggagaaaagggaggtccgtgtgcagataaaaatcaagaacatgcgaaggggattcatcggctccgatcaccctgcatctcccagaatttgctgaattaa

SEQ ID NO: 97462 - DNA, 648 bp, Oryza sativa
  Clone ID: PAT_MRT4530_95463C.1
atgcggcccaaggaggagcaagcggatctaagcgggtcacgtcatcgacagccggaccacgccaccctccctgtggcgtcagcccataccactagagcacaccgtgccctccctgtggctcccgcgatgctcgaagccctcctcgtaaactggttcttgcctgacacttgtcttgtccgggtggccaccgtggggcagcctggtgccatgagaaggatcaccgttcactacgtgaatttgctgccggtcgccggcgccggagaagcacacgtcgatggcgccgcgaattattccggcaaggcatcacagcacaggaagcatcaagctgaacagagccagcagtggaggggggagatcgacagtgacggcggcgatgggggtgcagagggcggtgtactcgaagaaaggggtgatgcggcggctgatgcggtggagtcgactgcggtgggacgcggcggagcaggcggagtgcacgtgtgcctagaggagttctccgccggcgacgccatggcccacctcccctacggccgccactttcactgggcctgcgcactccctggctcgaggctggcgccgcaccccgctcctgcccattctgccgcaccgtcgtcgacacgccggggaaggggaagtggaaggggaaggtga

SEQ ID NO: 97463 - DNA, 2546 bp, Oryza sativa
  Clone ID: PAT_MRT4530_95464C.1
ccggccgggacggggaaatacaacagaatcgaaatacagaatactgggataacgacacactgggagtcacttgcaacctttagggttgaatctccggagatggaaatgaatcaacagcataatgagggcaacgaatctttcgtggccttgatgaacggttttgctggtgacgggacggcaacactaccgaatgatggggagcagagaatgagtattccagcaagagaattatttgcagcaattgaggccgactcaggcttgttgcctgtgaacagtagcaacactaatgaaaaaaggaagaggcgtctacagaggctcactggcaaacagtcggaggtacttgaggggtttttcagcatctgtgggcatcccgatgatggacaaaagaggcatctgagtgagacaacaggtcttggtttagatcaagtgaagttttggtttcagaataaaagaacacaagtaaagactatgtgctggaaggaagagaactataagttgtcggtggagaatgaaattctgagggatgagaacaggagagttaagatagctcactgcactgctgtatgcctcacttgctgtaattcatcagtacagaaccagcttgccgttgagatggaaaggttaatggggcagagtgagtggctgcaacaagagattgcacggtcgaatggaacacccccggctgcaaaccttgcctttcaacttaattcatcagcagactatgtattttcagggcaacatgaccaacaaatgattgctgaactagccaaaaacgcaatgcacgcattgattattttggccgaatcccatgtcgctctatggtttcccgtccctggctgttcttatgaagtattgaacaagatggcttatgaccaagcatatcctggggataacagtgcaaacgccattggattcaagacagaggctactcgtgcagtttctatggtgatgatggactacaaaagcgttgtggatttcctcatggatccttacaactaccgaactttctttcctgaagttatttccggggcagtaaccaacaggatctacacgtggcctaccagtgatggttataatggggttatacaactgatgactgtcgagatgatgttcccatcgcccctggtaccggctaggaaatgcacattcctgcgctattgtaatgtgctgaacgaaggattagtggtcgtcattgatgtgtcattggacgatggcagtatcttctccaaatgccgtaaaatgccatcagggtttctgatccaatccataaggccaaacagctgcaaggtcactgccatagagcacgtccttgcggatgacaccggtgttcatgagctctaccagcctcgtgtgaatggactcgtcttcggagctcggcgctgggtggcgaccatggcgcggcagtctgcacgcatgagagatgttcatcacaacaagacagctccgcaagtcagcacgaaggggaggaagaatctaatgaagctagcggacgacctgctcgcgagcttcgccggcggcatcgccgccactggcggaggaacgtggaccgtcgtgatcggcgccggcacggagaaggacatcagggtcgcgtacaggaggaccaccgagggcagcagcagctacaacgcgatcctgtccgtcaccgcgtccctgcgtctgccgctgcccatgaggaaaaccttcgatctgctcaggaaccttactcaccgctgcaagtgggacgtcctggtgcacggcagcgtggtgaaggaggaggtcaccatcgccagaggcgtcgggaacgacgacactgtcaccgtcctccactgcaagcgcgccggcagggaggacaggggaaggaccatgatcctgcagaacaacgggtacgacgcgtcgggctcgttcatggtctactcccagatcgacagcgagctgatgaacaccatggtcctgagccccagcgacctgccgcccgggcggggcgggccgtccctctaccccaccggcttctcccttctccctgacgtcgaggctgcccaggacagcagcggcatcgccctcggcgaggttgggggaactctcatgaccatgggcttccagattccggtgaagctcgccagtggggatcgcatgtattcccggtctgcggcatcggcaatcaggctcatgactgacaccattgccctcgtcaagaagacgctgatgaacgagcattctggtatctacggggttagcccgttccacccctagattcagaaaaacaccagagggagaaaagggaggtccgtgtgcagataaaaatcaagaacatgcgaaggggattcatcggctccgatcaccctgcatctcccagaatttgctgaattaattagaactttaaggttgtgttaacaacctgtaataatgtttttaaggccaaacttatatcgtgtctttgctgtaataatgtagtatgcgcctgatggatgtcgactgccgtgtaccgatgcagtttgcttcgcagagacgcggatacatttgctatcgtatggatgctcctttagaagcaaaaaaaaaaaaaaaaaaaa

SEQ ID NO: 97464 - DNA, 265 bp, Oryza sativa
  Clone ID: PAT_MRT4530_95465C.1
tttgtttgagagagagagaggggagggggggggggggaatcgtgcgagggaggggtgggtttttcggtctatatctgagttatgaatcgctcccgcgcgccatgtcatgcgaccaggaaatcggcagcttgacatagtccttcctccgctgttggttgggcgcctgctgatagacctggttcgccaccaggctgccgacaccggagacaactttcggcggctgcctaccacacaaggcgaccttcattcccgaccaaacagacct

SEQ ID NO: 97465 - DNA, 362 bp, Oryza sativa
  Clone ID: PAT_MRT4530_95466C.1
aaacaaaaaaactattttgatttgcactgttgggacaaataaaaagaaacggagggaggatgggtttcaacaagcataccaccaaagattgtcgggactcaagggcgctaaaacaccttccgggacaatgaagcaacagtataaagcatcctatatggattcacgggacatcaaaccacgaactcccatggatttgatggggccacacgggtggacaaaacttattgggccccttccgggtggcttcagcactgagcaaggcccttccggcctggttgacaggatggaaccaacttcaacgggaaccggcgagacaccaccgatttccaaaatgggaagaacaaaacgtcaattcctttaag

SEQ ID NO: 97466 - DNA, 119 bp, Oryza sativa
  Clone ID: PAT_MRT4530_95467C.1
gttgtcaagttcacttcttattagttcttccaaagtttgcttttggatcaccttgcgatggaaatagccaaagaggtctcttgtcgccacgagaagctcatgctgttgagactttttga

SEQ ID NO: 97467 - DNA, 886 bp, Oryza sativa
  Clone ID: PAT_MRT4530_95468C.1
atgtgggacccctacaccggcatcccccgccggccatctttcatgcgtcgaagaccacgccacatccaccggcaactcctcctcacacctagtcacggccgccgtcgccgctgccaccggcaccagtcatcgcctccgcagaccgctgctgcaccgtcgctctccgccaccaaggagccagcaacgccccgatgccgcctccatgccctccgccgtcgtcgccagccgacgccgccgctgctgctgtcgccagccgaccaccaaacccggccacccctcgaccgtcgtcgcagccaccgcacctccttctccagcgtctccgcgccgtcacgcccgtcgccgccggatccggccgcctcctcggcagtcgtcgtccggctccaccgccgccagttccggccgccgtggcaccggcaccgtcgtcgctatcgccctgaggacgccgacctcctccgccggcgccggacccccaccgggggccgccggaaacctccccgccagatccgcgccggatctggcggcctcttccaccgccgccagcgcctccaaagctccgccgccatccccgccaaaggccgcgcccgagcacactgccccaccgccggcttaactccccgcgaactccggctggccgacgcagatctgggcggtttctgcctcccgatgccggcagacctccccctgcccttgtgcggcgagacgaagcgaagccccgccgccgctgtccttgccgctgcgcggctttactggcggccggtcgggcggcggaggcagaggaggagggagggagggcgggcgacggcggcctgggcacctcccgtgccgcccgagaggagacgacacgagaggaaaaggtccgctatacgccccctcaagaggtgaatag

SEQ ID NO: 97468 - DNA, 507 bp, Oryza sativa
  Clone ID: PAT_MRT4530_95469C.1
cagatgtatacgactcactattgggcgaattgggccgacgtcgcactgctcccggccgccatggcggcgcgggaattcgattatcccttaccactctttatgtcagttctccttgcgggtagaggtctgagcatattcttaagcttgataaatttacggatagctcagctttagaccatataaaaaacggaggttatgttatgattagaaaatgtctagttttatttctttccttcgctttattgctcagcgtctttcccatgctaaagtgtagatgctgccaatcgaccacgtggcaaagctacctggaaattccaatcctctaagtggatcataaattgggagctgatccctattcattgggtgtatgatggaagagtgtatatttacatgtcaagtgatacgtacgtgtataacaaggatggatcgattaaagagaacgacttcagtgcgctggatcgtatccaggtcatatcctctacagacatggtgaactggacggatcac

SEQ ID NO: 97469 - DNA, 444 bp, Oryza sativa
  Clone ID: PAT_MRT4530_9546C.1
atgggagggaagggggaaacgaatcggcggtccacggctcaccccgggtcgacggcgacgacgggaacggcgaccggagaggagaaaggcagcggcgccgctcgggtcgacgtcgacggcggtgttccggcggtcggcgaccgaaacggagaggtggacgaggtcggcgaggatgcggcgaagccgaaggaggcggcgccgaggcgggaaatggtccggagcgacgacggcggcggaccggagctcggcgctgctaatgacggttgtggcagctggaaatgtcctaactgccctgcaaccgtcattgaggatgaatcctggacgtccacgcaaaaccccaggatggatggcgctgatgggggtttggctgaaccaggggctgggccaaaccagcccatcctcggctggcggtatcttccactgcttctctctgtcgacttgtga

SEQ ID NO: 97470 - DNA, 654 bp, Oryza sativa
  unsure (1)..(654): unsure at all n locations
  Clone ID: PAT_MRT4530_95470C.1
gnnnnnnnnntctgggctgcaggantcggcacganggggggntcnagggactnngacaacggggggaaccncccaccantgatcgngggcntcnnncccatccangtgcncnngtgangatcanccaagccnnnnntcaccggtgaacccgtgngntnctacgcctnntccgccgtgngtttcgggacnccaaggccgggggcgtngcgctcctcaaggnctngcccctcttcntggaaangggcangtnattcaaaggagaaagnccntnnagancccnnntgataantngggggggacccccctgannagacanattgccnatactctcgancncatgtgatncacactctnttagcganactgggtacttctnttgcctatctgaggnngactctcctcttatgagagtnatctnactcgngnccatgtggttcaaagcgnctctcttagattngcgatctatcgcnggntccatgtntctaaggtatttctttagggattccacctcncaaanggccctngtctcgaggntgccnaagtnntccnccgttccnancctttnnaggggtacatccttcnaaanntngcccngcganaaagntcctaattttatnnctnccccggggnngggggaaatcgggtcntttttgn

SEQ ID NO: 97471 - DNA, 201 bp, Oryza sativa
  Clone ID: PAT_MRT4530_95471C.1
atgaaggactcacctgaggatggccggtggggctcggtggcggcggcgcccgggctcggtggagggcggcgccggtcggtggagacgccgatcgggcaggtcggcaccgggcgggcggcgtcgtgctcggtgggggtcggcgacgtggggcccgtcacagatgactcatcggtgacgggctccatactaatgcccgattga

SEQ ID NO: 97472 - DNA, 330 bp, Oryza sativa
  unsure (1)..(330): unsure at all n locations
  Clone ID: PAT_MRT4530_95472C.1
gcgaggcaagagtcaagaccatctcccatggccagtggtgatagtagtagtagtagtagtatataaaaggggagcgcgccacggcttgccaatccgccgcgctggtgtgatgctgcgatcgacgcatccgccgcccagtagcccgagcagcagcagcagcggcggcggcgggggcggggggtcgtcggcgtcgtcgagctcggagaagacgatggtgggcggcgggggaggagggggaggagggagcggttcgtcggcgccgtgcggggcgccgctgctgcggttcctgcccgtgcgggtggtggggcgcggcgngcggctggtggtgct

SEQ ID NO: 97473 - DNA, 173 bp, Oryza sativa
  Clone ID: PAT_MRT4530_95473C.1
atgggtgtgggtatggggacagttttgtacccgcgacgggtgtcggtatttaagtgggagtatttagacatcgtgggtatgagtatggggcaagagaacccgatgggtatgcacccgttgccatctctagtcggggacggagagggtgccacgtacggccctctcaatgagag

SEQ ID NO: 97474 - DNA, 832 bp, Oryza sativa
  Clone ID: PAT_MRT4530_95474C.1
gatatgtggaccaccacgtgggggagtcaagtgtttatagtgggtgagtttctccaaagttggttcataattaattaattaattaatccctattacactggcttatccgtgttatttatggaagggccaaaaatgtgtaatcaccagaaaatgaaaagaaagatgacatcccaacgactgacgccacagcaaatgggaaaagaattggagaaatacatcaaactactttgcagaaataggatgaagtacatgttttttttacattattggttcgcacctgggagtaaggtcagcttcaaccgacacggtcgaatattttgagtaaacaggtccattttatgaaagcagatgatcgcatgttcagtcgccttgcaggcagtagagctggcggatgttgcctgaagcatataaccaatctttgaactgtgcatggagggcatttgtcaattccttcttcctattgtcatcaatttgcagctcccgaatagtcctcctaatatcttccagtgcagcaagctttttgctctgggatgcacaataaatttcaggcaatggaaaaggacagcattttgtaggttcttgcacttcagtcccaaaccaactaggaatcataaagtttgtgaatagatcaggatctagacgagctgcagattcagcctgaacatcagaaacccccgcgggatgggataatgaatcgtgcggatcaacaactcccaacacaaaaggctggtcccatttattgattgcaggatccacaccaacttttgccagatgttcacccaattgtgggtagtcaggcacccacatggagcaacttgtaatttatggttaa

SEQ ID NO: 97475 - DNA, 319 bp, Oryza sativa
  Clone ID: PAT_MRT4530_95475C.1
caaggatgcctttgattatatataacactcctgttttagtcatttcctgtaataatgctttgtcatttcacattaaacgtgattggttactccatcctatctagctacaaattttatatagtttttattcataatttgttatctaagtcaacaactcaacattttaagctaagctaatgggttgtaaggggagaaggttatcttggaattttctggatgtttaatgtaaatggataattatgcttccttaaaaaaagttgttaacgtccttttcgtgtttttgttttaagctgttatgggtcatgaatcatgactaggc

SEQ ID NO: 97476 - DNA, 305 bp, Oryza sativa
  Clone ID: PAT_MRT4530_95476C.1
ttgtaccgtctcccacggctgagcatcctccaaccttgttgtggaacgttacgattttttgatcacggctacactctatctgtttctgcactgatcaactactacaaccagaagcaccggttcaaccagagcctgcttgtcgtcttcaccgtacggcatcagctacgccgatggtatgacagggaccttcgccagagagtaaggttattctggtgagagtaaatattacaacacgtgatgtgtgaagccagactgcctacacatactgggttggaaagagggacaaagactgagactgagacggt

SEQ ID NO: 97477 - DNA, 1857 bp, Oryza sativa
  Clone ID: PAT_MRT4530_95477C.1
atggccgacgaccccctcgacccgccgccggagccgcagccgcagacgctgccggcggtagcagccgcgtccccgtccccgtcccccccgccgctccttctccgcccccgccgcgaggccttcgagcacggcctcctccccatccccaagctcatcttccccgagggcacgctcgcgcacaccctcgcccaggtcaaggacaagctcgcctccgccgcggatggaggaggccgcgtggccgcggcggcgctcgcggaggcgctgcagatcccgcacgagcaggcggcgctcgcgctcgccacgctcgccgcggtgctccccgcggacgaccccgcgctggactccggcggcgggggcagggccgacctccgcgacgtgctgctcttcctctacatccagtcgtacaagcgcctcgtgccccgcgcgcacaaggactcgcccgccgtcaccgacgtctggccctccacctccgccttcgacggctacctctccgcgctctccccgatccagggtcaatcccaatttcccttccccaaaccaacagatcaagcaaaagacataaaaacaccttctgttccttttgctaatatgagtcgtatgcttgtacgcagtaatagccgtcgattcatgccttctcaagctgatgaggaaattcaccagctatcttatctgcaaaagcatatggccaatattcttactctgttggccgattctgttgagggcgaaggtgatgattctctggtattgaccatggagacatttgaacaccttggatttctactgaagttctcagaaggaacacccttaagccaggcagccactttttttgcaaattctgatcctgacatgcctgctgcccctgtacctgctgcccaggttcatgattggatctcacagaatatatctgcttcactggaattctctaccgagaagtccatatcaaaggaagttagccagcaggttacttccgatatagacgtcacaatggctgatgccaatgctagtaatgcaaggaacagcacaccgactggtacaaatcctgcatactacagaaacacaacatttgtggaaggcttctccaaaacttctgttgtcaagcacgcgtctgatgtcaaaggacattcagtgaaggttttaaattgccatgagtctgttatctacatattggcaccattgaagtacgcaactgtgtatggatgttctgatgctactgttgttcttggtgctattggtaaggttgttaaggtggagcattgtgaaagagttcatattattgcagctgctaaatggatttgtattgctaactgtcgtgagtgcatattctacctgggagtaaatcaccaacctcttattgtgggggacaaccataaattacaagttgctccatttaatacctactacccacaattgggtgaacatctggcaaaagttggtgtggatcctgcaatcaataaatgggaccagccttttgtgttgggagttgttgatccgcacgattcattatcccatcccgcgggggtttctgatgttcaggctgaatctgcagctcgtctagatcctgatctattcacaaactttatgattcctagttggtttgggactgaagtgcaagaacctacaaaatgctgtccttttccattgcctgaaatttattgtgcatcccagagcaaaaagatttttctaattcaactctgtgtttacaccattcatattcagcttgctgcactggaagatattaggaggactattcgggagctgcaaattgatgacaataggaagaaggaattgacaaatgccctccatgcacagttcaaagattggttatatgtgccatttgcctatgatggttttgcctaa

SEQ ID NO: 97478 - DNA, 525 bp, Oryza sativa
  Clone ID: PAT_MRT4530_95478C.1
atggagacagggagttttatacaggttcaggcccctgaattatcagaactctggttgtctttccttatccagaactccctcgcggtatgtggtatccataaccctgacaaactaggcaaagacccagaagattggcgaactccattcgtgaagtacctcagggatggttggctctcggaggacgaagcagaagcaaaacacttacagctccgagttgccaagtacaaactagtctccgggcaattatatcgcatcggcgtgctacaacctatgcttcgctgcatctctttcgctgaaggtgaggagatggtgaaagaaatacaccaagggatgtgcggtgctcatcaggctgcaagaacagtctcttctaaaatattttgccaaggcatatactggccaactgtgctgaaagtatgtgtggaacaaatcaagaagtgcgaaggctgccaatggcatggccgaagccagacagtgccacagtgtgagctacagctgatcgcaccagtctggttgttcgcaagatag

SEQ ID NO: 97479 - DNA, 1116 bp, Oryza sativa
  Clone ID: PAT_MRT4530_95479C.1
atgagcaccacggccaagttcttggcgctcgccgtcttcgcggcggcggcgatcctgtcgctggactcgcggagcgacgtgaggcagctggagataagggacggcgacgtcgagctgatccctctgctcgacggcgccgcggggccggagagcatagtgttcggcgacgccggcgaggggccgtacacgagcgtgtctgacgggagggtcctcaagtggctgccgccgccggagcgccggtgggtggagcactcctgctccgtgccggagctgttggatagctgcagaggatccaaggacacgaaacgggagcaggagtgtgggcgtccactgggcctcaagttcaatagcaagactggtgagctgtacgtcgcagatgcgtaccttgggctgagagtggtcagcccgggtgagaacgtgtctaggccgcttgttcctaagtggacagaaagcccattcagcttctccaatggcgttgagattgaccatgaaactggagtaatctacttcaccgagaccagtacaaggtttcagagaagggagtttctaaacatagttataacgggtgacaacactggaagattattgaaatatgatccaaaggaaaacaaggttgaagtcttagttgatggcctatgttttcctaatggtttggctatgagcaacgatggttcttatttgctacttgcggaaaccacaacgggtaagatcctaagatattggattaaaacaccaaaagcatcaactattgaagaagttgtgcaactacatgggtttccagacaacatcaagatgagtcctagaggagggttttgggttggtcttcatgccaagagagggaagatcgctgagtggtcaatttcttacccttggctaaggaaagtaatcttgaagctaccagctcaacgcattcaacgcatcacatcgttcttgacaggatttggtcgtcaggtgatagctttgaggttgagtgaggatgggaagaccatagaagcaatgagtgttcatggtgatgttaggaagttgttcaagtctattagcgaagttgaagaaaaggatgggaacctctggataggatctgttttgtcaccttttcttgggctttatcgtatatag

SEQ ID NO: 97480 - DNA, 212 bp, Oryza sativa
  Clone ID: PAT_MRT4530_9547C.1
atgcgggggatatgcggatttcagagatgtgattgcactaagcgtgccggcaacgtcgagatcaacctttcacggcaaatgagagaaaatgacgtccacccttatcgcctccgccgcccagcaataacaaaaagattcggtcggtgcgccggcgacgtcagccccgcgcggcggagggagacggcgggtgaggccatgggactgcgttttgg

SEQ ID NO: 97481 - DNA, 223 bp, Oryza sativa
  Clone ID: PAT_MRT4530_95480C.1
ggagaataccagcccttgttgcttaacattcaaatatggccatttgtccatccccttttaaaaagtttaaaccttttctgggtcccaaaattttttaagaatgaactttgcctcgcaacttaactacgagccaatacaaaaactttttaccaaatggattcttatttgcgtgcgccccctattgcacaacattttatagaaaatcgtgtgcacgcctcttttt

SEQ ID NO: 97482 - DNA, 1819 bp, Oryza sativa
  Clone ID: PAT_MRT4530_95481C.1
atggcgagagcggcggcggccttcgtcttcgtctcactcaccctcctctgcaacgccagcagccaaggcgaaggggcggcggcggcggcggcgtgcagggcggcggatttggtggtgaggcagagggcgacggggcgggtggtggaggggaagccggagtacgcggtggaggtggcgaaccgttgccggtgggtgacgctgcggctgcacccggtgggcccaccgctgctcgtcccgcaccatgccaggcaggacacggtggtcgccggctacgacgtccctgccgacgcgcgcgtgctagtgcacgtgcgggccatcgcgcccgacccggcgtcgtggcccgaccgcaccgatgcgttcctgccggagcgcttcctccccggtgccggcggctgcgatggcggagtggacgtgcacgggcagcacttcgagctgctgccgttcgggtcagggcggcggattagtccggcgaccaacctggcgaagaagatggtggcgctgggcgtggcaagcttgctgcaggggttcgcgtggcggctgccggacagaggacgtgagcatggaggagctggtcaggctgtccacacgccggaaggtgccgctcgtcaccgtcgccgagcccaggctgccgccacatctctacgccgccgccgccgcatgaacgttgttattcacataggttctggacttctggttccgatgaaagccagtctcgtggtgctcgcggccgccgtggcggcggcggcggcgttgttggtgtccctggacccccggagcgacgacgtgccagtgctggagatacgggagcgcgacgtcgagctgatcaccgtggacgccggcggcgcggtcgggccggagagcgtggcgttcgacggcgacggcgagggcccgtacacgggcgtgtcggacgggagggtgctcaagtggcttcccctggagcgccgctgggtcgaacactcgtccgccgtcatcgagccacaactctgcagaggatccaaggacacgaaacgggagcaggagtgtgggcgtccactgggcctcaagttcaatagcaagactgagtgagctgtacgtcgcagatgcgtaccttgggctgagagtggtcagtccgggtgagaacgtgtctaggccgcttgttcctaagaggacaggaagcccattcagcttctccaacggcgttgagattgaccatgaaactggagtaatctacttcaccgagaccagtacaaggtttcagagaagggagtttctaaacatagttataacgggtgacaacactggaagattgttgaaatacgatccaaaagaaaacaaggttgaagtcttagttgatggcctacgttttcctaatggtttggctatgagcatcgatggttcttatttgctacttgcggaaaccacaacgggtaagatcctaagatattggattaaaacaccaaaagcatcaactattgaagaagttgcgcaactacctgggtttccagacaacattaagatgagtcctagaggagggttttgggttggtcttcatgccaagagagggaagatcgctgagtggtcaatttcttatccttggctaaggaaactaatctttaagctaccagctcaacgcattcaacgcatcacatcgttcttgacaggatttggtcgtcaagtgatagctttgaggttgagtgaggatgggaagaccatagaagcaatgagtgttcatggtgatgtcaggaagttgttcaagtctattagcgaagttgaagaaaaggatgggaacctctggataggatctgttttgtcaccttttcttgggctttatcgtatatag

SEQ ID NO: 97483 - DNA, 346 bp, Oryza sativa
  Clone ID: PAT_MRT4530_95482C.1
attaaattggtcggttaggataaaccgccaataattcaataaaccatttaattagggacaggggatcaataactcggcaattaacaaaagtacatggcgcagcattatccaaaattttagaactttggattttccaatcttttttttgggaggtactaccttttttttaattcccgggcgaacattccttgggcggaaaaaggtgttgggggggccggccggggatcgatcgacggggacaaggtccccgctgttgttgtttacaagcgaaacgggatgacccccagcttggcggccttggtgaaaacatggttgcgggtgatgtccgcgagggaggggcaccccc

SEQ ID NO: 97484 - DNA, 627 bp, Oryza sativa
  Clone ID: PAT_MRT4530_95483C.1
gcatatgaaactatcacttgcattaaatttgtagttcttttaaccgtgcaagttcagcattatatgtagcacaacattagtggaccacaaataagaaagacttatactccataacaaaaaccgcagaggtaaaacgccgtgatatgatgcatgcttacctcttgttctgaatgaaatctctgagctcatcaatgagctgcttctcatccctgactaggttatggatgtccttgttctttgacttgtcgagctcaagcagcatgtccttgaaaactttcttaatatcaggagcgctggaaacagagacaaatgccgtgcagtcgaactgaggtttaagcctgttgcacaccgttctggcaagagtcgtcttgcccaaccctcctccttcaacgacagtgccaacgcgttcatcagctggtcgcttgcctcgtcgatgccaaccagctccgccttgtttctgtacaggcccgatagccgcggatcgtacccgccggtggcggatgaggccgcacctttgatgaacccggccacaaccgggtctgggacatgggaccgggagttttatgactagaggtttgggcaggagccattaaccacgttggtctgaccccccttcggggggggggg

SEQ ID NO: 97485 - DNA, 1607 bp, Oryza sativa
  Clone ID: PAT_MRT4530_95484C.1
atggccacgccctccgccgcgcgcttctccccctcctccaaccccgcgcgccctcctcctcctcgcctcccgctcccccgcttccttccgccgaccccgccgcaggcgctgctccgggcgaggcctctccggacctcggctgccgttgccgcggccgcggccgtcgtggaggtgggcggcgtcaagatcgcgcgggaggatgtcgtgaaggaggaggacccaacaaacaacgttccggacacgatctactcaaagattggcctgcagctgcacaggagggataatcaccctctagggattctgaagaacactatttacgactactttgacaagaatttctctgggaactttaacaagttcgatgacctctgccctcttgtttctatcaagcagaattttgatgatgtcctggtccctgctgatcatgtgagtcggagttacaatgacacatactatgttgatgctcaaactgtcttgcggtgtcataccagcgctcatcaagcagagctgctaagggatggacacacacatttccttgtaactggggatgtttatcgtagggattctattgattcaactcactatccttgcttccatcaggtaaatgtaacgccatatcacttgaaatatttccaaagaaagatggagggcttccgtgtcttcactccagatgaatggtcagattctggcatggatgggaccgcacgcgtgggtgcagacctcaagaaaacactggaaggcttggcaaaacatctctttggtgctgtggaaatgcgatgggttgacacatacttcccattcactaacccgtcctttgaactcgagatatattttcaggatgattggttggaagttctgggatgtggagtcactgagcaggaaattttgaaaaacaacggcaggatagataatgtggcatgggcctttggactaggtttggagcgcttagcaatggtcctgtttgatattccagatattcgactcttttggtcaaatgataagcgattcacatcccagttttcagaaggcaaacttggtgtcaagtttaagccattctcaaagtttccaccttgctacaaggatatgagtttttggatcaatgaagagtttacagagaacaatttatgtgaggttgtcagaggaattgctggagatcttgtagaggaggtaaaactaattgacaatttcaccaacaagaaaggaatgacgagccattgctacaggatagcctataggtcaatggaacgttcacttaccgatgaggagatcaacgacatgcaggttacattcgacgacatctatgattttagatgaaaagttgagttgagatgaaatagagctagttcacgtgttcgaccagacattgattgtttgaccattttcgtctgtacattcattcaaaagtgtgttgatatatggagaaaattttatcagtttcctgatgatccttgtaatctgctgagatcaaagtccctaagcaatttagcatcatccgcacgccatgactgtaacgataataagacggtgctcattttgaatcaactaatatacagaaaaacaaactaaaaaaaaaaaaaaaaaacctgcagcccggggatccacctagt

SEQ ID NO: 97486 - DNA, 3042 bp, Oryza sativa
  Clone ID: PAT_MRT4530_95485C.1
atggtcgtccgacatgtcgtgaaggaggttgggagttcggctaactacccgatcttgacgaaaaccaactacggagactgggcgttgatgatgaaagtaatgcttcaagctcgcagcctctgggaggctgtgaacaccggagacactgacttccaggaagatccgatggccatggaggccattctccgagctgtgccacccgagatgctgtccacgctcgttgtcaagccgatggccaaagacgcctgggatgccatcaagctgatgcgtgtcggtgtcaatcgcgtgaccgggcgacttcgcaatgcggagcagtgcaagggctacggtggcaagggcggccaggacgccggcaaactgtatctcacggaggaacagtggggcacgtcaaaaggagaaacaagccaaggcgggaagggtcattgggcccgagaatgccgcctgcccaagaagcaggaagcccatcaagccaaagcagagtcaggagacgacgatgaggagccaacgcttctcatggcccgagtgtgctcggtgattgaaccagagcgcggtggcaccccgccaccggcgtcgccgtcgtcgcttcacgtcgaagaggcaaaggtgtttgctcaccttgatgatgaaaaacgctgtgactatggcctgtggtacctcgacaccggcacaaccaatcacatgacggggtcgcacgctgccttctcggagttggacatggcagtgcgcagcaccgttcgctttggagacggctcggtggtggcgatcgaaggtgtagggcagctcaacgagatacggtgtcacgttgaggtccactgtggcatgatgcgcatctgggaccctcactgcaaggtgcttgccaggatcaagaggagtgcaaatcgtctttacaaggctagcgtcgagacggagacgggaaggcgacttcgtgttctacaaactgacaacggtggtgagttcacatcagttcaattcgctgagtattgtgctgaccggggcatgcagaggcacttctccgcacctcactcaccacaacagaacagggttgtggagaggagaaatcagacaatggtggccactgcacgtgccctactcaaggcaagagggataccggcgcggttctggggagaagccgtcaccacgcctgtctacctgcacaaccgggtgacgacaaagatcgtcgaagggcgcacgcccgatgaggcatggcacggacacaagccggttgtgcacttcctacgcacgttcggctgcatcgtgcatgtcagggacacacacccgaacctgaagaagcttgatgatcaaggctcgaaggcatacaaggtgttcgatccggtgactggccacgttcacgcgtctcgtgacgtggtgttcaacgaggctgccagctgggattggcacagctctgagggttcctctgcaaccccggccattgaattcaccgtcgaatacctggctgaagctacccagccgggctcacaagcttcgggggagtcgccgccacacagtgaaatggtctcgcccatgccggctggcacattgcccgtaggcatgcacgatgcgagcaggactcctaccttcgtctcgccgccgggaggtggttcggagaacatcgacaacgaccacaatgactgcccacagcggtttcgcaagctggacgaaattcttggtgagtgcgatcctccccgtccaatcatgcataagcttgtggagggcgagctgcacctgcaggtgttagaggagccggtagcactcaaggaggcagaattagaggagccgaacggcacctggcacctcgctgatctgccgccgggacatcgagcaataggcctcaagtgggtctataaagtgaagaaggacacccaaggtgcgatcgctaagtaccaagctcgtctcgtggcgaagggatatgtgcagcaagccaacgtcgactttgaggaggtgttcacgctggtggcgcggctggagtccatccggctactggtcgccctctctgctgagcatggatgggttgtgcatcacatggacgtcaagtcggccttcctcaacggtgagcttgctgaagaagtatacgtcaagcagccacccggtttcatcctcgccagtaaagaggacaaggcgccgcgcacctggaaccagaagctggacaacaatctcaaacagcacgggttcactcatagcgagtctgagcacgcagtgtacgtgcgcagacggggcacatcacagttgctcgtcggcgcatacgtggtcgacctcatcatcgccggcggtgaaacacgggagatcgaggtgttcaaggaagaaatgaagcagttgttcaagatgagcgatctgggagagctcactttttacatgggcatcgaggtgcaccagagcacggccgcaatcactctgcatcagggtggttacgcgcgccggctgctgaccaagactaggatggatgggtgcaatgcctacaccactcccatggagactcgcctacaactaagcagatcaagctccgcctcgccggaggacaccactgaatatcgcagcatcgttggaagcttgtgttacctggttcacatgcgccctaacatagcttttgcagttgggtatgtgagcaggttcatggagacccccactagtgagcacatggcggctgtgaaacgaattttgagttacgtcgccagcactctcgactttggttgttgctacaacagaagtgtcgggccggcgacattgacgggtttcagcgactctgacatggctggagatgttgacacccggaagagcaccatgggagtcctcttcttccttggcacaaatccgtcttccagtgaagctgaatatgttgcggctacgaaagcaacctgccaaggcgtgaggttgagccagctgctaggagagctcagcggattcaagccgggtgccttcaaactcaaggttgacaacaagtcagccattgccctcaatattctgaccaaggctcttgggcgcgtgaggttccatgaactccgcactcagatcggggtcatcgagatcaagaatcagcacaaagtttag

SEQ ID NO: 97487 - DNA, 150 bp, Oryza sativa
  Clone ID: PAT_MRT4530_95486C.1
aactaagaccagtttgattgcggggttggtaccaaaattaaaaagggccggattcacaaaaaagcaccttttactaaagcttaacattacagggccaacaagaagttgcttgcgggccaacaattggtggccaagccccccccattatta

SEQ ID NO: 97488 - DNA, 157 bp, Oryza sativa
  Clone ID: PAT_MRT4530_95487C.1
tggggtgcattgtggccccaatgggtggtgaccttggagtttgggcctgcttgatggtgagaagatgatgcaagtgttgagtggagcacaaatgtgtgctggaatgggctgtgtaaaatgatggacactggatgcgatgatatgctgacatgttgga

SEQ ID NO: 97489 - DNA, 1021 bp, Oryza sativa
  Clone ID: PAT_MRT4530_95488C.1
ctagctggaaattacacatggtaatttgatgcatatatataagcaaagcaatgcaggatggttagagagcgagcttgccttagcggtgatggtgatgatgacggtggaggccgggaatggcatgacgctggtgtgggtgatgcccagccggagctcctccacctccgacagcaacctcaccagcaaaccccgcgagttcccgcactgcacccgcaccagcacgctcctctcccacacccgcacctcgatctccggcacccgcccttcgccgtcgccgtcgccggcggcggactgccggccggagcacgacgacttcctcaccaccatggccgccggccgcccgccgccgtcctcctcctccagcgtcttcaccttctcctgcaactccttcacatacttcaccgcgtccccgaggatggtcgccttgtccatctttttgaggccggggatgacggtggagagctcgatgaaccgctggttgatcttctcccgccgccgccgctccgcgattatgtggtcctgcacgtatcccggcgccgccgccgacgacgacgacccgccgcctcctcctttcttcaccgccgctctcgctgtcgcggtagtctccatcgcctgcagcggcgccggaactactccgccgccgcctccaccgccgctatcctcggtggtcggctgcgccgacgccgcgctgaagttccagctcatcggcctgtgccccctgccgccgccgccggtgacatgcggggaccacccggcggcggccgtggcagcgccgccgcctgggctgtcgctggagctccagctgttggcgcggtggacctggtccacctgcactgtcaggtcccggaatccgccgccgccgccggccgccgaggcgttgcggagagcttgcagcgacgggaaggcgccgctgtcgccggcgacgtcagtggcgtaggctgcggcggcggtggagtcggaggggagctggtgcagcgtgtccatcgcccactgcatgaagaagctcgagtcatccatgtcg

SEQ ID NO: 97490 - DNA, 549 bp, Oryza sativa
  Clone ID: PAT_MRT4530_95489C.1
atgccgcgcgagcgtgtgactgtggactgtggtgtggtctccgtccaagcagcccactccaaacctttgccttccctttcttctcctcctgcttccccgtctcacctcctcctcgtcggccgccgcctccgccgcatccgcctccgcctccgccttattgctcacttcgctccggcgacggaaaggtaccaccggccggccggcagcttggttgcgacaatcgaattgagtgcaagagaatacaaaaaattcgcgtctcgtcccggccttagtgaagagggcatgaggttcctgggctggtacctcaagatcgcggccggcggcgcggccataggcgctgccatggagctgttcatgatccacaccggcttctatgagaaggtgactgtgttggagtcagagaaaagagcttgggaaaccagcccagaggctcaagccatgagagaagccctgaatccatggaggaagcatgatgaccaagagaaaagatagccctagactcattgccacccttcaattgtaagcccttcatgaggtaatttgttggat

SEQ ID NO: 97491 - DNA, 196 bp, Oryza sativa
  Clone ID: PAT_MRT4530_9548C.1
attccggtcgaccacgcgtccgcaagtgtctggatatgtttgcctattttggacgaagtttagctagctgtaacaaggctaaaacaaataccctaacttgtggcctggggggagccagctgggttatttgcaagaacctattgaagccctttttaacccaggttttttaaacttggatttcaacttatattataat

SEQ ID NO: 97492 - DNA, 384 bp, Oryza sativa
  Clone ID: PAT_MRT4530_95490C.1
atggaacatatcgtgcgcgcgttaattacgctcgccgaccgaagcgccatcaccatatctccaggcaaaacgaaccggctcgtcccgattcgtgtgctactcaggatgagagcctctaggcactcgtccctagccggagccagcgtgctagctcctggagatggcacgttggtcccggtcagatatataccaggcttcatcccaaccattgcaagaaagacattgtatgaagaagggcagacatgcagtttgctaagctgacgcgtggaggacaaaaatgactggtttgtcaccgatctgacactggtcatgtcatcggtagacaaccgcgttcccacgttgaacctgcttccggcggagtggagatccaccagaacacaggag

SEQ ID NO: 97493 - DNA, 589 bp, Oryza sativa
  Clone ID: PAT_MRT4530_95491C.1
aaaacccaaaacaagtcccaaacccctctcctctcccctctcccctctcatcgcttctctccccgagccgccgccggagagcaagaacacggaggagcgagcgggtcgtcgagggcgatggcgggaggcggcatgttcggcggcgccggcgcgttctgggcgacgcgggcgctggaggtggtgaagcggaacgactccccgggactgctctggaagcggatcaagctcaccaccacccgcaagaacaacgccaagaagcgcctcaagcgcctctggcagaatgaggcagttataagggcttgtggtgaagcagaatcgtcgtcgtcgtcaacatcaaacaccgcatcggcctctgggaaacaagagtagatcccaaagtcaatctgatgacatgcacacaggtttaaatgcaatttgaaaaggcccagtcagtgacctttgcatgacaatgctgaaagcctctccatgtttccaagctttgttacttcatcaactggaacaagtacatgcatgtacacatccaaccttttttcatcaagaggacacatacatcattgcttgctgccaaaaaaaaaaaaaaaaagcggcc

SEQ ID NO: 97494 - DNA, 2574 bp, Oryza sativa
  Clone ID: PAT_MRT4530_95492C.1
caggatcgtcttctcgcgcggcagtgaattcgcgccccacgcgtccgccgcactatttccgtccccttgcccaatcgccgagtgtccgaacgcaggccgccgccgccgccgccgcgcacccatcgcctcctcctcacatcgcacccccgagcagccgaatcctccgtcgcgcgccgccccttcctccccgctatgtcgggcctactgaattcaaacctgaacaattctgcatcaaatcttcaagactcatctggaagaccgtttacaggatttcttttctggtcaatctggatcagttccaggggggttccatcactctggcttgcacaacatgcatgcaagtttaaatatgccaaatatgcctggatcgttttctcagaggaatgctgccatgagtggccttccatcctctggggttcaacagcctggagggagcatgcctgggagatttgcttcaaacaaccttccagttggcatgtcccagatccctcatgggcattcaggagtcggtagtagaggattgaatgttggtggaggtccagcatttagtagtagcctgaatattggtggtaccattcaaggcttatcctcaaacctgggtgctggtggtagtcgtaattctgttcctgggatgtcagtatctccatctttgggaaatttgggtcctaggatcactggttctgtaggaaatattgtgggtggaagtaacattggaaggaatataagctctggtggattatctgtgccaagcatagcatcacgcatgaatttgagtggcaatgttggcagtggcggtctgaatgtccaaggatccagcaggatgatgaatggcattcttcagcaaggatcacctcaaatgctgaacatgatggggagtttatatccaacatctggaggttctttatctcagaaccaaatacaaggaggaaataattcccttggttctatggggatgctgcatgatgccagtgacggtgctccatttgacatgagtgattttccccagctgactggtcgacctagttctgcgggtggtccacaaggacaatatggctccctacggaagcaaggagttggtgttaacaccattgttcagcaaaaccaggaattcagcattcaaaatgaagacttcccggctttacctggatacaaaggcaacactacagattatgctatggagttgcatcacaaggaacaacttcatgataatgtacctgttatgcaagcgcaacaatatccgatgtcaagatcagttggctttaacttaggaagtaactacccaccaaatcgtcagcaacaccagcaaggtgctaattcagttcagaatgctggtcccccaaatatcggactaagaccactaaattctccaaatcaaacttctagtttgggatcatatgagcaacttatccagcaataccagcaacctcaggctcaaaatcctttcagattgcagcaggtgtcttcagctacccagtcatatagggatcagagtctaaagtccatccaggggggccaaacaccatctgatccatatggcttgatgggattgctaggagttatcaggatgaatgatgttgacttatcatctcttgctttaggaatagatttgacaacattgggtttaaacttgaactcaccagacaatctgtacaagacatttggctctccatggtcaaacgagccagcaaaaggagaacctgagtttcatactccagcttgctactccgctgagcaacctccaccactacaacctatacattttcagaaattccagacgccaacactgttttacatcttctatagcatgccaagggatgaagctcagctatgtgctgctagtgagctgacatactccctccggtataaaaatgttgacgttctagccttgtatccaaagtatggtatactcgaggatggttctaccataaagaagtgcgtgtgtggctcaccagaattccaaatgttgagcctctggtcaaaacacctcattatgaacgaggatcttatggttgctttgatccaaacaactgggagacaatccgcaaggacaactttgttctccattatgatcaaatagagaagaagccagccatcccttcatcccaaaacgttaggtgaaacatttcttatacctcctggctcaagttttatccttttttctcaaggggaggaagaaatttgtgcttacgctaagagcagtgtcatgacctaactctgaggacagtgagaacgcagggccatgccgatctgcagaggggaggctgcaaaacaaaagcgggaatgcctgcttaacccttgtaattagattatagtggtgaagttttcctttaatcgtttgtagattgcactctcagcaacatctccaggtgaccaactcttaggaatagcaagtcttaaacatgcttttttaccgttaaagctttcggtgtcgaaacgtagttggcaaatgcacatatcggcgttggtgtttgcccttttaccttaaaacaaagtacaatgtgggcattaggcgccagattgatttgcttaattttggcagtcttaaaacctaggcatgcttaatttgcttaacaa

SEQ ID NO: 97495 - DNA, 369 bp, Oryza sativa
  Clone ID: PAT_MRT4530_95493C.1
atggggaagttggctggtggcggaggcgttctgggcagtggcggaggatttccgggggcggaagtggatgggctctgtgatgtccatcttctcctgctgacgttctctagctacgcttatgccaccgtcgctatggacgccaagcttgccgcgctcttcccaacaaatcggccacatcacagtggaaagaggcggcggcggcagtggaagagggatggatccagcttgctcggcgataaggagggggaggggaggaagggagcggtcgagcgcccttcgacgatggaccacgggagatgcaacaggagggatgatgaggtggaggctgacatgtggggccggtgccacgtgtgcggccacatggactaa

SEQ ID NO: 97496 - DNA, 418 bp, Oryza sativa
  Clone ID: PAT_MRT4530_95494C.1
tttccggtgaagtccatggatgtcgtatggactccccacgatttccttccgagaaatcatatctgaagcgacacttacccgtaactccgcggctatggcagtgacttgtgaagcagacgtcagtggagcgagctgtatgcgcgccactgagccacagagccaatgctgggcggtaactagctccagtggaagtgcaggggcggcaatgccgatgattcgaatccgcgtcgctcccgtggatcgctggccgtttgttggccactgcggcaaaacgctagctggacgccgtggacgggagcgactcggcggcgtctttttagaacgttcagtaccagtccattgcctcccctcttttgcctgccagtggggcccacagggaccaagggacattgggcccacctgtcaacgacagggctaa

SEQ ID NO: 97497 - DNA, 445 bp, Oryza sativa
  unsure (1)..(445): unsure at all n locations
  Clone ID: PAT_MRT4530_95495C.1
actataaaattaacatatanttgtgcccaaaaaagggccagcagggcgccgaaaaaaaaagaaacatcaatagcgccaatagtgtacaagcacaggtggcaaaaagagacaacaggcctgatgctcggtaaaaccgagccgtttcagctaaccataaatgtcctcgtcagcatccgcgctctcggcgccgaactgcctcgcgccgcccgcggcaccaccgccgtccgccgccggacgagcccgctgctccgcgtccagaccgacaacgggcgcattgtcgccctcctccatgcccagcttgcgctccatgttgcgcttgtacgccatgtacttggcgaggtcctccggcgacacggaacgcttgccgtacgacagcgcagacagcagcatcttcttggagatgaacgggatgatctcgaccttgttctcgtcgtccgagacatac

SEQ ID NO: 97498 - DNA, 286 bp, Oryza sativa
  unsure (1)..(286): unsure at all n locations
  Clone ID: PAT_MRT4530_95496C.1
ctcacaggcacagctcgatcgatcgatcgatcaccatgtccgcctcctccactcgcattagtaagctcctcgcgttgtngctgtnctgcncgctgtcgctcatcatgtcctccaccgncggnggcaccaccactgccacgacggccgtcggtccagcagcagctcagcctacgcggcggcaggcgcggcgaaggtntcgtgccaantccgacgacctcgacggcggcgtcgaacgtagcantgcgatacgacttccaagaagataccactggaaggagaagggccg

SEQ ID NO: 97499 - DNA, 333 bp, Oryza sativa
  Clone ID: PAT_MRT4530_95497C.1
atgagaggacgcggtgacggagctccattgccggtggtcatgttcttggtggtggtgctgctgttggcgaacgaggtggtgaccttgggctacggctgcagagctctcaaacaggcggactgcgcgatggcggccacgccgaagcacggcggcacggtgctgatgcgagcggcggcgccgcccggccccggcgagtcgagggcagcgatgtacggccgacaaacgaaagaatgctggccaaaatttgtcaaagagcatgagaaaaacaggttttgttccatcgatcaaggttgtcagccgtcagacaactgccactgtttggaagagagttga

SEQ ID NO: 97500 - DNA, 240 bp, Oryza sativa
  Clone ID: PAT_MRT4530_95498C.1
ggccgcgggttttttttttttttttggggggagaggaggtggcaacaatatactacgattgatccgtacagaggcatcatgtttaaacttgcatgacatttttattcagatttgaatgaccccgatgttgcaccttggcacacactatgatgcatgactttatttttgtgtcctatactactataggggggggggtcactaccagataccaccgacggagggaatgctacagggagcacg

SEQ ID NO: 97501 - DNA, 434 bp, Oryza sativa
  Clone ID: PAT_MRT4530_95499C.1
atcgaggggtccggcgtttgttgtgctttattgagggggaattttttttcttaccttccgagctcgtttccgccgcgggcggcgtcgcagagtgtttgagaaataatacgagtcaatgaaattccgcaaagggacaaaggtggaggtgttgcacaaggggggtgcgccattgggttcctggaggcctgctgagattgtttctggcaatggacacacctatcttgtaagctatggctcatgtccaactcagggtagtgtggctgcggaaagggtgccaaggaaggcaatgagacctttgcgcccacccttggatggtattgtatgctgggtcaaaggtgagattgcagaagtctttgacagctacacatggaaggttgcggaagtggtgagattgcttggttttagttactatctcgtcaggctccttggatcct

SEQ ID NO: 97502 - DNA, 2328 bp, Oryza sativa
  unsure (1)..(2328): unsure at all n locations
  Clone ID: PAT_MRT4530_9549C.1
gagcgacttaaaccatattcacatttattaaattcagtattgaatgtctggacagtataaatccaactatagcgtacaaacaaaaatgccagaaaaaagagggagcatactgatggttcagattgaagaatcatgttgctttttcccagatgtgctaatctgattttagtcgtagttacaacactgcatctctactcaaatgaccacattaagcaaataaatatctgatgttgataggaggcctctaacatggacatacaaatgaacgagcctaccaaaatcgaaataaagcatggncatgggagtttctcctcgggtatttgccaagtcaccatctatatatcctttgtttgttcagccctcaccttccccttactaacccaatggctcataccaagcatgtaacttgagtgcagttaaagatgtgtttacaacagacatatccagaaatttgcatgcagcctgcataagcctctctatctggctctttatagcattttcatatgccttctgcagtgaactttcaagttccctggtagttgtcactgaactaacagcaccacgtgcataaaaagtaggcgctgaaggatcggcagttgcatggccttttggcgattgattggaagtacttgcttctcctgattgtggaccatttgatgtagactgtggaggagttgaatacctgttcaaattgttcgctggaggataagcaaaggatctcccatatagggaagcagccgaagcagctgcttcaagttttgcttggcgcctgcttatgttctcacctgctgctcgttctgaacctggtgtgccattaccaggctgaactccaggatgaactccatgcggacgtgctgcagtacgcccattatctgggggcagaattggagctctacatgtagggcaagtgtgttggcgttctaaccatgacctcaaacaatggacatggaacaggtgcccacaaagcagcttttttgctgtggtcatctcctcacggcaaataatacatgtagcatcactcgcattgagctcatctgctgtggcatctggaaatctttcattcatgttggaagttatctttctgtagcgtacataatccgcgatacggattctgaagttgcgaaatgtctcatacagctcacgtatcaagtgcagtgggacaccatagttcaggaagatagctatgaagaagagcatatacaaagacaagtgtacaaggtcactgatgagctccaagtaaaatgtatacactgcctttttctcccattgaccttccattagcatgtcaccaaacgaaaaagaagattgcaacagacgccttcccgcttgtgtatgagcgacctgagccgagttggacaggaagaggcagtcgacgacgagcaggaacagcatgaaggagacgatcctggcgtgcgacagcatgggcacggagggcgtggtctcgatgtactcgaccctcttctgcgcgagccagtgcagcgccttgacgagcagcagcgcggcgaccatggcgaggaaggagacggagaagtcctgcctgaagatggtgaccgcgaagaggatctccaccacctcccgccacgcctgctcgttgagccgctccacctcggcctcccggagcgtccccaggaagagccgcttgacgagctgccaggcgacgcacatggcgacgaggcccgtgttgaggagcagcacgaagcagatcttggaggtggagaggtacaccatcgccgggtagaactgctccctgctgctgaacgcgtagtacaccgccgtcgccgtcgccatcaggctgaacgccgcgtacgtctgcagccgaatcatctccgccgccgccgccggcgatcccgccacaggtgtggtgtacgcctggaagtgcttccatgctaccgcagcagcaacagctgcttgtgccagtatgaatggcaagcttgacttgccactcctccaaaccttaaggctaagcacaccaagggccaatattgcaaggccaggtgcaacaccgaaagtaagacttacggtactcctccaaaacagaaatccaacaaggcccatggaaaataaaattccacgccgaatcatctccgccgccgccgccggcgatcccgccacaggcgatgcgattgcgagcacgatggtgatggcgggtggattctccggctctaggaggaggaggaaagattgggcggagacattgtctgcggggatttttttttgattcgtggataaagccgccgcgattttggttcgagagggtttgcggaaaaaaaaaatcttgttgttgttgttttatttatcttttcttttcggtttttgtgtttttttcct

SEQ ID NO: 97503 - DNA, 249 bp, Oryza sativa
  Clone ID: PAT_MRT4530_954C.1
cttattgttactcccatctcagtctcctaattggcatcggtagcttctagctagcttaattaattaattagccatggcggaggagaagcaccacccaccacctgtgcgcaccaacaagaaggacgactagccgctcaccggaggagacatactaccgccagggcagatacacctggcagacggttaccaccaacgtggcttacctgagctggccctagttcttgaggcgctcctcggtggcgctttcag

SEQ ID NO: 97504 - DNA, 516 bp, Oryza sativa
  Clone ID: PAT_MRT4530_95500C.1
atcgtttttcactgccaccgccgccgccgccgccgcctggtccatttacgccggccattcttgccttgtcctccgccaccacaccaccattgccgcgaatgcatgcctcttcttcgattgattgaattcaaagtgtgacctttttgttgtctcaaacgaacgacaaggggtggaaaggtagtcgacgcaagtcgccagttcgatcttgacctcgctcatcggaactagacagcccatgaagaacaagaagaagggtagtcgttgcaaccgcaacgtgagcagcattacatcttccttttccttaatttgcattgcatctctcaatcttctcttgtctgttgatccatggattgatgctcttgtctgttgatccatggattgatgctctagtgggttgctgcaatatcttgatgcagaaatcagatcccgtgatgctggatgggttcaccaagctacctgaagatgtcctgctcaacatcctggaccgtctcaacacccccgacgctgtcagaacct

SEQ ID NO: 97505 - DNA, 109 bp, Oryza sativa
  Clone ID: PAT_MRT4530_95501C.1
gcaggggcacctcgcatcgataagtggagattggcggtggtccccgagcttcgcctctcgctggcacccgtccttgggttgcatcgatgacgtcggcaacgagatctag

SEQ ID NO: 97506 - DNA, 774 bp, Oryza sativa
  Clone ID: PAT_MRT4530_95502C.1
atggccgccggaaatttcagggtccgttacacacagcagttttcggacttcaatttaaattcactcatgaccgttgaacttcgcatggtgttgtcgattactccttgtctctacggttctcacaccgagatcgaccaatcgagaacgacaacgacctcgacatcagaagtcacgatcggttacatgagttcatttaagcagaagtcgggggctactgtcagggttacggataaggaaattcattatggagtccacagatggaaggactcctactcggacaaaattggggacctccggggaggacctaaggcatcgaatctcaccgccaacagaaccaccacatcctacgaagtcggagctttcaggagccaagtcgccgggaaacggaaaggacgctacggtgtcgagcgtatcatcggtcgcagtttggggcagcgtccacagcctggcctggtcgacctgatccaccccccccccccgcagtggggcttgggaccggctggccctgcttgccgcagcgcgagggtcgtggacttatgttccccttcctgcgttcccgaccccccgcggtggtcgcgacaggccgtgttctgctggcataacgtcgcccggactgtgcgcgtggagtgtggggctgccgccatgttcggtcccttacgtggtgcgataattactgggatgcgcgagagagaaggaatggggtgtggacatatttcggccgtctgggggctagagggtggtggtgcggacttgttgctcccgtggtctcgctga

SEQ ID NO: 97507 - DNA, 1071 bp, Oryza sativa
  Clone ID: PAT_MRT4530_95503C.1
atggctcgccgtcgtcgaggttttccggcgacgttggtcacgctgctgcggctcgtcggctgcctgcttcttgccttcttcctcgccgcgccgccgtgcgccgccgcgcagcaggtcaagacgtcgcacgcgcagttcgcgttccacctcccgctccccgacggcgtcaccggcgccgagagcctcgccttcgactcctccaaccatggcccctacaccggcgtctccgacggccgcgtcctccgctggggcggcgccgccgccggctggaccaccttcgcgcaccacgaaaactaccggaagattccgatgtgcacgacgccggtggcgccggcggaggagacggagagcatgtgcgggcgcccgctggggctcgcgttccacgacaggacgggcgacctctacatcgccgacgcgtacaagggcctgatgcgtgtcgggccgcgcggcggcgaggccgaggtgctcgccgccggcgcggacggcgtcccgttcaacttcgtcaatggcatcgacgtcgaccaggccaccggtgatgtctacttcaccgatagtagcaccacctacccacgccggtttaacagcgagatcatgatgaatgccgatgcgacggcgcggctgctaaagtacgacgcggcgacgaagcgggtgaccgtgctcagggccgggcttccgtacgccaatggcgtggccgtcagccgcgacgggagccacgccgtggtggcgcacacggtgccgtgccaggcgttccggtactggatcaaggggcccaacgccggcgagtacgagctcctcgccgacctgccgggttaccccgacaacgtccggcgagacgccaatgggggatactgggtggcgctcaaccaggagaaggcgcggctcgacgccaccgcggcggcggcggtggctcctccggcgaagcacctcgtcggcgtccggctcgacggcgatggcgtcgaggtcgaggagctgacggctgccaagggtgtgacgctcagtgaggttgtggagaggggcgggaaattgtggctcggctctgttgaactcgatttcattggcctaatgcaatga

SEQ ID NO: 97508 - DNA, 273 bp, Oryza sativa
  Clone ID: PAT_MRT4530_95504C.1
atggttcatctcttgccaaccatctactgcacaacaagattcctgaagtggttcggctgtgcaattcatcatcttctcctgaatcctggcctatcagtcagagccgccgccgtcgtcgcggccgtcgccgtgtcgtccctcgccggcgtcgcctacgccgccgacgccccggcgccgagcccgacctccggcgcggccgccgtctcgtcgtcgctcgtcgccgccgtcctctgccccgccgtcgcgctcctcctcggcaacctccgccaatga

SEQ ID NO: 97509 - DNA, 4623 bp, Oryza sativa
  Clone ID: PAT_MRT4530_95505C.1
atgacatctatgggagctaaagtaaatgagtccataaatgatggaagggcaccgtatgttttcaagataagtggtcaggtctgtcatagaatgggctctttgctgccattagagggtcgtcgcccagaatatgcacaattatatatttttgacacggaacatgaggtctcaaaccgaatcaacgttgcttcatcttcccgtgcaccctttcatgcaaaccaagaaattgttgccaacttgatagaaatgttcaatacaaataatccaattgttcagctattcaggacagcacgtgagcgattatctatagacacatctgatcagattcagataagattatttggcaaaagggatgcacatggagatatttacagtgctccggttgcttctgaagttgttggtctaattgtgggtgatattggatcaagtgatataggacgggatattataatacaagaccgttcttcaaatttgcagcagataaatgaaaaccattgcaagtttatgtcaatgcaatatcctcttttattcccatatggagaggatggttatcatgagaaactaacctacaatacaacagcacgtagtcaagccattaaacgcaccaaaatgaccccattggagtactttgcatataggctacatgataggccaagagacttcaatactccattaagaaagtatggttgtcttgatctatttgtcacattcacatcaaatccggcttggcctgaggtcagggaggctttagcacgaattccaggtcagcaaccatctgaccgtgctgatattgtcaatagggttttcaaaatgaagctcaatattttaatggatgatattaaaaaacgtgaattctttggccctattaatgctgaagatgatgatcttgaagaggtcattgatgatccaaacaactctaaatcaaagctgactgcatggttagaagccaatatggagaacccttcagcccgacaactaacatatatagaatttcctgaatattggacatggcacaataaagaaaaatattgggatggccatcgtggtgcttctcgcagaattggccgcattgctcatgtcagcccttcacaaggagaagcttactacctacggatgctactgcacattgttaggggcccaagatcctttgctgaaatcagaactgtatcaggtgttgaatatcctacatttcgagcagcatgtgaagcattaggtctccttggtgatgaccaagaatggtcaaatgctataaaggatgcagctcaatgggccttaccattccaactacgccagctttttgttacaatgttactcttttgtgaggtaacaaatcctactagacttttcaatgaacatatgtcatgtatgagtgaggacatagcatatcgtacaacccgtaacacttttcaggccagcagctccaacaatacttttgttacattttctctccttcttgagttagacaagctgctaagagacgctgggtatagtttatctcattttaatttgccaatgccagatgatattgcaagtgtgtctgcacagaataggcttctactagatgagcttagctatgatgtttgtaacatgggatacaccataaatgaagaagtgtcatgtttaaataatagccagaaggaagttttcaatgctatctataagtttgtggtgaataatgaagggaaaacattttttgtttatggatatggaggaactgggaaaacattcttatggactactttgctcaattctataagaaggcaaggaaagatagcattggctgttgcatcctcaggaattgcatccttgctgcttccaggtggacgcacacctcattcgcatttcaaaatccctttggagattttacagaattcaatgtgcagtataaagaaaaatacgaatcttgctgaattgatccaaaaaacatccctcattgtttgggatgagtctcctgttaatcataagtactgctttgaagcattagatcggactctacgggatatattatctgataccagcccacattcaacacacaagcaatttggtggtataacagtagttcttggtggagattttcgccaaacacttccagtcatccaaaatgcaacaaagcaaaatattttgaaatcttgcattgttaattcttatttatggaatcagtgcatactacttcatttaactgaaaatatgagacttaactctgcatgtctttctgcatcggaaagagaagacctcaaaaattttgctgaatggcttttgagagtaggcaatggtgcagaaccttatgttgatgtcccagaccaaccaaagggcatgtttatagagatccctcagtctctccttctatctccagattgtaggaatttggatgggttgatttcttttgtgtacgactcaggttgtcaaacaacagatcttagatcgtacttatgtgagcgtgcaattttagcacctacaaatgatgtagtttcagaaataaacaacaaaatgattgctcagctagcaaccactgaaatgtcatactatagctcaaattcaattgatgatagttgttccaaccataccactttagaggcactatatccaacagagtttctaaacacaatttctataaatggacttccagaacatgtgttacacttgaaaattggtgtacctataatactcttgcgtaatcttgatgcatcaagaggactttgcaatggaactaggctgattgtcacacagctaacaaatcgtgtcattgaggaagagataatcacaggaaaggcaaaaggtacaaaagcatatattcctcgcatcattacaacatcagctcagtccaagtggcccttcaaattgagacgccggcaatttccaatacgtctttcatatgctatgacaataaacaagagccaagggcagaccttgagcagagttggtctgtatctgccttctcctgttttctcccatggtcaattatatgttgcattctcaagagttacttcccccaagggtttgaaagttctaatagaaaatagccctgcttcttatgaaaactgcacacaaaatgtggtatatgctgagatttatttcgatggcaagctcagctacagcactcaaagatgtaactattggccagcaaaactgcaaggtaaaacagaagcatcttcaagctccgctactcaaattcatattgacctcgatataccacaggtggaacaatttcgctccagctataaactgggatctccaagccttcaacaacaactccctaagattgtacgtttatccccagttcaagcagcaggaaaaatttacaacttagaagaaatatctgctatgcctgtttcagcttttcagggaggagttacttatagtgcagttgcaaaagtgtcttcaataatgtcatcaattaagtggtactacataggatgtcatcgttgtgacaaagggtataaactccccgtgacaatcacagataaatcagggagtttagatgcagtggcattttcttttgttgctgaagatttagttgagcttgatgcagcccaagcttctcagaacatgaagatagactcagttgaacatccagtaactcttaataaagccattggaaaaacaagactttttactataggaatgaatactgattcatcttctaagttccctatcagctatgtgctcaaaatgagtttctcaattgatgatactatgccaaatcctctgctgacatctgaaaagctctccaagaacaaagatcaactccaattcccaccacctatgacatatacaagtagcccaagcacaactattgataatacaggattatccaaagatagtacacctccagaatcatctgcagctgtcaacatatccacagaaaagaacatcagcacatctacaaaacgaagcattgatttcagtgaggactccactgacaaaactaaaagtttatcccttgcaataattttcttcttcatggcagtatcaaacaacttgatatacctgctgtcaaacgtcagaaggaagagtattttatggatgaaaaccactcgtcatgtgaagaaatacacctccgaaaaatcaggatgcgttttacatggattggagggcccatatgtcaatcaaaatcacttagaattaagccaaatcatagcacaggatgttagggccccattaagcaacctttcggccgaagaagaggccgggagttggccatgctgccttgatgatcgatcgatgcaaacgcaggcaggaggattcattttcatggcgtggtcagtgtcgcggctggatttgttcgccgccgtgctggcgctggagcaagctgtcgccggcgccgcgaccggagactgcccgaccacctgcggcgacgtggccgtgccgttcccgttcggcatcggcgccgactgctaccactcggccgggttcaacctcacttgcgactggagcaacgacccgccgcgactgctcctcggcgacgccgccgcgttccaggtgctcaacgtccgccgaggatgggactccacgcgggcgggcacagcgccgccgccgtggtccacgctgacgcgtgaagctgtgcggacgccgtgctcgccgccgcagctgtcgcagacgtgctcgtcttcgctgccggattaa

SEQ ID NO: 97510 - DNA, 2142 bp, Oryza sativa
  Clone ID: PAT_MRT4530_95506C.1
atggctgctagtggccaggtccagtgcctccttcctctccgcgtcgccttgtcaccgccgctgccgccgtggccgccggcgacgatggttatgccacctcttctcgccgccgccgccgccatggctgctagtggccaggtccggcgcctcctttctctccgtgccgccttgccgtcaccatggccgctggcgacgatggctccttcctcttctcgccaccgccaccatggctgccggtgcccaggcttccagtacgcttttgtcagagaaaaggctgcaggagatcacctgtcacttgggtacatgcagcatggagataataacaataaaaagaagaaaggggatttgtccaataacctcgatctcagctcatcacctcttctcatggactctcgaggtcaagcctactaccacagggcggcggcagcggcggcggcggtggccgccggtgatgctactgacggtgaggagccagctgctgctgagctcgctccgaaggctgtgagatcgaagaagaagctggcggtggaggcgcaaggcggcgccgccgtgcgcgatgatctgacgtgcccagagtgtggcaaggtgttcatgtcggacaaggcgatgtacggacacctgcgatctcacccactgaggaagcacaagggggcggcgcgcctggcggcggtggcggcggcggcggccgacgatgcttccgtggccgctggggtcaagccgaggccgtggaaggtgccacggacgaaggaggaggctgagctcggcgacgaccgccacccggggaggtcgccggtgacggggaagcgcgggcggccggcgtcctcggccagtagcagtggcagcgcgcccgcgcccgcgccgcccgcgtcgtccaggctgcagctggtgatcacggaggaggaggaggcggccatgactctcctggacattgcctcggggtgctcgcttgatcaccagcctacgcaaccggcgcatgtcgccgacgccgccctcctggcgccggcttcggaccagatgccaagcgtcgacgtcgagcaaggcgtcctcgccgtcgcggagcacaggacgtgggaagctgagaagcctgcgctggtcgaacatgtctttgggatcgtcaaggagcatgtcgccgcggtcgccgccgacgccgagccgcagtcgccggaggcgaagacgccagtgaagctggggcctgtgaccgatcaggctgtccctgttctcggcgacaagaacgacgacggccacgccgacatgcccgtgtcccccggaggcggcaccaccaagaagcctttgaagcgaagactccaggacgtcgagacgaagcatcccacagcaccgccaccgccgccggtgaagcgcatcccgtcgccggcgtcgaaaaggaagtacgagtgttcggagtgccacaagacgttctccactcaccaagccctaggcggtcacgtagcggcccacaagaggcagaagaagagctgcgccgagcagcagcaagaggcggtggcggcggcggcgcaagtcgcgcggcacaacttcctggctcaccagcgcccggccggcgtcgtcgtcgccgtcgacgccaccgtcgtcgctgctgccggcggcggtatcgccatcgggcctctcggcgaggagggcttggtcggcccaccgccgccgccgccgccgccaccgccgccgcccgcacccgcgcctgcgctcgcgcccgcgccgcagcaacaccagtgcttacggtgccccatggtcttccccaccgggcaggctctcggcggccacatgcggaagcattttctcgaggccaaggagcaggagcagctgctcgccatcgacatcgccaacgccaacgccaacgccaacgccaacgccgcgccggggccgccgccgatgatggccaacgccgcgccagtgccgccgccgtcgatggccaacggcgccgggcccgtgccgccgccgatcgccgtcgcccctcctcccgcgccgccgatcgccggagccgctcctcctccgcccatggccaacggcgccgcggcggctgcgccaccggggggcaacccggcgccacctgctgggccgcagccgggcgtgaacatgtttgacctcaacgagttgcccaacgaggatgcaggggagaaccagcaaccctag

SEQ ID NO: 97511 - DNA, 5004 bp, Oryza sativa
  Clone ID: PAT_MRT4530_95507C.1
atggctgccattaacatagttactcccggtgtctgttacgcgaaatcatcgtcgtcgttcccttattatgatgtgccttcaatccacaaaagctcagctccttcgttcttctccgccatctttgtttcatccgagttttcgcctctacgagattgtgcgttctcccacggggtccatagaacggtattccttgatgtgtcaccaacggccttcctcttgactgtattttgctgctcctgtcgatattcaatctgcagagataattctcttatttctcatcctatcgtgctccgtcgttgtcggctactccgaagtgcctttattaattccatacaccagccttacccaactgcaagtgctgaggcttaaagcagagataggtaagttattcattcaatgaggaacattctgtacgttccaaaccgtatttgactatggtttcctaagtgtttttgagtttatatagtactcttatccatattaattgactcggtgggctgtaaaaaggtgcacatgtcactatgtaatatactcctatcttgctcttttttcactagaacatatcaatatgtatttattgtagtctctgccttcttttgcatgtttgcaatgacatctatgggagctaaagtaaatgagtccataaatgatggaagggcaccgtatgttttcaagataagtggtcagctattcaggacagcacgtgagcgattatctgtagacacatctaatcagattcagataagattatttggcaaaagggatgcacatggagatatttacagtgctccggttgcttctgaagttgttggtctaattgtgggtgatattggatcaactgatataggacgggatataataatacaagaccgttcttcaaatttgcagcagataaatgaaaaccattgcaagtttatgtcaatgcaatatcctcttttattcccatatggagaggatggttatcatgagaaactgacctacaatacaacagcacgtagtcaagccattaaacgcaccaaaatgaccccattggagtactttgcatataggctacatgatagaccaagagacttcaatactccattaagaaagtatggttgtcctgatctatttgtcacattcacatcaaatccggcttggcctgaggtcagggaggctttagcacgaattccaggtcagaaaccatctgaccgtgctgatattgtcaatagggttttcaaaatgaagctcaatattttaatagatgatattaaaaaacgtgaattctttggccctattaatgctgttatctacacaattgaatttcagaaacgtggtttacctcatgtccacatcatcatatggctggccaaaaaagaacccctagatgcaaaaaaggtcgatagctatattttagctcagtttccggaccctgcagttgacaagattggttatgatgctgtttgtaactttatggtgcatggcccttgtggtcctcacaacccttcctcagtatgcatgtctgaaggaaaatgcaccaaattctaccccaaagaattctgtgaggaaactactatattagaaaatggttttacacagtatgcacggccaaacaatggaataacttttaaaagaaatgaggtagaaattgacaacagatttgtggttcctcataatgtcgacttagttgtcaaatttcaggctcacataaatgtggaaaaagttaattatgatggtatgcataaatatcttttcaagtatgttacaaaaggatttgattgctcaagagttggattccactctaattcatcaaactcagaatcatcaagtgaaactataaatgaaataaataattatttggaatgccgttgtgtcactccaaatgatgctgcttggcgattgcagcaatttgacattcaccacacagatccctctatagaacgcctccctgtacatcttcccttcaagaataatgttgttttcacagaagatgatgatcttgaagaggtcattgatgatccaaacaactctaaatcaaagctgactgcatggttagaagccaatatggagaacccttcagcccgacaactaacatatatagaatttcctgaatattggacatggcacaataaagaaaaatattgggatggccgtcgtggtgcttctcgcagaattggccgcattgctcatgtaacaaatcctactagacttttcaatgaacatatgtcatgtatgagtgaggacatagcatatcgtacaacccgtaacacttctcaggccagcagctccaacaatacttttgttacatcttctctccttcttgagttagacaagctgctaagagacgctgggtatagtttatctcattttaatttgccaatgccagatgatattgcaagtgtgtctgcacagaataggcttctactagatgagcttagctatgatgtttgtaacatgggatacaccatagatgaagaagtgtcatgtttaaataatagccagaaggaagttttcaatgctatctataattctgtggtcaataatgaagggaaaacattttttgtttatggatatggaggaactgggaaaacattcttatggactactttgctcaattctataagaaggcaaggaaagatagcattggctgttgcatcctcaggaattgcatccttgctgcttccaggtggacgcacacctcattcgcgtttcaaaatccctttggagattttacaaaattcaatgtgcagtataaagaaaaatacaaatcttgctgaattgatccaaaaaacatccctcattatttgggatgagtctcctgttaatcataagtactgctttgaagcattagaccggactctacgggatatattatctgataccagcccacattcaacacacaagcaatttggtggtataacagtagttcttggtggagattttcgccaaacacttccagtcatccaaaatgcaacaaagcaaaagattttgaaatcttgcattgttaattcttatttatggaatcagtgcatactacttcatttaactgaaaatatgagacttaactctgcatgtctttctgcatcggaaagagaagacctcaaaaattttgctgaatggcttttgagagtaggcaatggtgcagaaccttatgttgatgtcccagaccaaccaaagggcatgtttatagagatccctcagtctctccttctatctccagattgtaggaatttggatgggttgatttcttttgtgtacgactcaggttgtcaaacaacagatcttagatcgtacttatgcgagcgtgcaattttagcacctacaaatgatgtagtttcagaaataaacaacaaaatgattgctcagctagcaaccactgaaatgtcatactatagctcagattcaattgatgatagctgttccaaccataccactttagaggcactatatccaacagagtttctaaacacaatttcaataaatggacttctagaacatgtgttacacttgaaaattggtgtgcctataatgctcttgcgtaatcttgatgcatcaagaggactttgcaatggaactaggctgattgtcacacagctaacaaatcgtgttattgagggagagataatcacaggaaaggcaaaaggtacaaaagcatatattcctcgcatcattacaacatcagctcagtccaaatttatttcgatggcaagctcagctacagcactcaaagatgtaactattggccagcaaaactgcaaggtttttggccgtctaataagattatgggatgctctaaacatgagatcaaaatcagcagatccattgatcagcattgatggaatcctattagatgaacatggttccatggcacaaatcagtgtaccaaaaaagcttgaaaaacaatttcgccccttgctaaatgaaggatcagtctacctgattactaatactactgctgttgatgctagaagaaagacttatatctatcagcaccaaagctacatgatccagttcaaacacgaaacaaaagtgaatcatctggaatctagaggatcaaccataccaaaattctctttcagcttttgcccatttgatcaaattccaggaaaaaccatcacctctaaacccctcttaggtaaaacagaagcatcttcaagctccgctactcaaattcatattgacctcgatataccacaggtggaacaatttcgctccagctataaactgggatctccaagccttcaacaacagctccctaagattgtacgtttatccccagttcaagcagcaggaaaaatttacaacttagaagaaatatctgttatgcctgtttcagcttttcagggaggagttacttatagtgcaattgcaaaagtgtcttcaatactgtcatcaattaagtggtactacataggatgtcatcgttgtgacaaagggtataaactccccgtgacaatcacagataaatcagggagtttagatgcagtggcattttcttttgttgctgaagatttagttgagcttgatgcagcccaagcttctcagaacatgaagatagactcagttgaacatccagtaactcttaataaagccattggaaaaacaagactttttactataggaatgaatactgattcatcttctaagttccctatcagctatgtgctcaaaaggagtttctcaattgatgatactatgccaaatcctctgctgacatctgaaaagttcattcccattcctattgtctactatcattgtagcagcagctatgggctatcactgagattgttagctcaggttaatctttgttctcccccctccccctcctataaacaaataaccaaaagtttgtttggaagattcagtatcttcgggatcagtaaattacttagactgctgctaaaaacagacaagtatgaacgtttaaaaaggaggctaataagcagttccattcttgatgaactttctgctgttggtaaatccattttgagtattattgtgatatcttggccccaattaggatga

SEQ ID NO: 97512 - DNA, 231 bp, Oryza sativa
  Clone ID: PAT_MRT4530_95508C.1
atgacaggaaggggaagaagggtggtggtcggcgagaggcggctctccgccggagaccagccgtcggccaaggtcttccgccgcttcgtccatgacgccatcgagagaccggacgagttcatattgcatcctgccgctccgctgccaccgtccgtggagattgtccgcgtcatggatgtgatatccaattttgtaccccacttcctcttgaaatttgcagcatctgagtag

SEQ ID NO: 97513 - DNA, 981 bp, Oryza sativa
  Clone ID: PAT_MRT4530_95509C.1
atgaactccatcatcaatcaggggatcatcctcaacgccgtcgctagagggcgggcctacccgctatcggtgccatccttcgggtccccaggtcatcaccaacacgccgccgtaaagatcccgcctcgacctcaccttaggcacgacaccaccctggatccagcccctacgataggccgacgcttcctcggtgctcgcagcattcgtctcccttcactgctgccgccaggggaatgcatgggaccctccccgtcgttctctgactctggtcaccagcctcaactatgtatctgccaccatcgggcagcctgtccctttgtgtccaccgtcgcagtagccacaagcgacgccctcgctgtcggaccctcgccgccgaacgccgccgtcaccgaggcggaaggggttgagaaccctcggccttcacccgcgccgcactcttgtccttgtcattgtcccaacggctgtgatgtcagctaccatgcaccaactgagtcagcttgtggaacccactgccagtgctcaccgtcgtcgcacgcgttccccacgcgttgccttcgccgcctctaccgcatcgcctacaatccaccaccatcgtgtttccccctccaatccgccaccactgtcgccagccgatgccccctcctcccccatcgccgtcgcccatggggagaggagtcgtcggccgaccgcaaattggggagagaactcgccggtcagcctcgcacggggaggatctcgccaggaggccgcacaccgagcgaggagctcaccggcctaccgtccacaggaggaggagctcaacgggaaaccgcgcgtgggggaggagctcgccgggaagctatgcgcgggggagaatcaaccggcggacaacacacggggagaggagcttgtcggctgctactgttgctgcttccacacggccacaggcgcctcctgctgcttggaccgctgccgccgccgcaacctcctatcccgctgtag

SEQ ID NO: 97514 - DNA, 2235 bp, Oryza sativa
  Clone ID: PAT_MRT4530_9550C.1
atggcggaggacggcgaggagaagctgctcgccacggtgcagcacatcgtcaagaccctgggccgcaccgacacgatgacggaggatatactgaaggtcttctccaactacgacggccgcctctcgctggacaaactctacgccacgcgggctgcggcggcggcggcggcggtcgcggcggctggaggagcgggtgctggggagcactcggtgccggcgtcgccgccgatgccgcccccgcccgcggttcccccggcggtggcggcgatgccggcggtgacgtcactggagcggaccgtgcgcacgctggaccggcagatctcgcagttcgtgacgatggataggctgatttgggccgactcggcggacgcggacgcgttcctggaggcggtggacgacctaatcggcaccgtgcaggagctggacgcagctgggaccaaccgcgggctgctcgaccgtgccgatgagctgctcagccggtgtatggcccggctggaggatgaattccgggcgctcatagagcgccccgacgacgtggcgccgccagcgcccggcgggttcgcttctgatgagagcgaggaggaggactacgacgcggacgacggctacggcgatgagccaatcccaatcgccaagccggtctcggacttcgacgtggtcatcgacgccctccccccgggatcggtctccgacgtgcaccagatcgcgaggcggatggtggacgctggcttcggccgcgagtgtgccgaggcgtacgcggccgcacgccgcggatttatcgacgagagcgtcgcccgcctcggcatccgtgcccgcactatcgacgaggttcactccttgccgtgggaggagctcgagttcgacattgcccgatggatcccggccttcaagatggtgttccgcatcctgatccccagcgagcgccgcctctgcgaccgtgtctttgacggcctcgccccttatggcgacctcgcttttgttgctgcagttcgtacccaggtgctgcagcttatctccttcggcgacgcagtttctgctgctagtcgtgctccagagcgcctcttccgtgtcattgacatgtatgaggccgtgcgagacctccttcctgacctcgaccctgtctttgctgatccctactctgctgcacttcgtgccgaggtctctgctgtttgcaacacccttggttcctctatcaaaggtatattcatggaattggaaaatctcatccgacgtgatcctgcccgtgtttctgttcctggtggtggcatacacccaatcacccggtatgtgatgaactatctccgtgctgcgtgtggatcaagacagacactggaagaggtgatggaaggtgacttaggtgctgttggcggggcagctattgctgttgatcccgatcgccccacttcgtcacttgcagtgcacattgcatggatcatggatgtgcttcacaagaatttggagaccaaatctaagatatatagggacccgccacttgcatccatattcttgatgaacaacgggaagtacattattcacaaggtgaatgacagtgagcttggggttttgcttggtgatgagtggatgaagcagatgatgagtagagtgcgccgttggagtttggagtaccagcgtggggcttgggcaaaggtcatgtcagtgttgcagacgggtggtcctggcattggtagtctccctgcaaaggccttgctacaaaaactgcggatgtttaatggctacttggaagagatatgtgctatccagtcagaatgggtgattgcagatgagcagctgcgcgaggatgttagggcagcaataacagattctgtgaagtctgcatatatgggcttgatttcaaggttgaaatcatctccggaagctgcacaggacttgttcatcaagcattccccagaagatgtcgaagcacgaatccagcacctgtttgaaggagtgtccaagtgattattagttcattatagtcactatgcttctatagctgtgattttggtgtcattgttgctgctatggtggatatctgacccctggtgatggtgacattctgccattatgtgtttggtggcattgttccataaggtttacttttcatcttagatgagaaaattatgggtttcttaaactttgtaaattatcctaggtgtctgtttaattatccattggtaatcccatctaatttatgatgttattgatatttccaaaaaaaaaaaaaaaaaaactcga

SEQ ID NO: 97515 - DNA, 213 bp, Oryza sativa
  Clone ID: PAT_MRT4530_95510C.1
aaaaaaaaaaaaaaaaaaaaaaaaaaagagaattttataataatagtcaccatgatttcgtgcggtgtaattgggccgtacttctagtggtactcggtttttttggccccctttttcgtctctcattttatatagcctttaactgtctttttatgttttatggtgtccatctgtcttcaccatggtcttggctgactgtctcactggtttcct

SEQ ID NO: 97516 - DNA, 345 bp, Oryza sativa
  Clone ID: PAT_MRT4530_95511C.1
atggcgttacaagtggaggtggaggaaggagatggtgttgcacgggatgatggcgccgcaaaggagcagaggacggagccgacaacatccacgccgcgggagccggggacggcaccaccatccgccgtgagagtcgtggaacgggagccgccggcgagaaccacggcttccacaacgcagcaatgcgggttaacaccgcgagcgccatctcccctcacttctttgtgtggggtgggtgaggatgatttgatcaaatcggtggcttccgcagccgacgccgatgccgctaccggcggtggtcgccaccttgaggaccacagggcccatcaggcggtgctagagtag

SEQ ID NO: 97517 - DNA, 701 bp, Oryza sativa
  Clone ID: PAT_MRT4530_95512C.1
atgacggcctcgcaggcgggctctggcggcatgcagagacgaaggtctctttggcaggcggcggaggcagcctcaggggcgggtggtgacagcacgcggattcggccggtcccatccacgagagcgacaacggtgcgcggatctgtcgacagcgattgtgggacgggtggctccgtcgccggcaaccgcagggagggccgatctgtcgccggagaccgcaggacagacggattcatcgtcggcgaccgcggggagggcggatcagccgctgacaaaatcggggaaccccctccccctcccgcacatggatccgccgacgacgggaggggtgatgacggcagtagtggcggtgggaggggcgacgacatggtggttgtggcgacggcgagcctgcggcctcatggtgaaccagcagctgcatcagcaagaaacggagtgtacacgacgtcactcgagaggacatggcggaccatcgcctatggcgacacgggctccttgttgtcgccatgtgtattccagaggacactcaacgtggcagcgaagcagaggcgatcgccggagaaattgcgggctgtgatcactggtgagatagggattgagaggttgcggggagggtgcagagacactggcctcccggaggtgttgaagccggcgaggaggcatgttgttccggctaacaggagagccgccgccggtgtacg

SEQ ID NO: 97518 - DNA, 897 bp, Oryza sativa
  Clone ID: PAT_MRT4530_95513C.1
ccggccgggaattccagctaactttcctctcacctctctacgcgaaaacattcccctcagctccaatcagcagctatctcccttcctcatcaccagcttgctgtgatcttatcaggcctttttgttgttctgctggtcttgctcgcgtgcaaagagatgccggagcactctgagaatgcggctgcgaacattgtggacagcatagtggacgccattgccgacaatcttcccaagcagaagtcagtcagatttgaagatggctcaatctctgatcaagctaagagactcttcggtggtcagaagtctgtccatcatgttttgggtggtggaaaatccgccgacgtgttgttgtggaggaacaagaagatatcttcaagtgttcttgcagttgcaacggctgtctgggttttcttcgagtggctcgactaccacttcctgacgattgcttgctttgttcttgttcttggcatggttgtccagtttgcatggtccacttttgcaggcatgctaaatgggtcaccttcgaaagttcctcgcgtcgaattgccggatgagctgttcgcaaacattggttctgcaattggcacccaagtgaacaagttcttgggcactcttcaggatgtgtcttgtggaagagacctgaagaattttctcctggtgattgccgggttcttcgcggccgctatcattgggagctggtgcaatctcctcactgtcatttacattggatttgtgtgtgctcacactctcccggtgctgtatgagaagaaccaagaaaaagtggacgagttcctgtacaacacacttggcctgcttcagaatcagtatcagaaacttgacaagggtgtcctgggcaaggtgcccaaagggatcatcaagcttaagaagagcgattag

SEQ ID NO: 97519 - DNA, 2859 bp, Oryza sativa
  Clone ID: PAT_MRT4530_95514C.1
atgacggcctcgcaggcgggctctggcggcatgcagagacgaaggtctctttggcaggcggcggaggcagcctcaggggcgggtggtgacagcacgcggattcggccggtcccatccacgagagcgacaacggtgcgcggatctgtcgacagcgattgtgggacgggtggctccgtcgccggcaaccgcagggagggccgatctgtcgccggagaccgcaggacagacggattcatcgtcggcgaccgcggggagggcggatcagccgctgacaaaatcggggaaccccctccccctcccgcacatggatccgccgacgacgggaggggtgatgacggcagtagtggcggtgggaggggcgacgacatggtggttgtggcgacggtttctagtttctacaatgcgaacgtagcaatgtctggactgggcgatctccgtgggagatcatccggactggcgagcctgcggcctcatggtgaaccagcagctgcatcagcaagaaacggagtgtacacgacgtcactcgagaggacatggcggaccatcgcctatggcgacacgggctccttgttgtcgccatgtgtattccagaggacactcaacgtggcagcgaagcagaggcgatcgccggagaaattgcgggctgtgatcactggtgagatagggattgagaggttgcggggagggtgcagagacactggcctcccggaggtgttgaagccggcgaggaggcatgttgttccggctaacaggagagccgccgccggtgtacgtttagatggtttcttagaaatgcttgggtatgataagagtctaggcttcaaggcatattggttgctaccaggcaaaactcttgaagatggtcttagggtgatagaaacacaggcagactttgaagtaatggcaaaggttgttaacagggcaaacaaatttgtgatttattttgatcaggatgatacaattgctcgtgtagactgggatgatgtagtttctccccctatttgccagcttcccaaagtgatgagtcctgggaacccgtcagtggctgagaaggcaaaagggaaggtgtttgaggtagtaggagagagtgatagtgatgatagtgccagtgattctgattatgttgatagtgactatgatttgtctgattctgatgatgacttgtatgtggacaatattgatgtggaggtagaagacttaactggaaagaagaaaaggaatagtaagaaagctagaggcagtgaactgaagggcaaagaaatagtagtttgtacaaattcagagggagatgatgaggactatgacactgatgaaggcttggaggcagctgattctgatggggataaaagtggagttaagtttaagtttaggtcatttagtaaggaggatgtcaataatccagtgtttaagattttgacagctgttggaattgatccaaatgattgcgtatatcctataccattagctgttgttgagactgaatctctaagctcttggaggtggtttctacagaccctgaaggaagatctaggcattgataatacttatccttggacaataatgatagacaagcagaagggtttgattccagctgtgcagcaaatttttctagactcagaacacaggttttgtgttagacacctctactccaactttcaagttcacttcaaaggtgaaaatctgaaaaaccagctctgggcatgtgctaggtctagttcagttatagagtgggtggcaaatatggaggaaatggctactctcaatcaggatgcacatgattggttgaaaaaaatggaacctagtacatgggttagagcatattttagtgacttcccaaagtgtgatatactcttgaacaatagttgtgaggtttttaacaaatacatcttggaggctagggaattaccaatgttaagtatgttggaaaagattaagcaacagttaatgactaggcactttaacaagcagaaggaggctgcagaacagtggaaaggtcctatatgccctaagattaggaaaaaagtgctaaagaatacagacctagctaacacatgctatgctcttccagctggcaaaggaatctttgaggtccaggatagaaactttaagtacattgttgatatcaatgcaaaacattgtgattgtaggaggtgggatctcacagggataccttgcagccatgcaatttctagcctcaggtaccagagaatcaatgctgagtcagtattgccagtttgttatagtgtacaagcattttcaaatgcatatgagttcaatatttggccctgtcaagacacagctaaatgggaaaagacaaatgggccacatgtgaagcctgctgtctatgaaaagaaagttggcaagccaacaaagtccaggaggaaagcaccacatgaggtccagggaaggcatgggccaaaaattagcaagcatggtgtggagatgcattgcaagtactgcaatgaggcaggccacaaccaaaggggttgcaagttgaaaaaagctggactcaggcccaatcagcaaccaaagaagtctattcaaaaccctgaagtcatcacaacagaggtgcaatctcaatctcaggtgcaaactcagtctcatgttgaatctcagtcccagcagttgctgacacaggttaacaatgcaatggtatctcagatgtttgaggagtcctcccaagttactcaaatgaacttggcacctaggcctctgcctgacaaccaatttgtcatggcaaacaaaccaacagccaggccaatgcctctaaccacaacagcaaaggaaggaaagctgagagcaacaaaaagaaaggctgcaggtgatggtcctgaaaagagagctaccaagaagaagtag

SEQ ID NO: 97520 - DNA, 553 bp, Oryza sativa
  Clone ID: PAT_MRT4530_95515C.1
gcgcgccatgtacgccatgaggcagagcacgccgcgggccatgctgcggggctgcgccgagctgatgctggccggcacctcgccggaggatgcctccgacgccgaaacaatccggcacagggatgacacccaggatctggagctgggaaacctggcgcactcggagaacatcggggccccgctaggcgcataactgaggccgtagacaatcaggccactcgtcggagccctcagcttccaccagctcttcgaaggcaccggccttggtggccgcattgatcaggcaaaatctaaggcgaaagcaacagtgatcatggcgactttcttctccctcactgctccggagggcattgcactggggatcgcaacctcatccaggtatagcaagcacagctcgaccacacttgccgtcgagggagccttcaactctgctgcagcagggacactgatcaacatgcacctggacgaacccctcgctgcagataccaacaagccgaagctgcaaacaaacaaaaagctccagctgggaggatacctcgccctcttccccggc

SEQ ID NO: 97521 - DNA, 2069 bp, Oryza sativa
  Clone ID: PAT_MRT4530_95516C.1
ctagatttgtctgattctgatgatgactttggagttaagtttaagtttaggtcatttagtaaggaggatgtcaataatccagtgtttaaggtgggcatggtttttttcctgtgtagagttgcttaggaaggcaatcactgaatacagtatgaagaatagagttgatataaagcttcctaggaatgatcagcaaagacttagggctcactgtgcagagggttgcccttggaatttatatgcttgaaaggacagcagagctaatgctttcatggtgaagacctacaatggagagcacaaatgccagaaggaatggatcttgaaaaggtgcactgccaaatggttggctggaaagtacattgatgcatttagagcaaatgagaagatgacacttggtggttttgccaagagcaaacttcaaagagctaggaggttggctttcaaggccatatatggtgatgagatcaagcagtacaaccagctttgggattatggtgctgagctaaggaggtctaatctaggcagttgtttattcctgaacattagtgatggctgctttggcacattgtatatgtcacttgatgcatgcaaaagagggttcttaaagggctgcagacctcttatttatttggattggtgccacataaagacaaaatttggtggtcagattttgacagctgttggaattgatccaaatgattgcatatatcctatagcattagctgttgttgagactaaatctctaagctcttggaggtggtttctacagaccctgaaggaggatctacgcattgataatacttatccttggacaataatgacagacaagcagaaggtacacttcaaaggtgaaaaatctgaaaaccagctctgggcatgtgctaggtctagttcagttatagagtgggtggcaaatatggaggaaatggctgctctcaatcaggatgcacatgattggttgaaaaaaatggaacctagtacatgggttagagcatattttagtgacttcccaaagtgtgatatactcttgaacaacagttgtgaggtttttaacaaatacatcttggaggctagggaattaccaatgttaagtatgttggaaaagattaagcaacagttaatgactaggcactttaacaagcagaaggaggttgcagaacagtggacaggtcctatatgccccaagattagaaaaaaaagtgctaaagaatgcagacctagctaacacatgctatgctcttccagctggcaaaggaatatttgaggtccatgatagaaactttaagtacattgttgatatcaatgcaaaacattgtgattgtaggaggtgggatctcactgggataccttgcagccatgcaatttctagcctcagataccagagaatcaatgttgagttagtattgccagcttgttatagtgtacaagcattttcaaatgcatatgagttcaatatttggccctgtcaagacacagctaaatgggaaaagacaaatgggccacatgtgaagcctcctgtctatgaaaagaaagttggcaggccaacaaagtccaggaggaaagcaccacatgaggtccagggaaggcatgggccaaaaattagcaagcatggtatggagatgcattgcaagtactgcaatgaggcaggccacaaccaaaggggttgcaagttgaaaaaagctggactcaggcccaatcagcaaccaaagaagtctattcaaaaccctgaagtcatcacaacagaggtgcaatctcaatctcaggtgcaaactcagtctcatgttgaatctcagtcccagcagttgctgacacaggttaacaatgcaatggtatctcagatgtttgaggagtcctcccaagttacttaaataaacttggcacctgggcctctgcctgacaaccaatttgtcatggcaaaccaaccaacaggcaggccaatgcctctaaccacagcaacaaaggaaggaaagctgagagcaacaaaaagaaaggctgcaggtgatggtcctggaaagagagctaccaagaagaagtataactgctgatagaactacataagagctaggctagag

SEQ ID NO: 97522 - DNA, 456 bp, Oryza sativa
  Clone ID: PAT_MRT4530_95517C.1
atggcatacatagatgagaaggtggattggtttgataatgttgaggcaaaaacttggtgtgctgttagtttagatggtttcttagaaatgcttgggtatgataagagtccaggcttcaaggcatattggttgctaccaggcaaaactcttgaagatggtcttagggtgatagaaacacaggcagactttgaagtaatggcaaaggtggttgacagggcaaacaaatttgtgatttattttgatcaggatgatacaattgctggtgtagactgggatgatgtagtttctcatcctatttgccagcttcccaaagtgatgagtcctgggaagaagtcagtggctgagaaggcaaaagggaaggtgtttgaggtagtgggagagagtgatagtgatgatagtgccagtgattctgattatgttgacagtgactatgagggggccataacgggcacaaag

SEQ ID NO: 97523 - DNA, 1780 bp, Oryza sativa
  Clone ID: PAT_MRT4530_95518C.1
ctagattctaaatatgtttttatttgcatactggttatcaacaaatacacatactagatccaaccacaacagccaaagcaactgcttttggggttaactgttttgcggttcgcctgcctgcagcatatactcgaacatgtctatataactttattcacaaagagaccagagcgtttcctcaggtttgtattcctttcctcatcatttccacaaactcttcatagtcaattctcccgtccttgtctttgtcaacttcatccagtacttgtttaatgtttgcttcatcacccattccgtactctgccatggcttgttccagttcatctcttgttatgtacccgctgttatctttgtcaaaatgttgaaatgcacgaaataaatcctcctccttttccagtttatgcttatttatcatagctgtgaggaactccgagtaatcaatgctgccactcttgtctacgtcaactgcttccataagcttctgaacctcggcttcactaattcttgatcctagctttgtcagaccaaccttcagttcttcaaccgtgattgtgccacttctgtctgtatccatgttattgaacatctgtttcaagcccttgatttcctctaacgctaggttctctgcaattaccttaagagctaattgctttaacttgttcattgccttgaattgcttcattcttgataggactgcgctatcgataggtctgtcagatgcaccgccttctttgagccatcgatgttctaaggcctgcgatgcagtaatcctcttctggggatctctatgtaacatttgtctgataagatcctttgcactttcagatatcgaaggccacgggctggtactgaaatcaacttggttgaccagtatagcatcgaatatgcctttctctgtctctgcccagaatgggggcgtcccgcatagaaggatatacaatatcaccccagcgctccagatgtcggcttctttcccataatttcgttgtaacacttctggcgccacataataagcacttccgacaatgtccttgtacactttaccttcttcgatgaagacggagagtccgaagtcgatggccttgagcggcgcgtcgtcgtcggcgctggcgagcaggaagttctccggcttgaggtcgcggtgtatgacccccatgaagtggcagacgtgaacgacggtgaggatgtcccggcacacggcagcggcctgccgctcggagtagctccccttggccgtgatgcggtcgaacagctcgccgccggagcagaactccatgacgaggtgcacgtggtcgttgtcctcgtacgcgcccctgaactccgcgatgttgggctgcccgctgaggtgctgcaggatggtgatctcccggcgcacgtcgtccacgtcggtgcgccgcaccagcttccgcttcgacaccgacttgcacgcgtaccggttccccgtcgcgcgctccgtgcacaggtacgtcgtcccgaactgcccgctccccagcttccggtccagctggtacagcgaccgcacgctcaccatcgccctctgcagcacggggcccatctccccgccgccgccggacgccctccgggacagcgcccccgccgccgaagacgagcccgtcggcggccggtgcggcggggccccgtgcctcgggaagctcggccgccgccacgtccccggctcatcgccgccacgcgccttgctgcgctccgcggtcgacgccggccgccgcatcgtgcccgacgtgatgggtatctcgtacgtcttggtgaagcagttgcccat

SEQ ID NO: 97524 - DNA, 285 bp, Oryza sativa
  Clone ID: PAT_MRT4530_95519C.1
atgcctacctggagcgcggcctcgcccggccgcaacctcaacttcgcgtttgatcgacaggcctgcggcggagccggcgacggcgagaccgtcctggccacggacgccatccagttcgaggcgctcggcaaggggggattccacgcgatcgagctacgaggtgttgctcgaggccaccggcgcgacaaggggcggcggacgaaatcaagcgaggatgttccattgaagaaggcgatggtgccacgtgaacactcgaagcataacagcataaactcaattagttga

SEQ ID NO: 97525 - DNA, 777 bp, Oryza sativa
  unsure (1)..(777): unsure at all n locations
  Clone ID: PAT_MRT4530_9551C.1
aatgtctccgcccaatctttcctcctcctcctagagccggagaatccacccgccatcaccatcgtgctcgcaatcgcatcgcctgtggcgggatcgccggcggcggcggcggagatgattcggctgcagacgtacgcggcgttcagcctgatggcgacggcgacggcggtgtactacgcgttcagcagcagggagcagttctacccggcgatggtgtacctctccacctccaagatctgcttcgtgctgctcctcaacacgggcctcgtcgccatgtgcgtcgcctggcagctcgtcaagcggctcttcctggggacgctccgggaggccgaggtggagcggctcaacgagcaggcgtggcggganggtggtggagatcctcttcgcggtcaccatcttcaggcaggacttctccgtctccttcctcgccatggtcgccgcgctgctgctcgtcaaggcgctgcactggctcgcgcagaagagggtcgagtacatcgagaccacgccctccgtgcccatgctgtcgcacgccaggatcgtctccttcatgctgttcctgctcgtcgtcgactgcctcttcctgtccaactcgctcaggtcgctcatacacaagcgngaggcgtctgttgcaatcttcttttcgtttgagtacatgatactancaacatccacagtatcgacattcgtgaaatatatattctatgtcagtgacatgctaatggaaggtcaatgggagaaaaaggcagtgtataccttttacttggagctcatcagtga

SEQ ID NO: 97526 - DNA, 1132 bp, Oryza sativa
  unsure (1)..(1132): unsure at all n locations
  Clone ID: PAT_MRT4530_95520C.1
ggggttaacttttttgcgtttcatctgcttgcagcatatactcgaacatgtctatacaaatttattcacaaagagaccagagagtttcctcaggtttgtattcctttcctcatcatttccacaaactgttcatagtcaattctcccgtccttgtctttgtcaacttcatccagtacttgtttaatgtttgcttcatcacccattccgtactctgccatggcttggtccagttaatctcttgttatgtacctggaattggttttcatggggctcttggtaatatatactgattttttaacaaacgagtttatagcaagaaaaatatgatgcaaggaaagcatgtgttagacatcgttacacaatgaacatgattgttgcgcagaacaagttccagtgttggtcaatttagagctctttattcatggtgctgaacgagataaaaggatgtgcattggctaacaaaatttattttacccgctgttatctttgtcaaaatgttgaaatgcacgaagtaaatcctcctccttttccagtttatgcttatttatcatagctgtgaggaactccgagtaatcaatgctgccactcttgtctacgtcaactgcttccataagcttctgaacctcggcttcactaattcttgatcctagctttgtcagaccaaccttcagttcttcaaccgtgattgtgccacttctgtctgtatccatgttattgaacatctgtttcaagcccttgatttcctctggtgataggttctctgcaattaccttaagagctaattgctttaacttgttcattgccttgaattgcttcattcttgataggactgcgctatcgataggtctgtcagatgcaccgccttctttgagccatcgatgttctaaggcctgcgatgcagtaatcctcttctggggatctctatgtaacatttgtctgataagatcctctgccctcttcagatatcgaaggccacgggctggtactgaaatcaacttggttgaccagtatagcatcgaatatgccttctctggtctctgcgcagatattcaaatttgacaattatctccacgataacttgatagaatgtagcaaaaccccngngccgcccccgcggccgcccacgcggccg

SEQ ID NO: 97527 - DNA, 426 bp, Oryza sativa
  Clone ID: PAT_MRT4530_95521C.1
gctggctctgggttggccgtgccctcctgtcacacctagcgccgggtagaattcatgcttgttcatgctccaccaccatgcacatgaatgcatttgagcagaaacctggagaatgaagctggcctatcatgccgagctgacacacctcgatgaagtcgacgctgctgggtgccgcacaaccgaccggggggattattcggccctttaactctttcctttgccaggatgatatggtgaatcacattctgagggctcctctataggatttgacaggatggggaagaagcccatcgcttaaggcagacaagcaaggccatgatatataggcttgttagtcgtggtacaattgaggagcggatgatgcaacttacaaagaaaaaaatggcattggagcaccttagttgctgggcgtctcacgaaaggcac

SEQ ID NO: 97528 - DNA, 468 bp, Oryza sativa
  Clone ID: PAT_MRT4530_95522C.1
atgtcgaagaagacggtgctcagggtggacacctcctgcgacaaatgcaagcgcaagatcctgcaaaccgtctccggcctccaaggtgttgacaagatcgatatcgactcggagaagggaacgatgacggtgaccggcagcgcggacccggtggacgtgatcgagcggacgaggaaggccgggaagcgcgcggaagtcgtgaccatcgggccgccgccggcgtcgtcgtcgtcgtcgtcgtccaacccgtcgacggagcagcagcagatcaagaagcaggcgccggcggccgaggagaaggtgtacacggcggccgcggagaagagggcgcctgagccgccggccaccgtgtacgtccactacatccccgcctcgacgtggtcggctccggcgtggccatcctacgagtacgaccagagcgtagtctaccaccagcaggatccccctccagcttgctccatcatgtaa

SEQ ID NO: 97529 - DNA, 1275 bp, Oryza sativa
  Clone ID: PAT_MRT4530_95523C.1
tcactggctgccgatgctgaagtcgaagttgccgcacctggtcatggtgccgagtagcaagccgctgaacccgaactgccacttctccaggtcgaacaccaccaggttgtcctccatctgatgcccgccgatgatcaccgccggcgcggccgcggcgcccatgtcgacgaacgcgaagcacgccgcctcctggctcacctccaccacggcgctggcgccgacgatcgtccagttctggccgccggccagcatcaggtcgacgctcgccgtgtacgggccgatgcgcgtcggcggcagcgccgacttctggtagcacaggtcgaacggccccgccgccggcgcgcgcgcgagcccggccgtggccgccgcgaacgcgtcgcgcaccggccggtagatgtcggagcgcagcgcggtgtacggcgtcgccgtgctcaccgcgacgccgcctgtgccttggcgagcgctgagcgacagggcgcccggggggagggggacttggacgctgttcacggcgacgccgatgacgccgatgtagtaggcggtgttcttggggttcttgagcaatggggtgtacctgagacggtcgctgacctgctgcggcggcgcggcttggagccagaacgggccgccgccgaagatggccgcgccgacatcaccggcggtggggaggcacagtgcgaacttcttctccaccttcagctgcccggcgacctgaagcggcagcgacaatggcgcccgggagaggccagcgacgccggcggcgccggcggggagcgagcccagcagcggctgcggcgcgcacgacgcgacggcggagagccacacctggaacagcgggttcttgccgtcggtggcgttcgccgacagctgcaccgtggtaaggtcgccgtacccgcactggccactcgccgggttgtacgcggtggcggaacacgcgcagcgcccgccgtcgccgccgttgctgccggcggcggtgtacgggcagttggggcggtggttccggttggcgacggcgcacacgccggcgccgcacgggatcgtccggtgcttccccgggcacgtggaccagacgagcgggccggcgaggtcgaggacgagctgcccgccgccgttcttgacggaggcggtgtagagcgacgtcgaggggtccttggcgaggcgggtcagtatgggcttggaaggtggccggtgctggccatcgccggcggcgagcgcgcacagcagcggcgccgcgagcagcgagagcacgagcgcgatcttgtagctggacgacat

SEQ ID NO: 97530 - DNA, 403 bp, Oryza sativa
  unsure (1)..(403): unsure at all n locations
  Clone ID: PAT_MRT4530_95524C.1
ccgaaattgtcccctgtnggccgaggtaccctgtgaccaaccctgttgctgaaaattgttcaccacacgatgtggtacaccccatctgccaggtgggtttgggatcgccccgaggagacatagccgagctgctgctgctgccatagcgacggcaggtcgtggatggcggacaataggctttggaggctgctcgggaattacaacccagtgttacaagctggtggattggacaatgttgcgagataccctggtgtgtgcnatgacaaactttgcttttccatgggttngcagtttttgttatgtaacctagatgaggcttctaacaaattctagtcttggtngctgtattcgaagacccccaagaaagattttatttgatctccaaaaaaaaaaaaaaaaaaaa

SEQ ID NO: 97531 - DNA, 266 bp, Oryza sativa
  Clone ID: PAT_MRT4530_95525C.1
gacactggaaagatccatctaccgtataccttgagcgtggcgagttttatctccttgtagatcgttggcgtgctcatactacaactcgccaacctctatcgacgtacttcttcagttgcataatggagaccggaccactagcgattctacattatatgagatttatggaaatattacatatatgcttatcacaatgctcgatcgttaatcacgtaaacgagagacgaacataggagcaaacatatatatgctactatgcgaaaatg

SEQ ID NO: 97532 - DNA, 218 bp, Oryza sativa
  Clone ID: PAT_MRT4530_95526C.1
tgcactcatgagcggacacgtggtcattcagtgcaggattatcagcatgaactataatgacactgtcatcgcgggctactatacgtggagaggaggtcaactaaactggagccaaaatactattatttcatgtatacggagacatggacaggactgtgaactagctcctcgtcctaagagccgtgagagttgcgttcatggcgatcgcactgaccgtg

SEQ ID NO: 97533 - DNA, 1143 bp, Oryza sativa
  Clone ID: PAT_MRT4530_95527C.1
ccgggctgcaggaatcggcacgaggcatcgcgatgccacctcccgccgtgagcacggcgccggtagctccggtcgtcgcgtcgtcgtcatcggcggcggcggcggcgccccgtagacctcgctcgctccgcctccgcgtgaccccgtacgcctccgtatcctcgtcgtcctccccttccaccttcgccgtctccatcccaccgccgcctccagcgaggcattcccgcaagcagctggtgggcagggacggcgcccccgcgaagcccgcgaaacctcgggtgttcttcctcgacgtcaaccctctctgcttccgcggatcccagcgcagcctcggcgccttcgcgcgctggctcgcgctcttcttcgcgcacgtcagcctccgcgaccccgtcgtcgccgttttggacggggagggcgggaacgagtaccggcggcggctgctaccgtcctacaaggcgcaccgacctcgtggccctggtacaggcgccgattcgcgcgttatcgatgttcttcgcgagtgcaatgttccggtcgtcagagtcgatgggtatgaggcagatgatgtagtggctaccttaacagagcaagttttacagaaaggttttagagttgtcattggctcaccagataaagacttcaagcagctgatatctgaagatgttcagttagttatgcccattcctgagattggccgttggtccttttatacgctgaggcattatgttgcacagtacaagtgtgacccaaccgcagatttgagcctcaggtgcttcataggtgatgaagcagatggtattccaggaatacagcaccttgttcctggttttggtcggaaaactgcagtgaaacttctaaagaaacatggttcattggaaaatttgcttaatacagctgcagttagaactgttggcaaggactatgcccaggatgctctagttaagcatgcagattacctgcggaaaaattatgaagttctcagcttgaagagggatgtaaaagttcagcttgatgacagatggttatccacaagggactcttgcaacgacagcagtgttttgtctgacttcatccttaaatttaacgaagggcagaatatcagaggaaattagtgtattcttggatccatcaaataactccttgcta

SEQ ID NO: 97534 - DNA, 780 bp, Oryza sativa
  unsure (1)..(780): unsure at all n locations
  Clone ID: PAT_MRT4530_95528C.1
agtctcttgctatcgtcggtgctggtggtggtctcggttccatcgctgttcagtacgccaaggctatgggtatccatgccattgccattgatggtggtgaggagaaggagaagatgtgcatgtctctcggtgcccaaaccttcatcgacttcacaaagactaagaacatcgtcgctgatgtcaaggctactaccaacgatggccttggccctcacgctgctctcctcgtcgctgctgccgagaagcccttccaacaggctacccaatacatccgatccaagggtaccgtcgtctgcatcggtctccccgctggtgctcagttctctgcccccgtcttcgacactgtcgttcgcatgattcagatcaagggatcttatgtcggtaaccgtgccgatactgctgaggccatcgacttcttccgccgtggtctcatcaaggttcccttcaagactgttggtctctctgagctcaacgaggtcttcaagctcatgaaggctggccaagttgctggtcgctatgtcgttgacaccagccgataggcgcgcggctgtcgcttggggtagtgcgggaaagcacaccccanaagtaaagggccacctatcgccaaaaagggtgatcgataacctactaagaggagttcaggcgngaggntggattttgggtttcagggcggtgatggtaaccatggatcttgnttaacaattttgtgtacagcctagatttatgagggtttttatgatttttgtatagcatgaataacagaaccgaatacttcgatcc

SEQ ID NO: 97535 - DNA, 393 bp, Oryza sativa
  Clone ID: PAT_MRT4530_95529C.1
atggagtctgtgcatggctgcctatttatagcgcggcagccgctgcaggctagggtagtgaggtgcggcgcggccgcccgccaaagcacactagcacagcaccggcacaatgaggcggtgggcgagggcaagggcgacagcaacggccctcaccctccctcacatggatctggcggtgggctcaagcgggaggccagtgcaggagcggccccgcgcggatccgtcggctgcatcctcccctgcactgatctggtagccgccgccctcccccacgtggatctggtggtgggcggtgaattagggtttgggatgactccggcggtgacaacatctggcagcagcgggctagggtgcgtcacgaacacagaaataacgatttttgtagccccctag

SEQ ID NO: 97536 - DNA, 1554 bp, Oryza sativa
  Clone ID: PAT_MRT4530_9552C.1
tttttttttttttttttttttttttttttttttttttttttttttttttttgagcgacttaaaccatattcacatttattaaattcagtattgaatgtctggacagtataaatccaactatagcgtacaaacaaaaatgccagaaaaaagagggagcatactgatggttcagattgaagaatcatgttgctttttcccagatgtgctaatctgaaattagtcgtagttacaacactgatctctactcaaatgaccacattaagcaaataaatatctgatgttgataggaggctctaacatggacatacaaatgaacgagcctaccaaaatcgaaataaagcatggcatgggagtttctcctcgggtatttgcaagtcaccatctatatatcctttgtttgtcagccctcacttccccttatttacaacttcagtcgctttttgtgtgctcaccgattgttagtcgcatgaagttttggtggtcgactccccccagcaagtagcattttttttttttcttaggtcttctcgttatgtacccaaatgagctaaggtagaatacaacttattcttttcgctgttcaccaatggaaaagaaagggaaaaaaaagcaaacacattcctatatcatacaactatgataacacgaaaggacacgacttattgagcaactgctgccttcttctttggtggtggattccccccagcaagtagcacatgagtagaagcagatcatagcggcactgtgagcagagtaaaaagcccagggaagcagtttctttggtgtggtgtacgcctggaagtgcttccatgctaccgcagcagcaacagctgcttgtgccagtatgaatggcaagcttgacttgccactcctccaaaccttaaggctaagcacaccaagggccaatattgcaaggccaggtgcaacaccgaaagtaagacttacggtactcctccaaaacagaaatccaacaaggcccatggaaaataaaattccaccaaaagggatccctaggcaaaagtcatgtattattgcacccttgtgttgaggaacagcctcttggtctatgtctatttctgcattagtaggcgatacagtggttggctgttgattttcatcttctgtatgctccgcgacagcattaggatcaacaggactgctggtatactccgccttcatgcacattgctatcaatggcttgggcagcacgacgccagcgggaaccccgcggagcgatccccgggcgatcgacgccgggaccgtcgacgtagcgagcggcgcgaagcggaggacgccgccggagggggccggccacctcctcgccgccgccgccgagggcccgcggagctgcgccgccaccgccgccgccatgtcgatgttctctcggtttggacttcggttcccgacgcgtggaagccggaaggggagaggagagggaggagtcgtcgtgctcggcggctaactctccttctgtctcctactctcctgcctctctctctctctcctgtctcggggggtgaaagttgagttgttgttcgtcgtcctcgtgccgaa

SEQ ID NO: 97537 - DNA, 368 bp, Oryza sativa
  Clone ID: PAT_MRT4530_95530C.1
atgggcgcggccggcaagtgccgggggaggagctggacgcggcggttgtcgtcgtcgtcgaatctggggaggtggacggaggaggcagtgcggcaagccgaccgtgacgtcggcgtcatcgtcggcgatccgctctcgccgccggggccggcgaggagcgcgtcccgcagcgaggtcgtcgtcggccgcggccgcctcccgctccgagtaggcggaggcgatgtggaggcggagcgggtggcctcgtcgcccgtcgccgcggccacctcgtcgcctgttgtcgctgccgccgacgccgccttgtcgccgccaccggccgccggactcccgcctgccgaactggggaaatttaactatttgccactctt

SEQ ID NO: 97538 - DNA, 396 bp, Oryza sativa
  Clone ID: PAT_MRT4530_95531C.1
ttcagctcaagtttagagtgagaggtgagagctcagcggcgcgccatggcggcggcggcggggaggatggaggagtacggcgtcgggcggatcctggacatcacccacgcgtaccgggcggacctgccggcgttcgcgccgggggcggtgacggggccggtggtgcggctcagggactccatggcgaacgggacgctctacaacctgtcggagctcaagatggagtgccacatgggcacccacgtcgacgcgccgggccacatgaaccagggccacttcgccgccggcctcgacgtcgacaagctcgacctcgaccttctcaacggtcctacattattggttgattctccaagaaacacaaattatacagctaaagcaatggagtcgttaaatata

SEQ ID NO: 97539 - DNA, 1324 bp, Oryza sativa
  Clone ID: PAT_MRT4530_95532C.1
ttttttttttttactggaaaattactttaaggggtttattggattattacggttcaacaaatatattttcggtttacccttattaatggttttctaacggaggcctgggcttgggaattcctccagggccttccagccaggatggttagcaaggcattaagaatggcattggaattcttggcaagttttttttttttttacatgaaaaattactttaagtgctttattgaattattactgatcaaacaaacgatatatatacgtttacacttattattgtttttctactgagctggccttggcactctcaaggcctcagccaggatgtagcagcatcagatggcatgatctgcagtgtcgccattatcaggagcagtgatgaagcaatcacttgatcaggatgcacctgattggtgagccctcggatccaaccagcctcagaggtaagcaatgcagcatgtagattccagccttgacatcgtctagcttcaggccttcgactaggatgatattcgggaatttgaaaaagaccacatgggcagtgatcaagtgatcatatgctgcaactgatagatagtcaataccaactagcttgatgtcagtgttgtcaactaaccactgtgcgccatcttctgtgaatccgacataactcagatcacctcccttcttccacatgagcttcctatctgtgttcaatgtcctgaaaagaactcgacgaacaccttttggtatatttaacgactccattgctttagctgttatatttgtgtttcttggagtatcaaccaataatgtaggaccgttgaggaggtcgaggtcgagcttgtcgacgtcgaggccggcggcgaagtggccctggttcatgtggcccggcgcgtcgacgtgggtgcccatgtggcactccatcttgagctccgacaggttgtagagcgtcccgttcgccatggagtccctgagccgcaccaccggccccgtcaccgcccccggcgcgaacgccggcaggtccgcccggtacgcgtgggtgatgtccaggatccgcccgccgccgtactcctccatcctccccgccgccgccgccgccgccgggaccccgcaggtgtcctccgcgccgtcgtaccccgggtgcgcgtcgctccccgccgccgggagcgcgtggcgcgccgcggcgacggcgaggacgaggaggaggagcgcaagccgagatgccgccatggcgcgccgctgagctctcacctctcactctaaacttgagctgagctgcctttgctagttgcctcgtggcgcgcacggcaggcgggggcgcgccgaattcctgcagcccggg

SEQ ID NO: 97540 - DNA, 855 bp, Oryza sativa
  Clone ID: PAT_MRT4530_95533C.1
atggccgcctcggctctgctccgcctcctctctccctcgtccccagcatccctccacgcgcgcgcgacgcgccgccgccatccccgcgccgtagtacgctgctcgtcgccgtcgccggcgtccctcgacctccccctcctcccgttccagcccgcagaggtgttgattccatcggagtgcaagactttacacttgtatgaggctaggtatctggcgttgctagaagaggccttgtataggacaaacaattcttttgtgcatttggtgctcgacccagttgtatcaggttcacctaaagcttcctttgctgttgaaaggcttgatattggagcactagtatcaattagaggagtttgccgtgtaaacattatcaaccttttgcagatggaaccctacttgcgtggtgatgtttctcccattatggacatatcttccgagagtattgaattgggattaagaatttccaagctaagagagtctatgtgtaatttacacagtctacagatgaaactgaaggtacctgaggatgaaccattgcaaactaacatcaaggcctccctgttgtggtctgaaaaagaaatttttgaggagtataatgaaggttttatccctgcgctacccgaacgtctctcctttgctgcgtaccagactgtttcaggtatgtcagaagcagaacttctttccctgcaaaaatataagatacaagcaatggattcaacaaacactcttgaaagactaaacagtgggattgagtatgtagaacataatattggaaaaaattttagaaaacagaagtacaacttctggctgttgcagcaactagagatacacacaaccattctaccaccatgctaa

SEQ ID NO: 97541 - DNA, 379 bp, Oryza sativa
  Clone ID: PAT_MRT4530_95534C.1
aagggaaaggcatggacagttagaaagaagcaaaggaactggatagaaacgcgccaagtgactgtgggcaaaacgagcaacggagccaaggggctcaatttggtagcaggaacagctgcggagggaaacaaagcagaagcaccagagtaggagactcagccatcagggacaaggggggggcaatctacaaacccaagacgaaagagcaggcaaccagagctagggccactgaccagagcacgcccgcgcgaaagatgcaacttagggcagcgtgagcgaagcggctgggacacgacaggaaacagacacaaagacagtccgtagtgatggcgagaccgagatcgaatggccatttttcgagtaagaggacacaaacgac

SEQ ID NO: 97542 - DNA, 380 bp, Oryza sativa
  Clone ID: PAT_MRT4530_95535C.1
gtaaaaaaggggggcttgggtcaaacttaccaggagatgtcccgcgtgttggatgggtcagcttgcggttccaagggcatttggagacccggagccttaatagaaccacctcagctcagagccagattgtgttgggaggaacctatagacgagaattactgattgttctaattcttgccaagtgatggattatggaaggtgatgtcccacacctagaggcggtggatggaaatcaaggacttgcaaggatgtctcagcatctgcgaagcatctaacggacgcagcgccgtgatacccggaaatacccaagacgacatgtctcctgcatcgtgtggtgaaaattgcactgctggctacgccagaaacaaggagtgtctgca

SEQ ID NO: 97543 - DNA, 423 bp, Oryza sativa
  Clone ID: PAT_MRT4530_95536C.1
taaatggagaaataaaaatatacaactctagtagagcgtacaggctgatcagcaatggactgcacagagaacatatttagcggcgtgcactaatggaagacatagcggggatctcgggctcgcaactcaacgagtaggggatgatgaatatggacaggaacaaccaggagaaggtgcacgacaggaagatggactcatgccggtaggtgcataagcatgatttcaccagcacgaagagggacaagtcgaagtaacagagcccgatcacgaatcggcactgtgaatgcaatgatgacagaagttgctgctctaaagccgtgaatgacactttgtcgacattcaggggaaggcgaagaactactaagagagaatgcggaggcacatacagcaaaggaggtggaaggggtagaaatagttactacc

SEQ ID NO: 97544 - DNA, 555 bp, Oryza sativa
  Clone ID: PAT_MRT4530_95537C.1
atggattgcgacgacaagtcacggctcgagctcggcaatggtaatcgccagagaccggatttgggggtttcgtatgtgaagagggcactagcaggcagcaagcggcgatctttgattaagaccaaaggatgttggctccgtcgatggcgctgtatcccgcgagagcagcacaaggaaggatccaccagtggtggcggcggcggcgatggagcggctgatgaggactcggtgcagctgcacaagcgatggatacccctacctactgacgcgccgagggggaagctacatgaggtggtgttgggggaggaggaggagagctccaccgtctccatcgagtcccgctttgtcccaccgacgaagctgggtccgagcctcggcgtgctcatcgcctccttgagattctccgtcggcgtgggcggcgccgactccgacaatggcgagaacaggagcagcaacatccagcaggtcctccaccgccatgagcgccccgcgccgccacgactccttacccttcgccgtgcgcttggcggcaggcggcgatgcagcgggaggtga

SEQ ID NO: 97545 - DNA, 713 bp, Oryza sativa
  unsure (1)..(713): unsure at all n locations
  Clone ID: PAT_MRT4530_95538C.1
catgaataattttgactttgtgatttacagatgatgataagcacaatgacgggttgtgctcaaagcttggccaaggagttagaggatgtcgcagccaagaacaaggacagagtaacagaggtcgacctcaaccaaaaattcagatagctaacagcagatattattgcccatactgccttcggcagcagttaccaattaggcaaagaggccttccaggcacagcatgaactgacagagatcaccatggcaactttatttcaagtgcaattaccagggctcaactatcttcctactgaaagaaatcggcgcaaatggaggcttcagaagaatctcagggacacactgatgcagatcatacgatcgcggctatcatcaaaagacggcgggtacggcaacgatctgctcggtttgatgcttggcgcctgcgcttcagacgagcaaggggaggccagcagcttgagcatggacgagatcgtagacgagtgcaagacgttcttcttagccggccatgagaccacctccctcctcctcacatggaccgtcttcttgctcagcgtgtaccccgaatggcaggaaaggctcagaaacgaggtcttgagagaatgtgggacggatcagtgtcctgatgccaattcactcggcaaactgaaggaggcaaggaacaagaatctctttctctacaccatntaattacatttatcttatatgtttta

SEQ ID NO: 97546 - DNA, 291 bp, Oryza sativa
  Clone ID: PAT_MRT4530_95539C.1
ccctgaccttacgagaaacaaccgagataagtctgcattaccatgctaaagactctggacagtaactggtagtcaaatgatgagggatcagagccatcactgctggagaggggtgtggcgctgaggtcaaagaatacaggtcgtggggatgagaacattctctctgcttgccgtggtcataataatataacgcctctgggttttccatgctgcttgtatatcaatggtgatagccttagctcctgcttaccatttcaagatactgtgggatataccctgtctctaactaca

SEQ ID NO: 97547 - DNA, 433 bp, Oryza sativa
  Clone ID: PAT_MRT4530_9553C.1
tagtggatcccccgggctgcaggcacaaagacattaactggcaactccatgattaataacagcaactgcatatagtaggatcacatcgtcggatatacgtaccccgtgtcattgcgtacggaaatatgcatgtctaaacaaagatgatatactcattatcttttggcatgtctttcctcttccttattgatacccattggacaattgaattttatctttgctcactgttcacagtggttgtttatttggaaacaaaccacaattttcattagttatttattcaacttaatttttctacgtcattctcatgcaataattagttcattgtttgtcatgaatggctatgttcagccagccaattaaatcaatattctttcaactaggaaggtagcccgcacacatgcgcgggcatcttgtttaatgtgtttgaaat

SEQ ID NO: 97548 - DNA, 1458 bp, Oryza sativa
  Clone ID: PAT_MRT4530_95540C.1
atgaagaagaaggtgtgcgtggttggcggcgggctggtgggattggcggcggcacgggagctgcagcgggagggccatgacgtctcggtgctcgagcagcgtggcggcgtcggcgggcagtggctgtacgaccacacggcggcgatcgacggcgccgacccgctcggcgtcgccggcgtgcagagcagcgtctacgcctcgctccgcctcatcaccccgagggaggtgaccgggttctccgacttccccttcagccccaccaccgtcgccggcggcggcgacgcgcggcggttcccctcccacgccgagttcctcaggtacctcagggacttctgcgacgcgttcgggctcatggacgtcgtcaggctcaacaccagggtcctgcgcgtcgccgccgaccgcgacgggtgggcggtgcggagcaggcgcggcgaggtggagacggaggaggtgttcgacgccgtcgtcgtggccgtcggcagctacacccagccaaggctcccgagcatcgacgggatggaggcgtggccggggcggcagctgcacagccactcgtaccgcgtcccggactcgttccgcggcgaggtggtcgtggtcgttggctgcggcttcagcggcaaggacattgccctggagctccgccgcgtcgccagggaggtgcacctcagcgtcaggtcgacggaggaggccatggcctcgccggcgatgtccaagatgctcgccaggtacggcaacctccacctgcgcccgcagatcgcgcggctgtgcgaggaggaggacggcgcggtcgtcgcgttcgccgacggctcgcgcgtcgccgccgacaccgtcgtctactgcaccgggtactcctactcctacccgttcctggacaccggcggcaaggtcaccgtcgacgacgacaaccgcgtcggcccgctgttcgagcacgtgttcccgccggagctcgcgccgtcgctctccttcctgggcatcccgaacatggtgacgacgaggttcttcgaggcgcaggcgaggtgggtggcgcaggtgctgtccgggaggagggcgctgccgccggcgggggacatgctccgcgccgccgaggagcacgcccgcgccatggacgccgccggcgtggcgaggcggcgcgcgcacgacgtgcccgacctgggcgaggagttctgcgagcgcagctgcggcttcccgcggctggaggagtgggagaaggagctcatatggacgtccatcaccgccatgcgcgacgacctcgagtccttccgcgacgacttccgcgtcaccgacctcgtcgccgacggcctgcgccgccacggctggatcctggcgccggcgccggagccggagccactgcgccaggaggacgtcgtcgccggcgacggcgagggagaaggcgtgcagccggtgcaggccaatcaggcggccgtggcctctccactgggctttatcaattcagcgtaa

SEQ ID NO: 97549 - DNA, 285 bp, Oryza sativa
  Clone ID: PAT_MRT4530_95541C.1
atgacgtggaggccgttatccctcggcatcgatggtgacacgcgatgggacgtggtgacgcaggcgctcgtggcggcgcaacctttttgcggaaatccggcggctcggtcaggcggcggggtccacgcgagcgcggtgcggcgtggcgcggtgcacggacacgcctggtgcggcgcacgggcagagaggtcgtgcgcggcctggttgcaacagggaaggtgcagcgctgggtgttcggcatgggctggggttctggtcgagcacctggcggcctatgaacagtag

SEQ ID NO: 97550 - DNA, 219 bp, Oryza sativa
  Clone ID: PAT_MRT4530_95542C.1
atgaaggtgatggtcagcgatggcaattgggtctttgatttgagggtttttcctagagggcttgaatttgagctagcttcttcttcatcgaggttaggaggcagcacaaggcaaaagtggatgatgggcctcatcattgctgtgacggcggccaccttcactaacccgccgttgttgtgccacatcaagaagatggagcatagtgtcaatcggcactag

SEQ ID NO: 97551 - DNA, 1140 bp, Oryza sativa
  Clone ID: PAT_MRT4530_95543C.1
gccgcacgccgccgccacgacgccctcgcaagaggaagcgtggcgccgtcgtcctcatcgggtgagggagcaggagtgctggcgcctgtcaccatcaattacgcctcttgcgccacagcgccatcgccatcctcgcccccctcaccgccacgtactgctcctcctcggggcggtcctcgcagcacagcgacgcacgcaccacgagcttcccttccgcgtccaccgccgcgtccaccgccagctcgtccgcctccgtcggcagcagctgctgcgccgccgccgaccgccgccccaccaccgcatcgtcgtcgtcctcgtcgttgccgtggtaatcccccgccgccgctgccgccgcgatcgccgtcgtctgccgcttcagctccttcacgtgctcgatcacctccgccagcagcgacgccttgtcccgctcggcctcgctgtggctccgcgacgccgccagcgccttggcgtccatgatctccctcgccgtcacccgccccagctccgcctgcaggctgccgagcagcccggacaccaccgccggcttaccgccaccgcctctcgatgatccctccgccgccgccgcgccaccacgctgctgcctggttaccaccggcgccgccgcggcctcgaaaccgaacccgaacaccccgccctgcccgaccacgtcgacacaccctccgtatccccccaccgccgccgctgccggctcccccgtccccggcccctccggggccccgccacccgcatcccccgtccccgcacccgcccaactccggggccccgaccccgaccacccgcggggcgaaatcttcacccgtcccctcccccccctaaccctaatccgcctctaccacctagccgaggcccgccgccgtcgccctcgcggtcaccggctacggatctgccgcccgctcccaccactcctccctcccccgcctcgccgccagaaaaaccccccgctcctctgcgggtccacccggccccggccccgaagtggagggcgggttgaaatcgatccccgtccccggcccctccggggccccgcccatcccccgtccccgcacccgcccaactccggggccccgaccccgaccacccgcggggcgaaatcttcacctgtccccacccccgcaggga

SEQ ID NO: 97552 - DNA, 1092 bp, Oryza sativa
  Clone ID: PAT_MRT4530_95544C.1
atgtgggaaggcgggagccacgacgccgcggcgcagctgctgccgtggttcgtcggcgagccggcagcggcggcggtggggggatacggagggtgtgtcgacgtggtcgggcagggcggggtgttcgggttcggtttcgaggccgcggcggcgccggtggtaaccaggcagcagcgtggtggcgcggcggcggcggagggatcatcgagaggcggtggcggtaagccggcggtggtgtccgggctgctcggcagcctgcaggcggagctggggcgggtgacggcgagggagatcatggacgccaaggcgctggcggcgtcgcggagccacagcgaggccgagcggcggcgccggcagcgcatcaacggccacctcgccaggctccgcagcctcctacccaacaccaccaagacggacaaggcgtcgctgctggcggaggtgatcgagcacgtgaaggagctgaagcggcagacgacggcgatcgcggcggcagcggcggcgggggattaccacggcaacgacgaggacgacgacgatgcggtggtggggcggcggtcggcggcggcgcagcagctgctgccgacggaggcggacgagctggcggtggacgcggcggtggacgcggaagggaagctcgtggtgcgtgcgtcgctgtgctgcgaggaccgccccgacctcatcccggacatcgcccgggcgctcgctgcgctccgcctccgcgcgcgccgcgccgagatcaccacgctcggcggccgcgtccgcagcgtgctcctcatcaccgccgacgagcagcagcagcagcactgcgacgacgtcgacgacgacgaggacgggcatcgcctccttcttcgccacggcatcgacggcgccggcgccgccgccgacgacgacgacgagtgcgcggcgtctcaccggaggcacgagtgcatagccacggtccaggaggcgctgcgcggcgtgatggaccgccgggcggcggcgagcagcggcgacacgtcgtcgtccggcggcgctgtcgtcgccggcggcggcgggggcagcatcaagaggcagcgaatgaactacggagtgcacgagcaatgctcggtgtag

SEQ ID NO: 97553 - DNA, 1018 bp, Oryza sativa
  Clone ID: PAT_MRT4530_95545C.1
tcaaacatcatcattgtactcttctacggcccttccactgcctccctctttattgtaattgggattcttaccgccggtaaccgtgcggttaccgcggttaccgggcttaccgcgggggtacggtaatataaatacctcggtaacctccgccggggcgcggtaacccgggccccggcggtttgggaaacccctgcatgtcaatgtcatcatgatatcagctttttggttggaatggtataccgttgtatagtatttctgtggatcttctccttctctgacatgattgttgattccggacgtctgcctcatcttcttcagccttttggccttgagcatgtcggccacacgttgacaggctagatctatcaggcccttgacgcccatgacattggctgcgctgatcaagcgccgcagcgtgtcgttgtcgaccttgatgaacaccctgtcgaacttcttgagctcgtcctcgtgcattgctttcatgtcgccggtgccagagctcaaggtggcgtgcttcatgcagtaccgcttggcgatgacgttgtcggcgacgttagggatgggaatcccgttgtcaccagcgtggtggtcactaaaaggtggcagcggctgctgctcccccttcttggcatggcggcggctgctcctcccctccccggcacggtggtagcggctgcgtctcccctccccgactgccccctccgctttccgacatggagcagatggcggctgctgctccctctcaccacccgatgcgggctgcatcagcttttcgatctcctgcgaaggggtaagtcctacattccgctggccctagcaattgtatcggctacattggtgttgttcaaggctacatcgcttcgatctcttggatcgctctggttaggttgatatatttgcctacctatttatcatatgtcttggttaatctagtctggtagctcaatttacttgtatcggctggggtctgctttagggcttttgccggtatcggctaaattgcttttccagattagat

SEQ ID NO: 97554 - DNA, 3496 bp, Oryza sativa
  Clone ID: PAT_MRT4530_95546C.1
atggaggaggtggaagccggtttgctggagggcgggatcgggtggctggcggagaccatcctggagaacctggacgccgacaagctggatgactggattcgccaggttgggctcgccgatgacacgaagaagctcaggtctgagatcgagagggtggatggggtggtggctgccgtgaaggggagggcgatctggaacaggtcgctggcccgatcgctccgtcgtctcagggagctgctctacgacgccgacgacgcgatcgacgagatcgactaccacaggctccagcatcaggtccaacgaggagatgcatggcacggcgaccctgatgaaagcgcggatgggcatggagcagagcaaacagggagacctcggaggggcaaggttggtgaagcgagcggcagcggtggcaaaagacggtccgggatatggcagcactttgagagcgtggaaaataatgcgaaagccagatcatgttcttcttgtagtgccagcgagggcggagcaaattcatttgcagctggtaattcagtcggcagaaaaaggatgagaaccgagggtgcatcagcagacaacgtggctgctagtatgcacccttggaacaagactgaactttccaacacgatccaacaaatgactcatcagttacaagaggccatgaatgaggttatgaagctacgtggatcggacaattttgtgagttcaaacttccatcataatacaacttctgattcacgcctaaaaacatcgagccttctccaaaggaaaatgtacggtagagttgatgagaagaactccatcataaagatgataacagaagccaaatctgatggtgtaactgttatccctattgttgggattggaggtattggcaagacggctctcgctcaattcgtatacaatgatccagatgtgaaaagtttatttgaggacaaaatgatctgggtgtggctgtctaacaactttgacgaagagcaactaacgagagagatgctagatgttgtctgtcaaaaaaaacaggaaggatcatgcaacttttctaagcttcaagagatcttgaaaagccatatgaaaccaacgaggtatctacttgtattagatgatgtctgggatgatatgaataattaccgattgaacaaattgttggctcctttcaattctaacaatgcagagggaaatgtgattattatgacaactagaatatggtctgttgcaaaaaggattggcactgttaaaccaattgagttaggtgctttggaaaaggaagactcctggatgttattcaaacaatgtgcatttggtgatgagaaccacgaactatgtggaagtctaagcatcatggggcagaaaatagaagataaattagatgggaaccccttagaagcagaaaatattggagaactattacgtgagcatcacacagttgagcattggaataatattctcaagaccgaagactggaaatccatgcagctcagtggaggcatcatgccaagtttgaagcgtagctatgatatgcttccctaccagttaaagcaatgtttcttgtattgttctcttttccccaagggttactctttcagtaaagaacaactgatacaaatatggattgctcaaggatttgtagaaaaatccagtgagaggttggagcagaaaggtaggaaatatctagctgagttggtggactctggtttctatcagcatgttgaaagaacatcagaacattttgttatgcacgatcttatgcatgatttagcaaaattggtttcacaatcagaatttgcaaccatagatgggtcagagtgcgaagagctaccatcaactattcgtcatgtgtcaatattgaccgattctgcatacaacaagtatgaagatggagatttttctcgtaatgaggagtttgagagaaggttgctgaaagttagatcaagaagtaagttgaagaccttggtatttattggggaatatgactctcattttctcaaatccttccaagatgctttcaaggaggcaaaacacttgcggctgctgcagatcacttcaattttggtatactgtacacatctccgttatctgggacttgagaacgagacccagcgaactttgccccaagctctaagcaagtgttaccatcttcaagtactacatattggctcatgtggaactcccaatatacctgaagaaataaataatcttgtcagccttcagcatcttgttgcacaaaagggagtttggtcttctattgctaacattggtgaaatgacctcacttcaggaattaacaaatttcaaggttgagaattctattggctttgagataacacaacttcaacgcatgagcgagcttgtagaactgggtgtgtctcgacttgaaaacgttacaactaagcaggaagccagtggcgcaagcctgaaagacaaacatcacttggagagactacatttgttctggaagggtgtacggaatggatatgacagtgacgggaactacaatgaatacgacagtgatttgagctatagtgacagtgatatgaactctgaaaatgaatgcgatggtaacatgatacccgaaccttctatgcactcagaaacagaagaggagagactgcaaacgactgatagcaatgatgtccctagtttagatcatattccagacacagcaagtgaggtgcttgaaggtcttgaaccacatcgcaacctcaagtatctatggatatcttggtacaatggagctaaagcaccaacttggcttgccacttcacttacccatctgcaaacactccgtctagaaaattgtggagaatggcaaagactttctttagaaaggctatcactacttagaaagcttgtgttgatcaagatgaagaatgcatcgcctatctccaaagccttgatgatgtcgtcgaagtgtgccaattctaggatgatgaagaagaaaagatgtatccccttctcaatgaactggaccttggagccttcacaaactgttcttcggctcttcattgattcggagatgttgatgatgatgatgatgacaatggaccttcacaaactgttcttcggtcctttgactgatgatgagacattgatgttgatgaaggtccttcacaaactgttcttcggaccttcactgagtgatgatgatcatgttgacaagctccgacatggagatgatgaagtgacaatgaaggccagctccgacggggaactggtgatgattaaagccaactctgacagcgagttggtgatgtagaaaagacgatgaagagatgaactggcatgactttgacgaattgagggtaagcaatggatttggattgactcgataaattgtagagaaatttgactcaatgatagtagcagacactaagtagtagcaaaagagatgaactggtgcagattcaacaaattaaaggatatgcattggagtattggacttggatggacttgatacgaaatatagtaaattgatgaccaagacatgaattcccggccgg

SEQ ID NO: 97555 - DNA, 1571 bp, Oryza sativa
  Clone ID: PAT_MRT4530_95547C.1
cgggctcttctctctcgtgttctctcccaatctcttcttgcggcggaagcaaagcgagaagcgaggcgactcttctccggcggcggcggcggcggaagcggcggcgagatggacggcggcgtaggcgaggaagggaagcagcagccgcacctggtgctggcgcacaagctgttcctgctctcgcacccggacgtggacgacctcgccaaggtcgacctccgcgccgatgtcctcgccgcagtcaaatccgatgatatggcgtctctgtacgagtcgctgggggccggcggcgtgctggagacggacgctgcgctgctcgcggagatgcgcggcaggatcgaggaggagatccggaagcttgacgagaagatcgctgatgctgaagagaatttgggtgagagtgaagtgcgtgaagcccatctagccaaatcgttgtatttcataagggttggagagaaggagaaggcactagaacagcttaaagttactgaaggaaaaactgtagctgttgggcaaaagatggaccttgttttccacactttacagattgggtttttctatatggattttgatctcatctctaagtctattgacaaagccaaaaaattgtttgaggagggtggtgattgggagaggaagaacagattgaaagtgtacgagggcttatactgcatggccactagaaacttcaagaaagctgcaagcttatttttggattcaatttcaacattcacaacctatgagttgttcccctatgatacattcatattctacacagttcttacaagtgttatctcattggatcgtgtatccctaaaggcaaaggttgtagatgcacctgagatcctggctgtaattggcaaagtacctcacctctctgagtttctcaactccctctacaattgccagtacaagtcattttttgccgcattctctggcttgacggagcagatcaagttagaccgttacctgcagcctcatttccgttactacatgcgtgaagtccgtactgttgtctattcacaattcctcgagtcctacaagagtgtgacgatggaagcaatggcttctgcatttggtgtgaccgttgatttcatagacctggaattgtcacgcttcattgctgctggaaagctccactgcaagatcgataaggttgcttgcgtcctggagacgaaccggcctgatgccagaaatgctttctaccaggcaaccatcaagcaaggggacttcctgctgaaccgcatccagaagctatcacgagtcattgacctgtaggtgttagtgttggagctggtgcttgccaaaactctgctcgagctcccccgcacgagtaacttatttgctttggtcccaggggactacgaacagtacttgacttcgcattcgaagtaggttacgaggaaagagagcttaacaaaatcagcgttaaatctgagaatttgagcttatgtaacctactatatggatcgatgaaagttcagacccgttgtttctagactctcttctgtgatgaattcatccatttatttcatatcggtgatcatttgtgtttcaaaaaaaaaaaaaaa

SEQ ID NO: 97556 - DNA, 1715 bp, Oryza sativa
  Clone ID: PAT_MRT4530_95548C.1
atggccggcgctaccgctgccgccgtctcctcctcctacgtggcgctcgcgttgctctccctcgccgccgcggccgctgtggccggcgctaccgctgccgccgtctcctcctccttcctcgcgctcgcgttgctctcgctctgcgccgcggccgctggcggctcgcctcagctggacgcggaggccgcgcggcagcaggaggccgaccgcgtgacgaggctgccggggcaacccgccgtgcggttcgcgcagtacgccgggtacgtgacggtgaacgagacgcacggccgcgcgctcttctactggttcttcgaggccaccgccgccgccgacaagaagcccctcgtcctctggctcaacggcgggcctgggtgttcgtctgttggatatggcgaatcggaggagctcggtccattcttggtgcagaagggcaagccggagctaaaatggaacaagtactcgtggaacacaatctgatgttcctggagtcccctgtatccgctgatgatgcttacatcttcctgctcaactggttcaagcgcttccctcagtacaaatctcacgacttctacatcgctggagagagctacgctgggcattacgttccacagctttcggagaagattttcgacggcaacaagcaaggccccaaggagaactacatcaacttcaagggtttcatgatagggaatgccctgatggacgacgagacggaccagacgggcatgatcgactacgcctgggaccacgccgtcatctcggaccgggtgtacgccgacgtcaagaagtactgcaacttcagcatggagaacgtgaccgacgcgtgcgacagcgcgctcaccgagtacttcgccgtgtaccgcctcatcgacatgtacagcctctacacccccgtctgcaccgaggtctcgtcgtcggcggcgttcggccagcgccaggtcgccgtccacggcgccgccccaaaaatcttctccaaataccatgggtggtacatgaggccggcggggtacgatccgtgcacgtcggatcacgccgaggtgtacttcaaccgggctgacgtgcaggaggcgctgcacgccaacgtgaccaatatcggctacaactggacgcactgcagcgacgtgatcggcaagtggagagatgctcccttctcgactctccccatcatccgtaagctcgtcgccggcggcatcagggtctgggttttcagcggtgacaccgatggaaggatccccgtgacgtcgacgaggctcaccctgaacaagcttgggctgaagacggtgcaggagtggacgccgtggtacgaccatcagcaggttggaggatggacgatcctctacgagggcctgacgttcgtgacgatccgcggcgccgggcacgaggttcccctgcacgcgccgaggcaggcgctcagcctcttcagccacttcttggctgacaagaagatgcctccgacggcgttcccctagtcgctcgcatgcagtctgccttcttcaacgatggcgaggaacgggcgtcgtgcgcccactaggttgttttccagcgataccaactgatcaggaaattttcttttctttggtccaagactccaagtcatgtaacacagtggaaattcgattggaacaatcgataacaataaaatcatatatagtgttgattgatttaaaaaaaaaaaaaaaaaaaaaaaaaaataaaaaaaaaaaaaaaataaaatg

SEQ ID NO: 97557 - DNA, 1476 bp, Oryza sativa
  Clone ID: PAT_MRT4530_95549C.1
atggccggcgctaccgctgccgccgtctcctcctccttcctcgcgctcgcgttgctctcgctctgcgccgcggccgctggcggctcgcctcagctggacgcggaggccgcgcggcagcaggaggccgaccgcgtgacgaggctgccggggcaacccgccgtgcggttcgcgcagtacgccgggtacgtgacggtgaacgagacgcacggccgcgcgctcttctactggttcttcgaggccaccgccgccgccgacaagaagcccctcgtcctctggctcaacggcggtatctttaatattaaaaagtatgatacctttttaccttacgcaggcaggacgccggaaagggatcgggagcgcgaaaggcctgggtgttcgtctgttgggtatggagaagcggaggagctcggtccattcttggtgcagaagggcaagccggagctaaaatggaacaagtactcgtggaacaaaggcacgtactgcttgttcatgccaaaccctgcattctctgatgatgcttacatcttcctgctcaactggttcaagcgcttccctcagtacaaatctcacgacttctacatcgctggagagagctacgctgggcattacgttccacagctttcggagaagattttcgacggcaacaagcaaggccccaaggagaactacatcaacttcaagggtttcatgatagggaatgccctgatggacgacgagacggaccagacgggcatgatcgactacgcctgggaccacgccgtcatctcggaccgggtgtacgccgacgtcaagaagtactgcaacttcagcatggagaacgtgaccgacgcgtgcgacagcgcgctcaccgagtacttcgccgtgtaccgcctcatcgacatgtacagcctctacacccccgtctgcaccgaggtctcgtcgtcggcggcgttcggccagcgccaggtcgccgtccacggcgccgccccaaaaatcttctccaaataccatgggtggtacatgaggccggcggggtacgatccgtgcacgtcggatcacgccgaggtgtacttcaaccgggctgacgtgcaggaggcgctgcacgccaacgtgaccaatatcggctacaactggacgcactgcagcgacgtgatcggcaagtggagagatgctcccttctcgactctccccatcatccgtaagctcgtcgccggcggcatcagggtctgggttttcagcggtgacaccgatggaaggatccccgtgacgtcgacgaggctcaccctgaacaagcttgggctgaagacggtgcaggagtggacgccgtggtacgaccatcagcaggttggaggatggacgatcctctacgagggcctgacgttcgtgacgatccgcggcgccgggcacgaggttcccctgcacgcgccgaggcaggcgctcagcctcttcagccacttcttggctgacaagaagatgcctccgacggcgttcccctag

SEQ ID NO: 97558 - DNA, 1455 bp, Oryza sativa
  Clone ID: PAT_MRT4530_9554C.1
gctcctgccctgccgtaccgaatcgcatttcggatgacaattgacatcgaatctctggtaaaggatgtgacgatctgctggcagcgtgccgagggagcgaagagccgatcgggatgcaagattccgtcgcttgatcagagagacaggccggctgcgatgtgcatcggccctaaccaccacaatcccttctaccgccagatggaggaggagaagaaggcgatgctctacagcatattgacccaggtggacgagcaacacaaggctgcagtgctgaccagattaatggacgcgatcaaagccctcgaaaacgaagcaagggaccattacctcgaccgcgccgagagcatgagcagttcggagttcgtgcagatgctggtaatcgacgggtgctacatccttggcaagttcgtgctgcctcactcctgctgccccagcacttcagacgacggggcgcagaacgggagtgcgatgcagaacatggaattggtgcgcgacgtgttctaccgcctggataaccagatacccttctgtgtcctcgacgagatccacaaggtgctccatggtaagatcatccgctcgtgcacggcggtcgccgacgtgttggtaacccacgtcggggatctgctcgagaacctgagctactccagggtgcacgcactcgatgttcacgcgagcccctggcacttgcttcacttgctgcacacgcgcctccagcccaccgccgagtggggcagcgagaagcctaccaagggcgccgctgcgcatgtcgtcgtcagctgcgcatccacgcccggtttctaccgctggcgcccagcgacgcagtacgacgccgctggcgtgcggttcaggaagttcgatggctccagctgcatcctggacgtgaagctcgacggcgccacgctgcgcgtgccgtcgcttgtggtggacacgaacacgtacgccctcctgcgaaacctgatgatgctggagcagcacaacccagaccagctcggcagccacgtcacggcgtactgcgtcttcctctcgcagctcgccggaacgcccggcgacgtcgcgctgctcgcgaggaaggggatcatcgtgcacctcctgcccagcgacagcgacgtcgccgtgatgttcgccggcctctgcgtcggcatcaccatcggcatggacgagcccaaacacaactacctgcacaaggagaggaatgatctcgagcgaatctacaacagccgcctcatggtgcaacacactaggaactgcgtgacactgccgcatcgcaacccgatgctggtggtcgcgcttcttgccgccacgcttggttcttgtcgtgccggacgtgaacagtctgcccgcaaggtgtttgatcggagtttttgctatcgccaacaggcggtagagcagtgcgaggcgaaggagacgctggactggatgccaatgtggctggccctagcggggtcacccatctga

SEQ ID NO: 97559 - DNA, 936 bp, Oryza sativa
  Clone ID: PAT_MRT4530_95550C.1
ccacgcgtccgcatctttgaaccaaacagccaacctcctcctcctcctcctcctcctcctcctcggcctcggcctcggttcctcctccccgccgatcccgccgctataaatccctcccagccgcgcggctcggagacgcgctcgccgctcgctcgctcgtcgctgctctgttccacaaccgccggcggccggagagggagggaaaggagagggagggaggggggaggcgggggcgatggcgaagctgtacgtgcaggcggtgccgccgccggatctgaacaggaacacggagtggttcatgtacccgggcgtctggacgacctacatctgcatcctcttcttctcctggctcctcgtcctctccgtcttcggctgcacgcccggcatggcctggaccgtcgtcaatctcttccacttcgcgatcacataccactttttccattggaagaagggaacaccttttgctgatgaccagggaatgtacaacacattgacttggtgggagcaaatggacaatggcaaacagcttactcgcaacaggaagttctttgttgtagttcctgttgtcctgtatttgatagcttcacacactacagactaccaacatcctatgctcttcctcaacacccttgcagtcgcagtgctcgtggtcgctaaactaccgaacatgcacaaggtccggatttttggaattaatgctgggaactaggcagcaggatccttcagcagacatctacctatcttcctttccagttcatctggctcatcagagtatcaaggagtagagcttaaatgttgttagctgatgggttgtgatcgttgtatagagagatgctcagaggctgaaaacgatgctgctgtatatctgatgtacacgaattctgtagactcttaacgctgctatatgctttgatacaaatatctgtcagttgctgc

SEQ ID NO: 97560 - DNA, 252 bp, Oryza sativa
  unsure (1)..(252): unsure at all n locations
  Clone ID: PAT_MRT4530_95551C.1
atggcggagaggcggagcgcggggaggacgcggcagtcgggctgccggccggtgncggagcgtgggaagnacccgccggcgggcggaaccgaggaggtggcgaagagccgggaccaaaaccaccgtggattaggtcgaggaagttactatcccaagctagctctaattgttgatagttgtgaaccattagatttcgcgaaatctatctcaagagcgccctcggtttatgtgacatcccggcccagggcttaa

SEQ ID NO: 97561 - DNA, 417 bp, Oryza sativa
  Clone ID: PAT_MRT4530_95552C.1
atggtggagatcgccgcgagattcatggacaaggttgaggcggcggcggcggcggcggaggaggagggtgatgtcggcggggaggaggtggaggcgctgccggagccgcccgacgacgccggccccgtcgcgtggcccatgccggagttctgcccgctcacgatcgacgggttggtgaaggagtcgttcatggaggcgctgcggaaggacgcggcggagcaagcgctgcgggacgcggaggcggtggaggcggcgcggagcccggagtcccggccgtcgagcagcaagcgccagcgcgccgccaccgcctcgccgcagcagcagcagcagccctcgtcgtcgtcgtcgtcgtcgtcgaggagcccgtaccgcaacattctgcaggttttccagcagtgcaagcaggacgtcacctga

SEQ ID NO: 97562 - DNA, 348 bp, Oryza sativa
  unsure (1)..(348): unsure at all n locations
  Clone ID: PAT_MRT4530_95553C.1
aatcctccaacctgccactacatcttggtggcttttaataaaaanatcggtcattacaaacatcgcnctcgctccctacccagcttcctcctcattacccgacactgattcctaccgccccccccaatctccaccccgtcccaacattacaaccaattacctccccccttggctcccccccaggcccacctgatactgccaaccctaccactctccatccacccccaatcttcgctccttccctatcaaaaacataaacctctcttcctacaacctttttatctcctatccaatctacccaatcttcaatcaccctcttttcattcccctcatcctactacccgaacc

SEQ ID NO: 97563 - DNA, 486 bp, Oryza sativa
  unsure (1)..(486): unsure at all n locations
  Clone ID: PAT_MRT4530_95554C.1
tttttgatgccaacatttgggatgcattccctaaggacactttnattctcgttatgacgntatcgagaagatacctgcccttcctccccttcttcctgccacccaaaatcctgccacccaaaatggtagtgtaagaataaacaagccattgcagtaggttctccgtgttgaagattagagtttcatggcttggatcaattgttggtattattaagggtatgcatgctggttctggggatcggagctcctgcgatggccggcgtttgtggtagctgcgaaataccgcggttcataattcgttggctgcaatcagttaaacccatttttaagttttgaaacaaagttgaaccccgttttaattatgtttcggtcttgtgatgactgaatgttttgaatgtttaaacctgtttttacctgtaccgtaccagatatgtcgtttaaacttatcaggcaccgacattttggatcttgaaaaaaaaaaaaaaa

SEQ ID NO: 97564 - DNA, 330 bp, Oryza sativa
  Clone ID: PAT_MRT4530_95555C.1
ccacgcgtccgaattgctttcgatggctcactttgccgtgtacgctcgattcggggcgaagaaattcagcgaggatttctctccgggggagaaagccggccgaatctttctgccgctcgcgcgtgtcgctagtcgatttcgagtagtcgctgcttctgaaacgattgggatgcttaacggattcttggttgattgtgtcatatatatagagctgggcttttgattattcgattgagtgtgtgtgcgtgcgcaattttcagattactttggagcaggaggaggagcggcagcggcggcgatggattggtcgttcgcgagcagggccgggtt

SEQ ID NO: 97565 - DNA, 528 bp, Oryza sativa
  Clone ID: PAT_MRT4530_95556C.1
aaaaattgtacatgattatcattgggtttattttttgtttctttctagaagtccagccaaccgctataaccataccgcataacgatctatccatcgttccccctcttaatcctcattgggattctatttgggttttttttcaaatttgtagatgtcccatcaaccgtcaccactcaatttctttacaggcatgaccatgatccaactgcttatattttttaatccgagaatttgtaagtcttgagagcaaacgtagagacttctttttacattactttattaaaataatagatagaatattttatttatataaaactacatcgatcaatatacaccattaaaatttagatcctttaaatacttcactttttattattaatatggtgatttccgccgcttctcagcattgccccattctcggagtatgagctataacatatggaccctaaatacagagaaagctattaggggatcttgttactaagaaatttattttaaaaaacatattgcttctaaagattatgcgat

SEQ ID NO: 97566 - DNA, 459 bp, Oryza sativa
  Clone ID: PAT_MRT4530_95557C.1
ccctgtaaggatcgcccatacattgtcattcaagacccatgccaactccacatggtgagccacccttgcacgggaagaacctcaatattgtccgtgccaatgccacgtcgatgtgagtcgctataatgcttatccgcatatcgagggatgcacagcaccgaagccttatatgaatatatatggggatgaagatgcctcggtcgccttcactcctagatagtcgaacccacagacctaccccaggctgtcgtccaaatgagtgcggagagatgaggcctgccagagtggatagtgacttaatggaaatagtataggtgtgatccaaaaaaaaaatgaaaatagcccaccaagtaatgtgaaactttgtgggccggtgtgctgttgctaagtgttgatgaacgccactgaataaaatggctgaccaactggtgtttgttccaaaaaaaaaaaaaaaaaaaa

SEQ ID NO: 97567 - DNA, 265 bp, Oryza sativa
  unsure (1)..(265): unsure at all n locations
  Clone ID: PAT_MRT4530_95558C.1
gcaaaaaagacgtcgccggtggccgagacgccaaaagtgtcgcnaaaaatctggnagacctgacnattnacactcttccctggcttagccgnnngtggcncgtcgccgtcggggcggatcatnacgaactcgttccggttgcgngatcccgccaccatnccngcgttcgccgccatcctcctccccttcctcctcctcctccactnacagcnanaaacnnctacgcagctngnagannnccgcgcgcgcngnaagcctagatcgc

SEQ ID NO: 97568 - DNA, 494 bp, Oryza sativa
  Clone ID: PAT_MRT4530_95559C.1
gctgggcaagtccatcggcgtgcacccgctcctcctcatggtccccggcgccgtcggcgcgcagctgtcctacctgctgcccaccggctcgccgggcaacgtcgtcggcttcagcacgggctacatcagcatcaaggacatggtgatcgccggaacgcccctgaaaattgtcggggttgcagctctcaccatcctactgccaacgttaggatccgtcgtttttggcatggatcagaagctatagaaactttagtcaaagttcaattggatgttttttgaatatttcaatttgtaggctgtaggttattacgtggataatatagtagtaagttgcataggttgtattgttgtacagcgtgtagtcaatcccattgtcttgcctcatgaaaaacatggggtcatattctttgagtcaatataggttgtatttgtattgagttgttccatgttaatatatctttcgacatcgtagccccatgttgacattttgatct

SEQ ID NO: 97569 - DNA, 1555 bp, Oryza sativa
  unsure (1)..(1555): unsure at all n locations
  Clone ID: PAT_MRT4530_9555C.1
ataaaccctcctctcctccccctctcccctcctcttccccgtgcgacccgcccaacccaaaccctaggtcacccagcgccgcggcgcccccggttgctgacttgccgcgggaaggaggatgagcaggcggtggagccggacgatctacgtggggaatctccctggtgacatcagggagagggaggtggaggatctcttctacaagtatggccgaattgttgatattgacttgaagatccctccgaggccaccaggctatgcttttgtagagtttgaagatcctcgtgatgctgaagaagcatgtgctggcagggatggttataactttgatggacatcgtctaagggttgaacctgctcacggtgggagaggtaatggtggttcctcctttgaccgccccagcaactttggtggtggaggacgccgtggtgtgtccaggcactcagaataccgtgttctggttactggtttgccttcttctgcatcatggcaagatttaaaggaccatatgcgcaaggctggtgatgtttgtttctcagaagtgtatcgcgagggcggcggtactgtagggattgtggactacacaaactatgatgacatgaaatatgctataaagaaacttgatgacagtgaattcaggaatgccttttctaaaggtcacataagggtgaaggaatatgatggcaagcgcgcccgctcctattcacgtagccgaagcccaagtcgtagccgaagcaaaagcaggagtctaagtaaatctcctagaactcgccgttcagcatcccgatctcgatctcgatcaaggtctgtttcttcccgttcacggtcagcatcaaaagggcgctctccatcaagatcaccagcaagatccaaatctccaaatgcttctcctgcaaatggtgaagcatcaagccccaagaaacggagcccaagcaggagcccatctcgttcacggtctcctgatgcgaaatctgaatagaagtgatatgctgatgtgagcagtgacacggacttctcatgtacggctatttgctgtccttgatgtccgattacatccgaatcttagctgtggtgcaatgaagctccattaaatttgatactatgaatttgtagtaatgaaaacatcaaactatgcacttcatgtggccttctgtggctggtcttgttcccttgggtttttggtagttcgccgaatgctactatctggattatttttactcaaaacatatgtcggatgcttattgatttccatgtcagttatttcttggcacccccatgttgtgttgctcatcaattcatggaaagcttctgctgcttgttgagcagcactatggtgcttgttaccctagcttgcaatatgcttgaccaccagcatgttgttgtgtgtgttccgaagtctggacctgatngataacttggatgtgggtgcccaagtaatatggcaatgatttgccgacactttttaaaggtcgccgctttagagtatccctcgaggggcccaacttacgcngtacccactttcttgtacaaatggtccctatatgattctatttat

SEQ ID NO: 97570 - DNA, 267 bp, Oryza sativa
  Clone ID: PAT_MRT4530_95560C.1
ggaatttcggatgcggtccacccgcagatctccgaccatcagcctaacccacggtttccccgcccttcacaccccaacctcgtacgctccgtcgccgacgacgactgcctcctaccccatgtatataacccccgccactcctctcgatgttgaggtaaatcgagtgagtccgcaagtcgttcgcgattcttgatcgagatctgtcagggtgataaaggtttagaacggtgctgagtttgttaatcttgggagaaaagggaaactgct

SEQ ID NO: 97571 - DNA, 274 bp, Oryza sativa
  unsure (1)..(274): unsure at all n locations
  Clone ID: PAT_MRT4530_95561C.1
atgtggcagntcttttttgttctcctattgtgtgcatgcatgacacttagcgcacggggaatccccctcaggggacctcttgtgtatgactcccacttacaactaggggcatgagctatactgccttcagtggcacggcctaggggcgggggcagattgctcattctagaactcaacttattgctgctctggggattactgctctctctctgaacgccttcccccgcctctctcatgagcaggaggggaaacgagcctgctcctttttttttac

SEQ ID NO: 97572 - DNA, 1511 bp, Oryza sativa
  unsure (1)..(1511): unsure at all n locations
  Clone ID: PAT_MRT4530_95562C.1
atgggcttccctgttgttggtgagacattccaattcttcagagcaagtccatctgtagacatgcccagctactacaagcagagactggagaggtatggacctctcttcaagactagcctggtaggtcagcctctggtcgtttctctagatccagaggtgaaccggttcatatttcaacaagaggagcctcaccacgtacaatggaaccgttcacaagttcatccggagctttgcgtccaagctctttgggctgaaaacctgaaagaatcgctccttcccgagctggaaaactccatgagggagagcttcgcatcatgggctagtaaaccaaggatcgaggtgcaagacggcgtatcagacatgatcttcgacctagtagcgaagaagttgatcggcctcaatgtgacccagtcaagagaattgagaaagaactttcaggagttcttccaggggatggtgtctttcccaatatatttcccagggacatcgttctaccgatgcatgcagggtagaaaaaatgtgcggaacacactgactgatgtaatgaaagagaggctaagtgcacctgaaaagaagtacggtgatcttgttgacctcattgttgaagagctacaaagcgaaaagccagtgattgatgaaaattttgctatagacgcacttgctgcgcttttgtttacgagctttgcaacactatcatcgacgttgactgtagccttaaagttcctcaacgacaatcctaaaattgttgaagagctcaaggaggagcacgatgtgatactgaagaaacgagaggtcatgaattctgggtttacatgggaggagtacaagtccttaaaattcactactcaggttacgaatgaaattactcgaattagtaatgttgcacctggagttttcagaaaaacactgacagacgtgcaagtgaatggatatacaattccgtccgggtggttagtcatgattagccccatggcagttcacctaaacccagaattgtttgaggatccactcaaattcgatccatggaggtggacggaggagaagagaagctcactgctgaggaattacatgccatttggaggaggcatcaggttgtgtctcggcgcagacttcagcaagctttttatcgcacttttcctccacatcttggtgaccgagtacaggtacattcgcatgctggtgttcactcattgcttgttaagctcactcaagtagcctcaaggctatcacatccaactaattcctgcgtgacttaacatacctgatcttatatattgaattccaggactgtaataaaaaaaatgtggtgaatccaaacactttggttggcacatcttattgctgactgtgaatgatgcatncctgtatggtatggagtatgtcgtcagtttgcatgagtcaagaaatattatgggagtaaataggcatgaactagggcaccacctttggacgaccctaggctgccttacgtactaaatatatttcatattttcatcaaaaaaaaaaaaaaa

SEQ ID NO: 97573 - DNA, 2924 bp, Oryza sativa
  Clone ID: PAT_MRT4530_95563C.1
atggtgacggatgcttcatcaggacgccaggccctgaccctctctctgctgctgacttgggcgtgggagaggtttggggttggttcatctcgcgggcttgggcggcgggaggaggagaggggttttgctttgtctcctgttccgactctccggttgattcctccgactgagttcagggggagttcttcaatcaggaaggtcttgactctcgacgaggagttcaaggttcttggattaaagattggcagtcattcatcgtggatggagaataggaacaaagaagatatgggtccatcccagcgtaattcttgccctaaggttcacagctcaatgtgcagtgagctgacaatgatgttagataaagtctcctctattcttccattaattgaggcagctcgaccaggatgtaaagcaggtatacaggaattatgcaacctatacaatatagttgagaaagggaaactcataattcagcactgcgttgaatgtagcaagctctacttggctattactggagaggcgattgtatctcggtgtgaaaggatcagagactcacttaggcggagcttgttcctgattgagaacatggtcccaccagcactagctaatcagattgttgacgtccatgatgatcttggggacataaaatttgttattgatcccacagaagaagaggctggcaaaaccattttagagatgcttcggcaatctgatgtgactgaagaacttgaacttgagacattcctgcaggcagcttcaaacttaaacctgacatctcctaaatctatgctaattgaacgaagggctatcaagaaactgcttgacaagattagcggtactgatcccaaaaaggagggagttcttaagttccttctataccttgttaaaaagtatggaaaaaacatcaaaccagaaactggtgagcggaatgaaaacatgcaatctgaaagccagtcttcgactccaagctcaagttttgttagtgataccagcactcctggaaagtggtacacacccacagacatccccgggaatgaggatcagactagtatgtcaggagcagccacaccacctgcagagttctgttgcccaatatcaacaaagttaatgcgtgatcctgtcataataacatctgggcagacttatgaaagagaaaatattgagagatggtttagggagggatatgatacctgtcccaggacacatataaagctagaaaatttcgcgatgattccaaatacttgcatgagggacctcattttcaattggtgcaaagagcatggtttcataatctcagatattctccctccatccaaaaatgcatacagttacttgccggagcaattgcatggttactccatgtcaagtctgcacaatgtttcagtacctctaattgctggaaaagtcagggattttgtgattgaccatagcacttcatctgttgcattatctgaggccagttatatgtcagattcatatcatgtgcgggacatggaggaaccgaaagatagtttttctcagttctcttggagtgcggactatcaagagtgtttgtcttttcgcaacttcaaccaggacaagttcctaaggttcttttacgagctgtcgaagctcccattggaactccaagacaggtccattggtgatttgaagatcattctcaatgaggaaaatgaggcttcatgtgctatggtttccaatggatttgtagaggcattctttgatttcttaatgaatgaagatggaagctacagtatgcaagctcagaaagttggatttcagttctttcgtgtttttctttccaatagcaggactaatattctacacatgaatgaagaagcattccgtctatttgcatcctttattgattctgagttaaaaaccgaagctttgctgacacttcacgagctggttcaacacctgagttgtcgacaatcccatttgatggcctctattatcactcctttattggagtctgaagatgccgagggtctcaagctttgcctgaagattgtctgcaatctttcatctgattcggatgtaaaaccatacctaatttcactgggaattgtctcaagattgtcacccattctttctgaaggaacctttgctgagtgttgcttggagattttgcggaacctgtgtgatgtggaagaagccacagtgcttattacaaaaactgatcgatgccttggttccgttgcagaatatctggacactggaagccctaaagaacgagagcatgcagtggttatccttttagcagtatgttcccatagttctgaggattgtttacttgtaatgaaggaaggtgtaatccctgcccttgtggacttgtcagtaaatggaattgatgaagcaaaaggttgttcaatgaagctacttcatcttctcagggatctgaggcgaaccgaccagttgaacaactcatgttcacaagaagtggttgtcacagatgtagtggagggtcctcctgacagttcaattcacaagcagccaataccaaagtcatctcgttttttccaaagaaagttgaacattttctcaaagccccggtcacttacgctattctgaaaactggtaaagatcgatctagtagtccttgtatattttataacactaacagttcttttgtatagggtggtagaggctgtattgtccaaaggaaatgcttgatgagatgatctttttcatcctcatgtattccagtagagtttgataaactattgtgatgcatcttgcagattgcagttgttttgcatcttgctgcgtgtaaaaagtaggctagatatagtttttgtatttttgtactctgctgtagtgctgttccattgacagctggaaagcctgaaaacaaggttttgtttatcttatctgaagttctgaagaaagcagaactggtgatccaaaaaaaaaaaaaaaaa

SEQ ID NO: 97574 - DNA, 342 bp, Oryza sativa
  unsure (1)..(342): unsure at all n locations
  Clone ID: PAT_MRT4530_95564C.1
nncccnntaaataattttttcaccaactttttttttttttgtgttttttttttttttaacaattccaattgccccctgtctttttatataaaaaggggaaatttaatacacttttatttgccagccagattgagttggcaaccaatttttaacaagaatgacaaaaaaaaaaagggaaaatgaaaagagaaaatttcatcgggcttttggtcgctgttaaaaaaaactcgacacgacatttcttgcaaaattaaacctagtaattagcgggaggagnatgctcgtcccttttacaaacaggcaaaaaagagagtgggaaaatcaaaaaccataaatgggaat

SEQ ID NO: 97575 - DNA, 994 bp, Oryza sativa
  Clone ID: PAT_MRT4530_95565C.1
gacttgctttgtgatatgcgttggggaagtaaacagcacgtaacgtgtcttaaatgcggtgtacaacatcaagcctattttattgctagtcataaacaatggcgttgcaaacattgtcatcataccttttcagtgacatcaggcacaatctttgccaaccgtaaggcttccattcaaacctacttgtatgtattagctcgttttgtgaatgcggttaagggcgtatctgcactagaaatctctcgtgacgctaaaattaattatcgtacagcttttgtgctttgtcataaattgcgtaaagccttgttagaaaatcgagatatgcaccccctttcaggcgaagttgatatggacggcacttatgttcaccctgcacctccgtaaagaaaacaagaaaatcgaccgcttggactatcgcttgaaagaaaataaaagtcctaataaacgctgtgttatggtagctcgtgaacatttttccgcagaagaaaaagcagaaaaccaatttaatcgcggggcaaaacgttcacacgtttttgtgacttattctgaatcacaacctgttgtaaaagacttctcaaatcgctttattgttcgtgaaagtcgcattaatacagacgaaagtacagcttacgaaagtttattactcgactatgatttacgcacagtgaatcataaagaagaatatcgtagcgatttaggcataaccaacaatcaagccgaatcctttttctctcgctttaaacgaatgtactacggacacgttcacaaaatgagtaatctttatttactcaactatgcaaatgaaatcgcttaccgtgaagataatcgtagaaaagccaatggttggcaatctcaggatattctcggtaaatgcttaacaacaactaatgaaaataacgaatggtgcggttattggcaacggaaaatcgttcatcaagaagtgatttggcagtaggggaagtaatggcttataccttagataagaaactcaaag

SEQ ID NO: 97576 - DNA, 1042 bp, Oryza sativa
  unsure (1)..(1042): unsure at all n locations
  Clone ID: PAT_MRT4530_95566C.1
atggcggaggagcggaggaggcggaagcgggaggaggaggaggaggcggaggagtgggagaggcggaagagggggaggaggaagaggaggaagaggaggaggaggcggggaggggaggaggaccccgtggatgtgctcggggaggaggtgatggggcgggtgatggagctcctggacgcacgcagcgtggcacgatgcaccgcggtgtcccgcgcctggcgcggggtcgccgccgacgaccgcctctgggcacccaagtgtgctgaattgatggcgggaaaggcacacattcctcgtttgactatgatacccactgcatcaaaattgtctacctattcaatggccatcgcggatggcaaacggactcggatcacaaaagaggacctctgcgatcatgattgggaattccgtttcactatagcagcaccagaatattggagaaacctggatccatcatggaaacataccggtccaccaatgcgacgttacttccaccctgatggttaccacagcgcagatcctcatgatgctgtatggggtggccatgagtgcacgtacacgatcataacaagctttgctggtaatggatgtatcagggatcattatgtgaggatcaatcggtggccaccgatgaaagtttcaaggaaggaggattggagctgggagctatccaaccatctttaccgctacaacagcatccctgacactgacaagaagggatgtacaggtcctctgttccccgtttggtgaatgaatccacttctatggtagtagcagtgaccggtaatagtcgcgatctccaactcatagaaactggcctcggatcgttcctgaccctgaggaacgtgataacgagaggctctgtttggcagttatgagctatgaacaccaatggagattaagcttacttatgtggtatactggtatgtaacgtactcctatatagtactacatgatttcctgtgcgttgctgctggaattggtataaaacttatgtttgcccaanaaataattctttacaaatatccttcatcaaccatct

SEQ ID NO: 97577 - DNA, 846 bp, Oryza sativa
  Clone ID: PAT_MRT4530_95567C.1
ggtaaagaacagcaacagaggctcaaagaggaggcacaatatttttttttcttctcttttggtttgaacatagcacagcagtagcagcagcactctctcacaagtctctcatgaaccattcaacaacaacaagaagaaaaagaacctaagggctccattggagaatagcaactctgcacaatctaattaagcatttgcaacacaaaatagctcttggaatcttggcaacaatcaccggtcgaggggctcggtttggtccttgacaaccaggcgttcagaaacctctgcaagagatttcaggttgcatttcagcagggcctccacgaagtagcatgtctcatccttggtgttcccctccgggacgtcgacgacgaacgactcgatcaccagcgtcccgggccggccgtcgatcacctccgggtggacggtcaggatggaggagtaattcttgagcctatgatcacctcccacgaacctgacactgagtatgtgctcattgtcatctaacagctccagcctctcagtgcttcttgtggcaggcaggccagacttaacattaacctcccttacactgccaatctcaatgttccctttcatctcacaccggctcacaaatggcttgaaaagctgtggctgatcaaaacgcctcaccagagaccaaaccaggtggacgggggccttgatgtgcttggcgacggcggaggagcactggtggtcgcggggctcgtggcggtggaaccgcctcacgtactccgtctccgccgcgcgcaggtcgcacctctcgtccgccagccgccacctcctccccgccgccgcctccgccgctcctcctcccacctccaccat

SEQ ID NO: 97578 - DNA, 2705 bp, Oryza sativa
  Clone ID: PAT_MRT4530_95568C.1
ggagagagagagagagaactagtctcaaaattatcaaccttggaagccacagaccagtcctgtaataggcaccgggtacaagtagaatggcacctccctaaaactcgagggtcccaacattcatcactgggtgcattgtacaaacggcacacaggttaacagttccacgacctcaaaactcaattgtcaagaagctcatggccctagaatcacgctaatggcacttcctgattctaattgcttaacaaaaaccacacacctccacgctaggcattgcaggcgatcttccaactgctagcctcagccaaaaaaacaagccgctgactatgaataaaaaagaaacccactaactatgaataacatcctgcttatcaaccgtctcgtctatcagaaagatgtgaagtagttggaagcaacaattgctccacctgcatctctacctgagattgagcttcgttaagagcctgaacctgagcttgagactgtgcatgcgcatgagcttgtgccatggcctctgcttgggcttgggcttgactttgctgcataagaaaccgattcattcgctcaagaagctggattgctttcctctttcctctgtctgtgccacttttggctagttcctccaacagggtcacaattccctgctcctgcgcttcagcaagatgctgttgctgctgttcaccattgcagagatgcaccagaacagcagcagcattttccttgttccttgctgatccatttctgattactccaactagcattggaatggcgttggctgaactaattgcagtcttgccctcaggatggctcgagagaattgccaatatagcaagggcctcatccatcataccactttcagtctcagtgactagtcctaatagtacagggatcaatccagctctaacagctttgcccttgttgccctgatagatacacaggttaaatagggctgtagctgcatcccttttaccccgttgacttccattactcaacagaagcacaagagctggaattgccccagaagccccaattgttattttgttctcatctactagtgaaagactgaacagtgtggcagctgaattctcccgagcctccatgcttcccctcttcaacacatgaactactccaggaacagctccagaggtgattattcttgccttgttctcttcatatatcgaaagattcaagagagcagtaactacatgctcttgagtgctaacatcagttatagatagcaggctaacaagaataggaatagcaccagcatctcctatacaagcacgattttcaggactgcgcttggcaagctgacgaagcatacctgcagcctcacgctggtcttctaggttttgtgacaataatttctgaagaagctcaacgacgttgctatgttcagcagcggtacatgatgctggtgcattatgatgttgagcagcacgttttggtggctccataccatttgcttcacaccattgagctataaggctgcgtaagacataatttggggttagagatttattgggaagcttctgctgtgtctttggacaggtgtcatgcccagcctccaaccatctctctatgcatcctcgctcataagtctgtccagtggcaacaataactggatctttcattaaatccagcgatatggggcaacggaaatcatccggaacaatcagagatgccatgttgtcttttcccgaaagttctgtcgtatttactggggttcccatttcaggatctcgactctgcacaaaatccttgattctttttagcagcattgacatcttctcaacaacggcaccaggatcaccgccactagccatctcgtgcaagatcaatgattcttgattgaggtctgatatagtggcaagctgcaacttgtcagataacctctggagaatatctgggtcaacattagcactggtgcttgagttgtagacggacaccaaatcattaaagagatcatcatcagatggatcagatcgttctttagctcttttgaactgagcatgtaccaattcaacctgttctcttacttcatctgatatgtcaagttcatcaaatgagattaaacctaaggcttgttcaagccttgcagtaatatcctggaaagacttcattattttctctctctcaagaacctctccatggttgaggccgatttcactctgacccaccagcgaaaaggaaaaatataatgagataatgtttttgacaagcttgttgctaaacagcatcaactgctctggcccggcattgatttgacacccaggtataacaaaacctggtccaaccagggagatcttgctaccgctgacgccgagccggaggagctccctggagtcagcgagcgcctccctgagccgccggagagcggaatacgacacatccggcagcggccgcggcccctccttggcctcctccagcatgggcgcgagcagccggatccgccgcgacaggttgcagaactgccgccggtatgcattcctgaagtccgagatggcggcgatctcttccaccaactccaccagcttctccaccaaatcccccgcctcctcctcctcctcctcctccttctcctcctccttatccttcccctccgccgactccgagctcgaaagcggcggcggagaagacgctgctgcctccgctgcagcaggcgccgcgtcggcgttagggttcggcttcgcttcctcgtccat

SEQ ID NO: 97579 - DNA, 232 bp, Oryza sativa
  Clone ID: PAT_MRT4530_95569C.1
acgcgcgtgtgttccctcagcggcaatcaaggtggcgcggcagccactccaggtggagaagaagataaaggcgcaaaatggagcacgcccccctttgtgatctaatcatcagtagcgggaccgcaaccagaacgatgaagtcgccaggctttattattgctgcgtcttgcttcaatgccaccgcactcatggtgcggggatcctagctaactgccatcctcatgtaggcctc

SEQ ID NO: 97580 - DNA, 253 bp, Oryza sativa
  Clone ID: PAT_MRT4530_9556C.1
atggctagtggggctttactactgttggcgtcttctggtattggtgagggtggggaggtgggagcggcggtggaggaggcgagcaagagaagggggaggggaataaaatggcaagctgcggcctccagcccagaattcatctacggcccatgtaccaatctcctcggcccgtttatccaccacccgcgtgatcacgtcaacgactcaacgagccacgccaaaaccagtctctccaaagaagtaaaccagacgg

SEQ ID NO: 97581 - DNA, 414 bp, Oryza sativa
  Clone ID: PAT_MRT4530_95570C.1
gaggcaagagagagcatcaacaaaatggcagcggccgcggcgcacgtccacatcaaggccgtgcagacggcggtgagcccgggaggacgcgtctcgtccccgagggtgtgctgcaacgtcgagtccgtgcgtgtgggaggacagggagtgggggaaggagtcgctgagcgaggcgctggccgaccacccggagatggcgggccggctctgacgccgcatagatgggtcgtgggaggtgaagctgaacgacaccggccggcgtgcggctcctacaggcgacacagtgggcgtgaccctcgatgagttcctcggtggcaagggcctggtgtgcagggaggttgcgctggcgtcgtggaccgacgtgaacgccgacgaccccgatatgtgccccccaatgttctttaggaatagctc

SEQ ID NO: 97582 - DNA, 1799 bp, Oryza sativa
  Clone ID: PAT_MRT4530_95571C.1
ggcaaccgctgtggccgccgaatcgacaccaaacccccctgccggctcgcaacacatcgaagtatcgaaccctccaatcctaccccgaccacgagcgaatcctcctcatcgaagtggaggagaaggagatcctcgccggagcatccggtggcttggttcgtgggggatcggcctgcggccggcgaaccctaggccgatgaggccgatccggctgccggagccccccggcgtcggcggcatggagacgcccgagatcttcaccggcgccgccgccgccaccgtcgtcgtccgccgcgccgtcgtcatcggcaacggctcccccggcgccgagaaccagtgcctcggcctcgtccgcgccctcggcctcgccgaccacctgaccctttaccgtgtgacgaggccgcagggagggatcaacgagtggctgcacttcctccccgtctcgctccacaagctaatcgaccaagtgctgaggcagttcttccgcaacacgaggcttgcgccggtggtcgaggggcggaagcactaccgcgtcccgaacggcggatcggttggggttgggctgtcctctgtcctggaagcggacgccaagaagatcgtggctgtggctcgcgatacattcgagaaggaagggccaactttaattgtcgcgtgtggctgggataccatatcatattcaagctcaataaggcatctagcttcaggcaatgtgttcgtcattcagatacagcacccgaggtctcgcctagataggtttgatctggtggtgactcctcgccatgattactatgctttaattgctggcggacaagaagaaattccacgcctgttccgtagatggataactccgcaagaaccacctgggaggaatgtggtgcttactgttggtgcactacaccaagctgattctgctgcactgcgccttgctgctatagcctggcatgatgaactcgcccctttgcctaagccattgctaatcgtcaacattggaggacccacaaggaattgtaagtatggtgtcgaccttgccaggcagctcatagcttctacgtataatgttctagacagctgtgggagtgtgagagtttcattttccaggagaacaccgcgaaaggtctctgatattatatcgaaagagttcgctggtcatcctaagatctatatttgggatggggaagaacctaacccgcacatggggcatcttgcatgggctgatgcttttgttgtaacagctgattctataagtatgttaagtgaggcttgtagcacagggaagcctgtttacgtcattgggactgagtattgtaaatggaagttttctgcttttcacaagactctacgggagcgaggagttgtccgtcctttcactggattggaagatatttcaaatagctggagctaccctcccctaaacgatgctattgaagtagctacacgtgtccgtgaagcaattgcagaacgagggtggtctgtgggatgatagcgacagttaggatgtgttgttctgtccgacagtaaattatgtagtttgattaacacagtcacttaaattcaagttacattgttcagaggaagaataatatagccatggaatggcctgtacaaaagttgagccttttcttttggtggtataccccaattttggagccattgcacagcacccaggagatcctttttggtttgagattctcttccctccttttgtacttctaacgctactggagagaagccaacatatgaagtattggaattgaaactttattctgtgtgaaaaaaaaaaaaaaaaaaaaaaaaaaaaa

SEQ ID NO: 97583 - DNA, 531 bp, Oryza sativa
  Clone ID: PAT_MRT4530_95572C.1
actggtgcgaaatagctaataattaagagacgatacaggcgctaacacacatggagatgaaaaatccattggcagtagggctgttggctctgctggtggcagccatggcggtgacggcggcggcgcacgacgacgacgacgtgccattcaccgacgaggacctggagtcggagcagagcatgtggaatctgtacgataggtggcgcgccgtgtacgcctcgtcgtcgtcgcacctcggcggcgacatcgagagcaggttcgaggcgttcaaggcgaacgccaggtatgtcagcgagttcaacaagaaggaaggtatgacctacgagctcgggctcaacaagttcgccgacatgacgctcgaggagttcgtcgcaaagtacgccggcgccaaggttgacgccgccgccgccttggcttccgttccggaggccgaggaggaggttgtcggcgatgtccctgccgcttgagactggagacagcacggagttgtcactcctgtcaaggatcaaggctcgtgcgggagcttgctgg

SEQ ID NO: 97584 - DNA, 375 bp, Oryza sativa
  Clone ID: PAT_MRT4530_95573C.1
caggtcacatgtcgtcgctaccgatctatcaaaatccggaaaaggggaaaagaagaggctttccctttttctccttcttgttatcattccactgtggaggattcgtgcgtggttgctgtcacattcacatactcacatggcaattctctccatgcaactactactgcaatctgcctccaaccgtgctcaggagtcatcgccagcatccatcctcttgaccttgtgaacctagatatggatatcactatgccgcgttgcaaagcttggaatgccatgcatattcaggtgactacaagcagcagccgttggatctatcgatcgacacgacgcgaagaatcagcagccagccagcttggcattagaccattagtagct

SEQ ID NO: 97585 - DNA, 545 bp, Oryza sativa
  Clone ID: PAT_MRT4530_95574C.1
ctacccgtcgccgccttcgccttcgcctctcgtcgtcggaaaagccctagcgccgtgtgccctagctttgccgtcgccgccgccgctccagccgtgcttcgccgtcgctccagccgtcgccgtcgctcgggaagaccgccgtcgtggtcgccgtcgcgtcgccgtcctcgtccgccccttcgctgtcgccggagatcgccggagcatcgtcgccgtcgtcaagccgaagagcgccgtcgtttcaatctcgtcgccgtcgccgtccgttcctcttccgccgtcgctttggtcgccgcgagaggacggatccttaccaccacgcgacgaggcgtgggaacgacaacgacgaacgggcgcggcggacggcgagggaacgacttcggcggcgatccttgaacgaaggcgagacacggccgcggctgcacggggacgaggacggcggggaacacgccgcagcgatgatgatgacggaggcggcgccgcgagacgacgagccgggcgaccgacgggacgtcgacgacgagaacgatcggagacgacaatga

SEQ ID NO: 97586 - DNA, 462 bp, Oryza sativa
  Clone ID: PAT_MRT4530_95575C.1
atggcaacgcgcgtcgaggacgaggaggaggcggcggcggaggagagagcgcccgccgcggcgttgctccgccggatcatggcgcccatcgcatggagggcggcgcccacggcggcgtcggcgtcgtcgtcgtcgtacctggtcgccgccgaggccggcggggtggagaagatatccatgctgtccggatacgagcgacttccgagcgtgtatggcacggcgttccacgacgacgacggcggcggcgcgtggtcgtcgtcgtcgtcgccgccggcgtgccctccccgcgcggccaggctgctctggggggcgctcacccgcgccgtccagaggcctgggaggtgcaggtgccccggagacgaggaggcgggggtgacgacgaccaaggagcggaggcggtcgtcgtcgtcgtcgtggcggccggaccccgacaggcggtggccggtgcagggctggagctag

SEQ ID NO: 97587 - DNA, 237 bp, Oryza sativa
  Clone ID: PAT_MRT4530_95576C.1
acggcacgaggggaaaaggctactatggaagaccgtcgcccggcatcaaacataggacccgtaacgtacgtgacagcgctatatggctagaaaccacaatactattgggagccaaccctacgaagcggaggtactagctagctaaagaagttggccctgaaggtaatagaagaactaggacgataaatacggggcaaataaatcccagcaaaatttgtattgctgcccaccagtact

SEQ ID NO: 97588 - DNA, 2185 bp, Oryza sativa
  Clone ID: PAT_MRT4530_95577C.1
tttttttttttttttttttttttttttttttttttttttttttgcctgacaaatgattgggtttcttgcaggcacattacttatttcattcatattatcacgtttagtacatggatatgtaaatttatgatacagatacaccattggggtccaaatgttcagagatacatcatccagggaattcaggcaatggaaaagaatcaatcggtgtgtggagctaaatgcagaggcctgatcatgccacattagcaagcacaccaggccctgccctaagatcatatctgagtaatgatgaacatgtccatgcaagtcactagctttgcatcctctatctataccttcctcttattctgtatatattcccattgggtgtcccttttttcccctctttttgccacctacatttggtggtggtctaagaatgaatcttagtaatctcccctgaatgtaagatgatggcaggtaccatcacaagggtatgcacagtctgtgtacttcgcgtctgccctatcgaaaaaccagtcgcctactgcttcagcaattctcttgttaccgagacgaggagaatcccctgcgtaccatgtgtcctgtctctcactttggcaatgtgcgaaacaggagttgataaaaagaccgttctgccttgcgccggagaaacccctcaccgcatcgagcatttgattcctgaaaccttgtaaaaattgcagttggttgctattacaggaggcatgattcatcctacatcctcgccatagaccttgcggatcagcccttttgggggccacactttgttgaagctgccacacatcataagcagtgttcaaaataaaagttggagtttgaatgtttggcaccacattctgggggaaaaagcacgatgcaatctcacaataccattgaagaagtccctcatttctcgttgcccagaaacatcaacaaagtccagaaacattccagcatcagcaaggcacttcacgtttgtactgccgctaaacaatccacggaactcgtcacagtgaagtatggttgaaacaccaccagcagagcatccagaaagaagtgcctggttagcatatctcattccttgggccatcagatcatccatagcagcctgccaaatacgctgacctcggaaataaaggcctgcagacgcatcagccccatcaccagtgaaggatccgccatcacaatatcgaaccttcactctgttccagttgtagaaatcaggattttcttcaggcctgttactcattatcccagtaaactggagttggctctccatgtgatttgatgaaccacgccgactgctcttgcgaaacacgcagcttttaacatcgttgcaccagcctccaccctccaaattgacaagccaactgtttgcccctgatccaaaccctcggtgtaggtgataccctggtaagctcccatccaagcatacggctcccttggcggccgccgactggatgagcgtaatcccgacgaagacgccattgctaccagagttggcattggtggagtagacctgcgtctgattcagccacggctcagagccatggactgccaccaccaagaagccaagaaccagagcagcaagagcccaagaacaacccatggttgatggttctcttctttctttgctggttcttgggccttcctcccactcccagcctctgccttcttcctgaggaatggatctggaagaaggggaagaggaggagggaagaatggaggagcagaagcggccaagcaagaaaggaagttatacgcggagccaagtgcagctggatgctggcaatggctgacaaaacaaaagcggctgcttctgggagattctgtggagcggtgtgcactgctactagtgcagctgcactagtgcttccagtgaaaaaacgtgtagtgcaattacagttgtgaagcaaggcatctccctatcttgtgaggctgtagaaatggagaagaagaagaagaagaaaagaagcaatggaaggagtcgcccggaacgtggtggtggtgatgacggaactacggaatccaggggagggcggcgaaagggtggggaaaactgtgaagtgcaattactgcttttttggtgggcgtactcgtctccattggagcaagtgacagctgggagctgagctgagcagcggccgtaggcaggctggtcacttcctcgcttgcgcttctc

SEQ ID NO: 97589 - DNA, 543 bp, Oryza sativa
  unsure (1)..(543): unsure at all n locations
  Clone ID: PAT_MRT4530_95578C.1
atgtgtcctgtctctcactttggcaatgtgcgaaacagnagttgataaaagnccgtttctgccttgcgcggaagaaacccctcaccgcatcgagcatttgattcctgaaaccttgtaaaaattgcagttggttgctattacaggaggcatgattcatcctacatcctcgccatagaccttgcggatcagcccttttgggggccacactttgttgaagctgccacacatcataagcagtgttcaaaataaaagttggagtttgaatgtttggcaccacattctgggggaaaaagcacgaagttttatccatgcgggaggtacaagacctaggcaggcttcttccggaaccctgcaatctcacaataccattgaagaagtccctcatttctcgttgcccagaaacatcaacaaagtccagaaacattccagcatcagcaaggcacttcacgtttgtactgccgctaaacaatccacggaactcgtctcagtgaagtatggttgaaacaccaccagcagagcatccaaaaagaagtgcctggttag

SEQ ID NO: 97590 - DNA, 105 bp, Oryza sativa
  Clone ID: PAT_MRT4530_95579C.1
atgggcacggccactactcgggccaactttccgtactactgctggttggctgccggatgtggtgccgagtgcaaccaccacgtgaaaattctggagagacactaa

SEQ ID NO: 97591 - DNA, 2219 bp, Oryza sativa
  Clone ID: PAT_MRT4530_9557C.1
gcacgagcaccaggtgtagctcacaacttccatctctgaagaaaaagaagagaaaggataccattacagggaagaagatgggattgctaagtgtcagctcatctcatcatgccatccatccaggtagtagcaggagcatgcagtgcatctgcaccagggtgacaccatccagatcagtgggagaaatatcaagatcaagatcaagaaatgatcttcctctgggtgtttcaccgtcgtcgaggatgctcacgacatgtactctcaagactccttcctatggcaacaagtcgaagtcgaaggagaagatcaatccgagagacatgttcaccttctcctacagattcaacactgacatccccatgaccgagactccaggggcatccatcgatgagtaccttcagaacaggcccaggattgttggagccgtgttccctgataagcgcaagagaaccaagctcagtgatgaagaatggagcgtgcagcttctgccgatccagttcctgttcctgtcggcgtcgccggtgatcgtgatgcggatcgtaagcaaatccggcggcaaggagtacccgccgcacgtgccgtcaaggcaaccagcctcctgctcatggaagtgacggactacaagctggacgggctggacagcaacgcgatgccgtcgcacctcgccctgaccgtccgcgggtcgctgtacccgcggccggaggggaggaagagcctgaggggccacgtcgagatgagcgtcggcttcaacctgccgccggtgctcgcgctggtgccggagggcgtcatcagaggcgtcagcgagacggtgctgaggcagctagcactgcagatgaagcaggatttcgacaatggcctggcagccgatttcaagaggtacaggagggagaagctaactgaaaagaagactacaccctgaaagttttttcaagcatttcatttcaaaaatagaagatcttttccaagcattcactgccagtagtaatagagatggcagtcactacaccaaattgtttggagctcatctgatcatcagcaattcagcatgatggcaacataactgtattgttcatcaagcctcaagaaaagatggagagaataacttaacagatctcatttattcattgtaaactgaagcatttagaatgtacataatggcaagaataatcaatttactgagattgttaatatctcgagctattggacatgttttctgtcagatttgacttcctttcctcttaggctattgtggatgtatgtaccacgtgctattgtggatctacataccacgtagtatacagggcctagggcctttgcttcaacagctagacgaatatacaattagaagttctatactatgtatcagaaagactctagtcttccaatgatctctttcttgcccttaagtcgcgctcaaggctttgaggcaatggaggggtcctaccacgacggaaaaggacggcaagagctttcattttatggcagatgttgaaaaccgatgatgcctctatctctgcaatcccctcacaaccttggccgccaccctgtagaatgtcacagtattttgcagcatcgtcctcgtcttcaaataccagtattccctctctgatatcttcaacaagcatgttaaacttggaaccagagtattttgatttagtcccaactcctgaaccccctccctttaagagcattccaagttccctttcaacttcactgcgactcctacgggttttcattgtccatagatggttatctcttctagccagtacatagactggtttggagtcttctctccatgggtttgtctccaacacatcgtaggcgagggagtcgagcgattccatgaggtggcgccgcatgccgtacgcgcgggaggagacgcggcgcaggaactcgccggaggtgccagggatgccgccgtccatccccatcgccctctccacctcctcctcctcctcaccaccaccatcacccccctcccgcgatggcgggggcgggggccgggacgaggccgcggcgaccaccgccctgcggtgcgagacggcgaggcggggcagcggcgggggcagggagaggagggacgaggtcaggttccccgccagcgcggtcgtcgccgccggcaccggcgcctgatgcggcggcggtgagagggatggcaagcaagctgccatttctacgttcttccctggaagcgtggagcagtggagatgagaaaatcg

SEQ ID NO: 97592 - DNA, 3318 bp, Oryza sativa
  unsure (1)..(3318): unsure at all n locations
  Clone ID: PAT_MRT4530_95580C.1
accattcatgcatgcatgtgtaaaacacattgtaccgttcatgcgaatatgtatgtactgagttgagttctgactcgatcgaacaaatgctcatcagcgtggtggtacatggccgcttccgtgcagccgcggcagttcggccacctcgagccgggctccgcgccggtgcgcggcgccgcctcctcgaacggcgccaaggcgtaccctcccgcgaacggcatcccgcgccgcgccgactcgccggtgcgcgggtgcggcttccctcccctcgtctcgccaccgccgcggaagccgcccagcgacgggtcggacgacgaggaggaggagcaggaggactggcgggagctgtacggctcgcacctgcagctggaggtggagccgccggtgcgcgacgcgcgcgacgagggcaccgccgacgcgtggatcgagcgcaacccgtcgctgatccggctcaccgggaagcacccgctgaactgcgagccgccgctggcgaggctcatgcaccacggcttcatcaccccggcggcgctgcacttcgtgcgcaaccacggcgccgtgccgcggggtgactggtcgacgtggaccgtcgaggtgacggggctcgtcaagcggcccatgcggctcaccgtggacgagctggtcaacggcttccccgccgtcgaggtccccgtcacgctggcctgcgcgggcaaccgccgcaaggagcagaacatggtgcagcagacggtggggttcaactggggcgccgccgccgtgtccacgtcggtgtggcgcggcgcccgcctccgcgacgtgctccggcggtgcggcatcatgcccagcaagggcggcgcgctcaacgtgtgcttcgagggcgccgaggacctccccggcggcggcggctccaagtacggcaccagcatcacacgccagtgggcgctggacccgtcgcgggacatcatgctcgcctacatgcagaatggcgagccgctgctccccgaccacggcttccccgtccgcgccatcatccccggctgcatcggcggccgcatggtcaagtgggtcaagcgcatcatcgtcaccaccgccgagtccgacaactactaccattacaaggacaaccgcgtcctcccgtcccatgtcgacgccgagctcgccaacgccgatgcgtggtggtacaagccagagtacatcatcaacgagctgaacgtgaactcggtgatcacgacgcccgggcacgacgagatcctgcccatcaacggcatcaccacgcagcgcggctacaccatgaagggatacgcctactccggcggcggcaagaggatcacgcgggtggaggtgacgctggacggcggcgagacatggctggtgtgcgtgctggacctcccggagaagcccaccaagtacggcaagcactggtgctggtgcttctggtccgtcgaggtcgaggtgctcgacctcctcggcgccaaggagatcgccgtgcgcgcctgggaccagtcgcacaacacccagcccgagaagctcatctggaatctcatggggatgatgaacaactgctggttcaaggtgaaggtgaacgtgtgccggccgcacaagggtgagatcgcatggctggtagatcgacgacatggcccgggaatatgcgcagtccggcgggtcaggagcgaggagcacctggagacggcggaggcggccgcaccggggctgaagcggagcacgtcgacgccgttcatgaacaccaccgacggcaagcagtttaccatgtccgaggtgcgcaagcactcgtcgcaggactcggcgtggatcgtcgtccacggtcacgtctacgactgcacggccttcctcaaggaccaccccggcggcgccgacagcatcctcatcaacgccggcaccgactgcaccgaggagttcgacgccatccactccgacaaggccaaggcgctcctcgacacctaccgcatcggcgagctcatcaccaccggcgccgggtacagctccgacaactccgtccacggcgcgtccaacctctcccagctcgcccccatccgcgaggccatcaaggcgccggcgcccgtcgcgctctccagcccgcgcgacaaggtcccctgccaactcgtcgacaagaaggagctctcccgcgacgtccgcctcttccgcttcgcgctgccgtcctccgaccaggtgctcggcctccccgtcggcaagcacatcttcgtgtgcgccagcatcgaagggaagctgtgcatgcgggcgtacacgccgacgagcatggtcgacgaggtcggccacttcgacctcctcatcaaggtgtacttcaagaacgagcaccccaagttccccgatggcgggctcatgacgcagtacctggactcgctccccgtgggcgcctacatcgacgtcaaggggccactcggccacgtcgagtacaccggccgcggcgagttcgtcatcaacggcaagccgcggaacgcgcggcggctggcgatgatcgccggcgggagcgggatcacgcccatgtaccaggtcatccagtcggtgctgcgcgaccagccggaggacacgacggagatgcacctggtgtacgcgaaccggacggaggacgacatcctcctccgcgacgagctcgaccggtgggcggcggagtacccggacaggctcaaggtgtggtacgtcatcgaccaggtgaagcggccggaggaagggtggaagtacggcgtcgggttcgtcacggaggaggtgctgcgggagcacgtgccggagggcggcgacgacacgctcgcgctcgcctgcgggccgccgccgatgatcaagttcgccgtctcgccgaacctggagaagatgaagtacgacatggccaattctttcatcgtgttctaaactcctactactaaattatacgcaccgcattaattattttggtatacgtacgacgatgtatatacgtgtcgtgccaattagaaacgaaatgctgcatgcatgcgtatgcaagatgagagaaaaaaaaacaatatctaagttgtagtagtgtactcttgataatatcctagagtacatactgcatacataggccatgatttccctttctaagaggctagcggtgattccttcctgtatactagtggttgtaattaccataactgtattgttgttagccatgggaggtaaagatctggctatgtatattgttcattgtttgaagaaagagaaatgaaatgaatactttnaattgaaaaaaaaaaaaaaactactccggtgagcacgcactcctncataacttctctctgaatcgctcgccttaatttactctcggtcgcagtggcttgacattttgcacca

SEQ ID NO: 97593 - DNA, 241 bp, Oryza sativa
  Clone ID: PAT_MRT4530_95581C.1
gcgctcaaggtaatctggcaaatatcattttaaattaataattgtaatcagcaaattggtgtaatacacttattgtaatctatgcttaaataaaatcgaacattagaaatcggttcttttaaaacctataaataggatggtctccactctttccaggaatttcactgaacggttttgatgactttgttggtgtggccatttgggtaaatggctacaagattttaatcctcaattttgaata

SEQ ID NO: 97594 - DNA, 639 bp, Oryza sativa
  Clone ID: PAT_MRT4530_95582C.1
atgtggatgcggatagtatgatgcggatgcggatatggtatctctaaaatccggcagatgtggattatccgacattttggtcggattatccgatagagccgttcgatctcacccgtggacataatctgatcgttcgtctcctatctagatggttccgtccttacccagacgtggaatccacgatctctcgtctctccaccgccatcgttttacccgtcctccaacagtgcttccctaaagtgtacggtggtggctgcgctcgatggaggggctcaacggcggtttcaacatagccttgaggtcggggacctggcggcggcgtcggagcctctagcacaggggtttggcagcggcggctgctgctggagccattcagaacacgatagccatgacagccaggcaaaggcaacggaaaaaggcccaagatccccgctcaatcttcaaggaataggtttacttcatgataattcatgtctcatgttaatattgggagaggcaacccactatgctcagctcatggatcttcaggaatggagctgccagcatcttattgacaaacaaatacaaggtagatcgatatttgtcaacgccttagctatactagaatacgaggggcatctaagagaaaaatacaaatat

SEQ ID NO: 97595 - DNA, 767 bp, Oryza sativa
  Clone ID: PAT_MRT4530_95583C.1
caaggcgaggctaatactaagccattcagaacacgatagccatgacagccaggcaaaggcaacagaaaaagtcaatcttgataggcccaagatccccgctcaatcttcaaggaataggtttacttcatgataattcatgtctcatgttaatattgggagaggcaacccactatgctcagctcatggatcttcaggaatggagctgccagcatcttattgacaaacaaatacaaggaaaaatactccatgcacatcaacggttaatgcttttctatgagctggtcttaatatctcaaggctgcactgtgttaggctgaagcaccccagtccaattcttttgcctaccaaataaacttaccaacaccaagtcagttgagtgctgcaatgtgcaaattaaacaatatggtctctgtagcctgctcagcaggaaaaccatttgaaatacctgtggaaatatccctaaacatgcgttaaccatgatgatcttttttttttaaatactgtacggtaggtagatcgatatttgtcaacgccttagctatactagaatacgaggggcatctaagagaaaaatacaaatattgaaggctctcatggtagtttggtagctaattaatcacataggtgatgtatatttgtttctagcatttatatcagtccattgattcacagtggatactcagttattgcatttagatgtctcttttcaggaacctttatatttaagttcctttacatggctattttaagagtccgctgatttgatt

SEQ ID NO: 97596 - DNA, 276 bp, Oryza sativa
  Clone ID: PAT_MRT4530_95584C.1
atgcggttacaacaggcgagtggctcggcagcgggcgacgggacgacgaggaggtggctccgcctcgccgcctccgccgacgatgagcgccccttccgccctccgcccatagtatccggctttggtgcccctccccacgcggatccgggggtggcgactgcaaggatgacgacaagctacagcgacggcaacgacggcgacgagctgtggcggtggcaactagggcacctgggggtgcagacgggcaagacctctgcacggaaaaacactttttga

SEQ ID NO: 97597 - DNA, 972 bp, Oryza sativa
  Clone ID: PAT_MRT4530_95585C.1
agcggtaatatatattcacatatattttcacccaaaaaatatatccacagtaatctcagcacactatattttttggtcatttatcccacacacattcatgtaaggcataaaccctacacgtgctctacattgaagttctcaaattttcatccatggtagtgtagcaacatggacaaaggaaacaaacaaagccccttatcctttagctctccacatggagttacactcttctgactttgatcaacaaacctcaccccctctaccattgcatctgcatagtccatcccctctcttccacgatcatctccaatcccaacttccttggttaggtccctggtattgcacctccttttagggctcaattccagctgtgtcaaagcactgaccttagggctatttactggagagcttgcggtatcctccagggaatcatcatgatccagggccttgaagaccttcttcttgagcttcttcaactccttgtacctatcaggcaacgccgcagccgcgggagcgcaagacgcggcgtcggagatcatagaatcttcctctccttcctcctcctccagctccttctgatcactgcaatcgccatagacgccatctccgccatgggagcagtatgaagaagcaccatgatcttcttgactcttcttctcctcctcggacatcatgaaatccacaaagtagtcggtccaggtgctctcctccggctgagcttgagcagcagcagcagcttgctgatcttcactagtactactgcagctaattatggcactcctcatcacagatgagccactaactaaatcctccatgcttttgatgttacaagcaaaggtggtgatagctaaagctgatcaacttaatcgtacaagcttctatgcttgtgttgtacccaatgatcgaatggatgaattaatggatggctttgcaaagatgcatacagcctggctctctatatatataaaccgc

SEQ ID NO: 97598 - DNA, 438 bp, Oryza sativa
  Clone ID: PAT_MRT4530_95586C.1
aaaaaaaaaagccattttgggcaaacaacaaacattttttttttgggaagcacaatacatgaaaaatttcccacaatggtgtaaaaaaaaaatggggggggggaaattaacatttttgaaaagggggcgaagtaatcaggggcgaccaaggcctcccccccgaatttttttgaaaaggggacttcaaaaggggagacaggttcatggggcatcccctggcttttatttgaggccttggggggggaaaaaacagcggggcctatcaagaaaaaacttcagggaagggtcctttggggaaggggaagggctcccaattcttcacgctttaatttttccttttttaccaaaaccattatgtcactcaaaaagcctctgaatggggtctgggggccccgggcgttttcggggggggcctggtgcttcatgggaagggccatg

SEQ ID NO: 97599 - DNA, 364 bp, Oryza sativa
  Clone ID: PAT_MRT4530_95587C.1
tcgtttaaagctacacgagctgtgacgcgagcgacctatttgtgccttgtacggtggactatgtcataaaagctattgagatcttatcaatgaaaggtgaggactgttatcatgagtcgtacgtggagagagaccacatcttgtttgtgaaagtgcagaaagactaccttccgctcgccggctacatgggcttgcacgtgagagactgaaggcagttaggacttgcttgctgagatccagaggacattaggtcactgtacactacggcatcggtttgatttatcacccctactttaaatacattttttgtgaatttgattctacacttgcgcatagtagctcttctagttttagaaaccatcgc

SEQ ID NO: 97600 - DNA, 270 bp, Oryza sativa
  Clone ID: PAT_MRT4530_95588C.1
cgtaaccctcccggcttggaacccgtttccaaggtttgccggccctttaaaccaagaaaagataacttctttccccgaggccccccgcccggcgttctccggaactttcctaacgtccccggtccaacacgcccacgttacccggctcgggaaattcttacaccccggatccctttcgggcaaccgccgcggtgtcgccgcttcttctcccgggttaaccccgtccctagatcgcttaacccaggccaagcccgttcacagggaccttct

SEQ ID NO: 97601 - DNA, 476 bp, Oryza sativa
  unsure (1)..(476): unsure at all n locations
  Clone ID: PAT_MRT4530_95589C.1
cacttgtgtatctcatctcatctcatcttatcgatgttgatctcaacttgtgcattcagatttcacttgtgcatctcatctcatctcatcttatcgatgttgatctcaaattgtgtatgcagatttcacttggtagatgctgcaggaaggatcaacagcttatgaaaagccattcacagaagatatgatcatgatagacgggggtggcggcgcggcgcggtggccggggaagcatggtcgccggcttgatcgccggcgctcgcttagcttggacttgaacttggaggaggaagtaaccgagccgtcatattattatttattattattcagaggggtctttgtgcaaaaagggaaagaaaaacaaaagatgctggctgcgatanggaccccgagttaaggggtttttgtgaaaaaacatatactaaggagggggatagatnaatcgcagccgttgggtttggcatcaaggtccggtc

SEQ ID NO: 97602 - DNA, 371 bp, Oryza sativa
  Clone ID: PAT_MRT4530_9558C.1
ggaagaacgtagaaatggcagcttgcttgccatccctctcaccgccgccgcatcaggcgccggtgccggcggcgacgaccgcgctggcggggaacctgacctcgtccctcctctccctgcccccgccgctgccccgcctcgccgtctcgcaccgcagggcggaggtcgccgcggcctagtaccggcccccgcccccgccatcgcgggaggggggtgatggtggtggtgaggaggaggactcacatggtcctatcaccaaccacccggacaaggtcggcgaccgcgacaagctcaaggagctcgcacatccttatgagggatagcgtgacccggagacacgcgagaccatgaccactatggcgaacatgccc

SEQ ID NO: 97603 - DNA, 2117 bp, Oryza sativa
  Clone ID: PAT_MRT4530_95590C.1
atggctccggcggcggtggctgcggcggaggcggggtcgaaggcggcggcggtggcggggaaggccgtggcggcgtgcgagcgcgacgcggagaagctggagttcatcgaggagatgacgagggggttcgacgcggtgcaggagcgggtgctggcggcgatcctggcgcggaacaacggcgccgagtacctccgccgccacggcatggaagggcgcaccgaccgggaggcgttcaaggcgcgcgtccccgtcgtcacctacgaggacctccgcccggagatcgagcgcatcgccaacggcgaccgctccaacatcatctcctcccaccccatcaccgagttcctcaccagctcggggacttcggcgggggagaggaagctaatgccgacgatagaagatgagctggacaggaggcagatgctctacagcctcctcatgcccgtcatgaacttgtacgtgccagggctggacaagggcaaggggctctacttcctgttcatcaagtcggagacgaagacgcccggcgggctgccggcgaggccggtgctgaccagctactacaagagcgatcacttcaagcaccgccccttcgacccctacaacgtgtacacgagcccgacggcggccatcctgtgcaccgacgcgttccagtccatgtacgcgcagatgctgtgcggcctcgtggcgcgcgccgaggtgctccgcgtcggcgccgtcttcgcctcgggcctcctccgcgccatccgcttcctccagctccactggagggagctcgcccacgacatcaggaccgggacgctgagcgccaaggtgacggagccgtccatccgcgacgccgtggcggaggtgctcgcggcgcccgacgccgagctcgccgcgttcgtggaggccgagtgcgggaaggacaagtgggaggggatcatcaccaggatgtggcccaacaccaagtacctcgacgtgatcgtcacgggcgccatggcgcagtacatccccacgctcaagttctacagcggtgggctccccatggcgtgcaccatgtacgcgtcgtccgagtgctacttcggcctcaacctgcgccccatgtgcgacccgtcggaggtgtcgtacaccatcatgcccaacatgggctacttcgagcttatgccgcacgacccggacgcgccgccgctgccccgcgacgcgccgccgccgcggctcgtcgacctggccgacgccgaggtcgggagggagtacgagctggtgatcaccacctacgcggggctctgccgctaccgcgtgggcgacatcctgcaggtgaccgggttccacaacgcggcgccgcagttccggttcgtccgccgcaagaacgtgctcctcagcatcgactccgacaagacggacgaggcggagctgcaggccgcggtggagcgcgcgtccgcgctgctgtccccctacggcgccagcatcgtggagtacacgagccaggcggacgcgaccaccatcccggggcactacgtggtgtactgggagctgatggtgcgggagggcggcgcgtggccgccgccggcggaggaggagggccgcggcgtgttcgaacggtgctgcctcgagatggaggaggcgctcaacgccgtgtacaggcagggacgcaacggcgaggccatcgggccgctcgagatccgggtggtgcgcgccggcacgttcgaggaggtgatggactacgccatctcccgcggcgcctccatcaaccagtacaaggcgccgcgctgcgtctccttcggccccatcatcgagctgctcaactcgcgcgtcatctccaagcacttcagcccggcttgccccaaatacagcccgcacaagaagtgatcactcactacactacacggtccagttgagctagacgacacaacgatatatagccttctactacaactactactaccagcactcagtcccagtgcttatacagtcggtgtcagtgtcagtgcgtgtgtaatttctcgtgtttaaggcagagggcatcagggccatactcctggatgcctgcttctttgatcttagatcatgctgtccagtggtagttaccatgtaatcatgtgtgagatgttatttctgaagtggaaatggcgagtgtttgt

SEQ ID NO: 97604 - DNA, 1979 bp, Oryza sativa
  unsure (1)..(1979): unsure at all n locations
  Clone ID: PAT_MRT4530_95591C.1
atggacggatccgccgccatcccgccccgccccgcgccgaccccgcccgcgcccgcgcccgcgccgccgcaggtcttcctccgccgctccgtgctcccgccgccgccggccccgcaccacgcgcctccgccccccggagctcacgtccactacttccgcgccgcctctcccatccccatcttccgcgccgcggcctcctctaggcccccgaggccgcccccgccgtcaactactactgctcctcctcctcccgccgcccccgcggtcacgcctgctcgcccgcctccgcagcagcctgcggtcgccgtggcggcgccgcctccggctacgactatggctacagctaccgaagaggtggctgcgcccgcgacggggaatccgatggccaacgcggcggacaatgaggagaaaaatgaaagagaaactgtacagtctgaagtcgccaaaggagagactgtgcaagggcctgataaagaatgtacaactggggcagtaaaaggcatcaaacggcctagaaaaccaaaaggttttaaaaaaggagatgctgggccttctttattttcaccaaacaactgtcgctatgacagctcgctaggtcttcttacaaagaagttcatcaaccttcttgaaggagcagaagatggaacccttgatttaaataaagcggctgagacattggaggtgcaaaagaggaggatatatgatataacaaatgttttagaaggtgtagatttaatcgaaaagacactgaagaatatgattcgttggaagggttttgatatgtcaaagcctaaggagagagaacgacaaatctcagcattgaagctgttggaattgaactcgatcaccatgactgttacggtaccattttatgtaccatccaaggaaactatggaagaaattgagtctctttatgatgaagagtccaggttggatgatgaaataatggaagcacaagagaaactgaatgcccttagagtcgatgaggacagaagaaagttgttgtatgtttcgaaggaagatatcaatgcgattcctcgctttcagggatccactcttattgcagtaaacgctcctcgaggaacctatattgaagttccagaccctaatttggatatggacatttataaggatctggataatcaagagaagcactaccagattgtatttagaagtgcaatgggtcctgttgattgctttctaataagtaaccatcaggagacattcaacgcagaccagcagatggcagacaatttggatgctgcggtcactagtggaagttctcaagctccgcagcagatggattatgttcaggcatcggaaattggggagagcaatggtgtaagagagcatacatcagagccatccaaaagagacgatccagtgcctggcattgtgaaaattgtaccatcagatgatattgctgctgattactggctcagttctgacgctgacgttagtatgactgatacatggggcacttaattgatggctctgcagactattagtctcttagagaaatagcaatgacaaatacaatacaacaattgcattggatggaggagttggatctgctgtccaccttcaactgaagtcctgctttggtaactgcagagattttccctggtgcatgctctgttctcgttaaccggcaaatcacagagaatacaattgtaggcagtagatcttgtaaattggcagacccattttagtagttggtgctcagccacaagcatactttaagataggctgcagtaggtttctgctcttgattatattagccttcgaatagagggactgcgtgtgtgcataccaaagttagaaggcaacacagtccagaagaaggcgatgcttatcttgctcttctccccttgaaagggggattattgttgtacattctggctagcanatctggatattgctcaatttactgattagccatatcaataaagatntattttggttccccccaaataata

SEQ ID NO: 97605 - DNA, 282 bp, Oryza sativa
  Clone ID: PAT_MRT4530_95592C.1
atggccgtgaccggccacagttcagtcgcaggtgtaaacgccgatttcgcggccttagccacgaagggagtcgccgaacaaaggatagtccccaccctgtccggctcggtgatgacggcagttagatcggcggatggggaattgcggcagcgtttggacactcgtagatctaattgggtcaatctagcatatgttaatttatccattgaattgtttgcaatatgtcaatttctgaaggaaataatgggaatacttcagaagcgattggaccccggggcttga

SEQ ID NO: 97606 - DNA, 186 bp, Oryza sativa
  Clone ID: PAT_MRT4530_95593C.1
atgaggatgcagggaagtggaggcgccggcgctagggttcgaagaggaggatgctggtgggacccacatgtcagcaactttctcctcttctccctctcctctatctccttccggtggctccgtccgttgcaccgctgctactgcgtcgcgcatgtgtgtgcaccgacggaaggaggtgcttgttaa

SEQ ID NO: 97607 - DNA, 321 bp, Oryza sativa
  Clone ID: PAT_MRT4530_95594C.1
atgacggagcgcggggctcctcaccgggagaccgcacaggcccccctttgccggttcggccgggggcttagggttcgggccgctgccaagcaatcaaccctctactctgtgggcaaggtcctccttttatacttcaaggggataccacacgcacccttccctttccaaactggactttccttctctttacgaacggagattgatatggttgccgtcgaatcacacttcgatgggacagcccacacctacctccactcccggcggagacgggcgcaacgtgggatcgtggtgctcgttgctgacgcgaccagtgtcagaccg

SEQ ID NO: 97608 - DNA, 453 bp, Oryza sativa
  Clone ID: PAT_MRT4530_95595C.1
atgttctcctttggcaccttcgacttcgtcttcgacgcctccggccaaattcagcaagtcagccccggcgtggtcgtttctatccaagacattcgattccctgcaggagccaggtttcgttttggagaactgaacttcactaccaacaaggccggcgtactccgacccatgactccccgtgcttcatccccagccgcgacgtccctagtgccttttggccttgccaatttcactgccgtcgccgccaagattggccacgtcgacaacttctccgctcgcggcagggaagccattctcaaggccaagctaggcgaacacgacgtcttcatgacccctcagcacaacatcgtggcgaccaaggcgctacttgacaacattaagttccctgaagactcggcaattaactccacgatcgggcaaatcaaggcaatggtcgaagccgctaccgtctag

SEQ ID NO: 97609 - DNA, 920 bp, Oryza sativa
  unsure (1)..(920): unsure at all n locations
  Clone ID: PAT_MRT4530_95596C.1
gcagtcgccgccgccgccgccgcgatgatgcagtcgcaccacccctcgccggcgcggctggggctgacggcctcgtcgccgtcgctcccgcccaacccggctgcggggaatcccacctcctcgccgccgcagggcaaccctagcgcggcggcggccgtgggcgctgccgctgccgctgcaccaaccctaactacatcgccgtcgctgctgccgctcctgccgccgctcccgcgggcgcaggcgctcctccagctgatctccgcgctcgcctccaacctcttcgagctctcgccgagccgcgccgcgtggatctcggcgtaccgggggtcactccccactttcctcccctcgccgtcctccgcgccgccgccgccgctcccggccccgatctcctccaccaaggaggcgctgtcgctgctcaacacgctccagacccagctcttcgaggccgtcgccgagctgcaggagaccctcgacctgcaggacgcgcgcgcccgccttgcccgtgagacgcgcgccaaggacgcctcgatcctcgccttcgccaagaagctccgcgaggcgcaccacgtgctcgaccgcctcgtcgacgactacgccgactaccgccgcgaccccaagcgcccgcgcggcgccgcggcggcggaacgaccccgagccggtgtcagacggcgactttggcgcgtcgctgcactccaagctcaacctggacgacgtcctgacgtacgcccaccgcataagctacacgaccttcgcgccgcctgagcatggtgctgggctgcctctgcgtggggcgttgccgccttgctcctcaggaaaatgagatgaggatgtcgcagctgtatcaatttgcggatttggatgttggagtgccgaaatcccaggaagcaaaggagaggactgcagcaganggagatgca

SEQ ID NO: 97610 - DNA, 155 bp, Oryza sativa
  Clone ID: PAT_MRT4530_95597C.1
tttcgtcgaagcaaagcgcaccacgcacacgggaagagttgagaggtcacatcgcggcggccgcagccaggatgccggctcctctctcaccaccagcctgtccttgatcctcctcgaccctatcgcagaggcacccgccgcggaagcctcaacag

SEQ ID NO: 97611 - DNA, 717 bp, Oryza sativa
  Clone ID: PAT_MRT4530_95598C.1
atggacccatcaaaaggtgaggccatccatgatgagcacttcggcctgtcactggtggctggtgggctgtgcaaggaggtgcttaaggaggagacagccgttggactgtggttgaagctggaacagatatgcatgactaaggatctgaccaataagatgcacctaaagcaaaagttatttttgcacaagttgcaagatgatgagtctgtgatggaccatctctccactttcaaggaaattgttgctgaccttgagtctatggagggtatatggctatttctgaagcttgtaaagaagctatttggcttagaggctcagcttggccaccgcctctactccagccgtgtcgtcctctccaaatctcggtcgccagcactgttccaaggggacccgccaccgaccacgctgatctgctccgcccaagccgccgggactctggtccacggtcatcgtggaatgctcggctctctgccgctggccccatcaccctatgaccccgtctttgtcattgacatagtggccgcctcccgttcctctagattcacaggtcagcagctgcctcgaccccgccaccgcttcggggaaactctccacgtggttgtgcccattgccgcggcctcgacgcgcagatctatcactgcggtgacaggccacttgttcaccatcaacgctgccacctctacgcacgccatccctctccactgcctccatccttag

SEQ ID NO: 97612 - DNA, 751 bp, Oryza sativa
  unsure (1)..(751): unsure at all n locations
  Clone ID: PAT_MRT4530_95599C.1
gttatcttttctgcttaacggcccgccaaccctggaaacggttcagccggaggtagggtccagcggccggaagagcaccgcaaaacccggggcgcgagcccgggcggagcggccgtcggtgcagatcttggtggtagtagcaaatattcaaatgagaactttgaaggccgaagaggagaaaggttccatgtgaacggcacttgcacatgggtaagccgatcctaagggacggggtaaccccggcagagagcgcgaccacgcgcgtgccccgaaagggaatcgggttaagatttcccgagccgggacgtggcggttgacggcgacgttaggaagtccggcggcccttgaaaatccggaggaccgagtaccgtccacgcccggtcgtactcataaccgcatcaggtctccaaggtgaacagcctctggccaatggaacaatgtaggcaagggaagtcggcaaaacggatccgtaacttcgggaaaaggattggctctgagggctgggctcgggggtcccggccccgaacccgtcggctgccggcggactgctcgagctgctcgcgcggcgagagcgggccgccgcgtgccggccgggggacggaccgggaacggccccctcggnggccttccccgggcgtcgaacagccgactcagaactggtacggacaaggggaatccgactgtttaattaaaacaaagcattgcgatggtcctcgcggatgctgacgcaatgtgatttctgcccagtgct

SEQ ID NO: 97613 - DNA, 885 bp, Oryza sativa
  Clone ID: PAT_MRT4530_9559C.1
atgcagtgcatctgcaccagggtgacaccatccagatcagtgggagaaatatcaagatcaagatcaagaaatgatcttcctctgggtgtttcaccgtcgtcgaggatgctcacgacatgtactctcaagactccttcctatggcaacaagtcgaagtcgaaggagaagatcaatccgagagacatgttcaccttctcctacagattcaacactgacatccccatgaccgagactccaggggcatccatcgatgagtaccttcagaacaggcccaggattgttggagccgtgttccctgataagcgcaagagaaccaagctcagtgatgaagaatggagcgtgcagcttctgccgatccagttcctgttcctgtcggcgtcgccggtgatcgtgatgcggttcgtaagcaaatccggcggcaaggagtacccgccgcacgtccccgtcaaggcaaccagcctcctgctcatggaagtgacggactacaagctggacgggctggacagcaacgcgatgccgtcgcacctcgccctgaccgtccgcgggtcgctgtacccgcggccggaggggaggaagagcctgaggggccacgtcgagatgagcgtcggcttcaacctgccgccggtgctcgcgctggtgccggagggcgtcatcagaggcgtcggcgagacgaaagagatggtatcatggaaactggaaagatcctctacacgactctgtcctctgattttgagtgactggtatatgggtcccacatttccaaaaggcccgcatgtgctgaggcagctagcactgcagatgaagcaggatttcgacaatggcctggcagccgatttcaagaggtacaggagggagaagctaactgaaaagaagactacaccctga

SEQ ID NO: 97614 - DNA, 4236 bp, Oryza sativa
  Clone ID: PAT_MRT4530_955C.1
atggcggaacgtaattggatgtacaatggttggcattatggttctgcaccctctgatgagtggattgaaaagaccaatatgtttctagaccgtgctttctctatacctgatttacttcaagatggaagtattaaatgtccatgtggtaggtgtcgcaactacatgaggcatacaagggatattatagaggcacacttgtgtaaatttggctttaaggaaaactatgagacatggacagcccatggggaagaacatattaggaataatgaaccagtgtctcccttggcccatgaggaggggtttgatcaacctgatcgcatggatgagatgttacttgatataggggctgtccaaccaccaggaattgatgaagagccaacttcttctgctagtgctttctatagaatggtggatggggctaatgagtcagtccatgacaacacaatgcacactagcttatctgctattgctcgtttgctagctttaaagtcagagtacaatatgtcaatcgcacattatgatgatactttgcaactgatccatgaacttcttccacctgattctaagttggcagaggatttttaccattctaagaaactattgcggggcctaggtatgacatatattaaaattgatgtttgctataatgactgcatgttatactacaaagaaaatgagcataaagataagtgtgacttttgtaacaccccccgatttgaggatggacagaataaggtcccacgcaaagttttgcgttatcttcccatcactgataggctgcaaaggctttatgcacatgaggagaccgcaaaggctatgcaatcacataaacagtccacatgtggtaagctagtgcacccttgtgatggtgaagcatggcaacaatttgacatagattttccaacctttggtagagatgcaagaaatgtgcgacttgctatttcaactgatggtttcacacctttcaatattggtgctgctccttattcttgttggccagtctttgtttctccactaaatttgccccctggagtactgttgaaaccagaatatatattcctttcactagttatatctggtcctgaacatccaggaaagaagctatctattcttatgcaaccattagttgatgatcttttcaagttgtgggagggggttgaaacatgggatgcttcgcgcaaggaaagatttaacatgagggcagcctttttgtggtctgttcatgattgtcctgcatatgaccatgagttcagattccaagctaatgcttttcggaagaacaccgtagtattggatgaagcaccaaggatcttaaagggagaggaagtaagggaccaaatgtatgcacacgtggctgatagaaataactatggtaaaactcacaattggacccatgtgaactgtttttggcaactaccatactttcataaattactcctcccacacaacatcgatgtcatgcacaatgagaaaaatgtagctgaaactatatggaacacgtgctttgacatacccgacaagacaaaagacaatgtgaaggcaagacaagatttggttgatatttgcagccgcccctcattacacttggaattgaagggcagtggcaagtggcacaagccgagggcagcattttgcattgataagaatgacaagactattatattcaaatggtttcaagatctgaagttccctgatgggtatgcagccaatattagaagaggggtcaacctactgagaaggaggatatttgatctaaaaagccatgactaccacatttttattgagcgattacttccggtagcttttcgtggattccttccagaaaatatatgggtttgtttggctgagcttagttttttctatagacagttgtgtgctaaagaactaagcaaggatgttgtacattcacttgaacagaatgttgctgttcttttatgcaaattagagaagatattcccaccagggtttttcaatctaatgcaacatctaattgtacatcttccccgtgaagctcgtcttggtggtcctgttctagcccgttggatgtatccatatgagaggtacattgggagacttagaaaaaaggttagaaataaagctcgtgttgagggatccattgttgaagcttatctagtggaggaaaacacaaatttcctctcactttatttcagtcacaattgcatggcaaattctagtattgatagcaccttgcggcaaatttcttatggttttcctagaagaataaccacttatggatgctatgatgtgaatggatatagatttcgttcagagaagtatgagagtgcaaaatcaggattaagtactgtcaatactggtgtttgtgtgtcttgcgttgacgatgataacaatgttattgactactttggtgtcatcgaggacatcatcaaaattacttgggagggcagcatgaacctagagttggttttatttgattgccgctggtttgatccaacaaattctagtgttaggcgaactgaaaatttgggattggttgaagttaaccacacatctaggctttcaaactttgaaccatttgtgctggcaagtcaagttactcaagtttattacttgccttacccatgtgattccagaccagatttaaaagattggtgggttgtacataatgttacccctcatggttggcttcctcctagtaccacgaatgagtctgctcctcctaatgatcagccacaaattgacacattctatcaagaagaaggattggaaggtcattttgttattgatttaggggatgacattgaaatagcaaccacttacatatctgatgagataactaatgagaaagatttggactatcttgccaaatatcatgaacaaccttcgccatcggtctgcccagctagccaactttccaatacaagcagtgctaatggtgctagctcaaggagtgtgccttctacaaatggcactcaagtgaaccctgctaactctaatgctgaaggtcagagtcaaggaagtcatcgtgcaagtactgagcaagctgaacagcaagctacacaaagaggacgaaaggagaggtcaaggaccagcctggctgtacctcgaccgggtcggaaggtgggccttatacctaggggtgaaatgcaattcaagtatgtgaattggcatgctgcagagtacaagtatacctcacagcttggggttattctgaaacgcgaatacccaggcactgtgaaggaccttgacaatgatgaagaattaaaggcggaggctaaccgtgtcttacaacaatatgcaaacaagcgcgtcaatgatatgatgtatcaacttcgtgtcgatgctgtcaagctctacttctttaaagtgcgtggggaaaagattaaagacgaagtagcccgtacaattgaactctcagaagaggaatacctgcttgctcgtgtggaatgggttagtgaatcagattggccttctctctgccaccactgggacactgaacaataccttgagaagcggaaaaaagcccaagattcaaggctacaatctgaagatgattctcggaatagaggaggatcaaggccatttactgagacacaacagtggctggcacatgactttggacctgagaaggctactggactaaacacatttggtgttatgaaatcaggtgcaaaaaacgtggacagtactggaactcatggacggatcgacaaccaaaaggcagaaaaaatcatggctgactatactgcagtgactaactcaggaactcaaggagattcagatggccatgaattagatccaaaggcactttattccatttgcaatggactgccacatggacgccttcccataggcaatggtgctgtgtccaagtctactgttatagcggccggtaaagagacagtacctaggccatctaccccatcagccaatcaaactttgcgaaacgaaaatttaaaactcacacgcgaaaatgcagaacttcgccgccgaatggattccaatgaacggctgatcaggtttctttatgaaaagacaggagtggaaccaccatctgaggaagatgtagtgccacctgctaatgaagatctaatgtctcctgcgcatgtccagcaggaagctgaaaatgatggaaccactgacaccaacatgggcaatgaggagaacgtggtctgtgaggtgaacatcggctgcgaggcgaacaatggatgcaacagatatcaagtttgcagcagtggacgggttatcgcagcctag

SEQ ID NO: 97615 - DNA, 159 bp, Oryza sativa
  Clone ID: PAT_MRT4530_95600C.1
atggttcccgtggacttggagagacccagctgtggtcgcgaacacgcgttccggcatccaattgatcgcgggcacgagatgcgtctcgtcgtcgccaccgtcttcggcttgaagcgttgggtagccggccagacaactggctgccgcatctactgctag

SEQ ID NO: 97616 - DNA, 5060 bp, Oryza sativa
  Clone ID: PAT_MRT4530_95601C.1
tgaaaggtacattagtagccagtttgagaatatgagatcaatagagttatcttcgatcgtcaggtccggagacgtgacatcagcgcacataaaggttatgttcttgtgatgcccatttatgttctcattcttcttaatcacactttcaatgaagtctagggttaaaacatggccagcttcttttgccagttccccagtaaagcgtcctattccagcaccaagctccagtactgatttccctttgtaagaagggagtacagacaggacctcggggctagttgattcggcaggtgagttgttacacactccttagcggatttcgacttccatgaccaccgtcctgctgtcttaatcgaccaacaccctttgtgggttctaggttagcgcgcagttcggcaccgtaaccaggcttccggttcatcccgcatcgccagttctgcttaccaaaaatggcccacttggagctcccgattccgtggcgcggctcaccggagcagccgcgccgtcctacctatttaaagtttgagaataggtcgagggcgttgcgcccccgatgcctctaatcattggctttacccgatagaactcgtaatgggctccagctatcctgagggaaacttcggagggaaccagctactagatggttcgattagtctttcgcccctatacccaagtcagacgaacgatttgcacgtcagtatcgcttcgagcctccaccagagtttcctctggcttcgccccgctcaggcatagttcaccatctttcgggtcccgacaggcgtgctccaactcgaacccttcacagaagatcagggtcggccagcggtgcggcccgtgagggcctcccgctcgtcagcttccttgcgcaccccaggtcaggcgggactacccgctgagtttaagcatataaataagcggaggagaagaaacttacgaggattcccctagtaacggcgagcgaaccggggagatgcccagcttgagaatcgggcggccgcgccgtccgaattgtagtctggagaggcgtcctcagcgacggaccgggcccaagtcccctggaaaggggcgcctgggagggtgagagccccgtccggcccggaccctgtcgccccacgaggcgccgtcaacgagtcgggttgtttgggaatgcagcccaaatcgggcggtaaactccgtccaaggctaaatacaggcgagagaccgatagcgaacaagtaccgcgagggaaagatgaaaaggactctcttaaggtagccaaatgcctcgtcatctaattagtgacgcgcatgaatggattaacgagattcccactgtccctgtctactatccagcgaaaccacagccaagggaacgggcttggcggaatcagcggggaaagaagaccctgttgagcttgactctagtccgactttgtgaaatgacttgagaggtgtaggataagtgggagccctcggggcgcaagtgaaataccactacttttaacgttattttacttattccgtgagtcggaagcggggcctggcccctccttttggctctaaggcccgagtccctcgggccgatccgggcggaagacattgtcaggtggggagtttggctggggcggcacatctgttaaaagataacgcaggtgtcctaagatgagctcaacgagaacagaaatctcgtgtggaacaaaagggtaaaagctcgtttgattctgatttccagtacgaatccgtgcgacgcggggctggatctcagtggatcgtggcagcaaggccactctgccacttacaatgccccgtcgcgtatttaagtcgtctgcaaaggattcagcccgccgcccgttgggaagggagcttcgaggcggccggccgcggcgcgtcggccgggccggcttggccggtggcacgggcccttgggggcttgcgcccctaacgtgggtcggggcgggcggcgggcgcaggcgccgcttgctagcttggattctgacttagaggcgttcagtcataatccggcacacggtagcttcgcgccactggcttttcaaccaagcgcgatgaccaattgtgtgaatcaacggttcctctcgtactaggttgaattactatcgcggcacggtcatcagtagggtaaaactaacctgtctcacgacggtctaaacccagctcacgttccctattggtgggtgaacaatccaacacttggtgaattctgcttcacaatgataggaagagccgacatcgaaggatcaaaaagcaacgtcgctatgaacgcttggctgccacaagccagttatccctgtggtaacttttctgacacctctagcttcaaactccgaaggtctaaaggatcgataggccacgctttcacggttcgtattcgtactggaaatcagaatcaaacgagcttttacccttttgttccacacgagatttctgttctcgttgagctcatcttaggacacctgcgttatcttttaacagatgtgccgccccagccaaactccccacctgacaatgtcttccgcccggatcggcccgagggactcgggccttagagccaaaaggaggggccaggccccgcttccgactcacggaataagtaaaataacgttaaaagtagtggtatttcacttgcgcccgagggctcccacttatcctacacctctcaagtcatttcacaaagtcggactagagtcaagctcaacagggtcttctttccccgctgattccgccaagcccgttcccttggctgtggtttcgctggatagtagacagggacagtgggaatctcgttaatccattcatgcgcgtcactaattagatgacgaggcatttggctaccttaagagagtcatagttactcccgccgtttacccgcgcttggttgaatttcttcactttgacattcagagcactgggcagaaatcacattgcgtcagcatccgcgaggaccatcgcaatgctttgttttaattaaacagtcggattccccttgtccgtaccagttctgagtcggctgttcgacgcccggggaaggcccccgagggggccgttcccggtccgtcccccggccggcacgcggcggcccgctctcgccgcgcgagcagctcgagcagtccgccggcagccgacgggttcggggccgggaccccccgagcccagccctcagagccaatccttttcccgaagttacggatcccgttttgccgacttcccttgcctacattgttccattggccagaggctgtttcaccttggagacctgatgcggttatgagtacgaccgggcgtggacggtactcggtcctccggattttcaagggccgccgggggcgcaccggacaccgcgcgacgtgcggtgctcttccggccgctggaccctacctccggctgaaccgtttccagggttggcgggccgttaagcagaaaagataactcttcccgaggcccccgccggcgtctccggacttcctaacgtcgccgtcaaccgccacgtcccggctcgggaaatcttaacccgattccctttcggggcacgcgcgtggtcgcgctctctgccggggttaccccgtcccttaggatcggcttacccatgtgcaagtgccgttcacatggaacctttctcctcttcggccttcaaagttctcatttgaatatttgctactaccaccaagatctgcaccgacggccgctccgcccgggctcgcgccccgggttttgcggcggccgccgcgccctcctactcatcggggcatggcgctcgcccagatggcctggtgtgggtcgcgcgcttcagcgccatccattttcggggctagttgattcggcaggtgagttgttacacactccttagcggatttcgacttccatgaccaccgtcctgctgtcttaatcgaccaacaccctttgtgggttctaggttagcgcgcagttcggcaccgtaaccaggcttccggttcatcccgcatcgccagttctgcttaccaaaaatggcccacttggagctcccgattccgtggcgcggctcaccggagcagccgcgccgtcctacctatttaaagtttgagaataggtcgagggcgttgcgcccccgatgcctctaatcattggctttacccgatagaactcgtaatgggctccagctatcctgagggaaacttcggagggaaccagctactagatggttcgattagtctttcgcccctatacccaagtcagacgaacgatttgcacgtcagtatcgcttcgagcctccaccagagtttcctctggcttcgccccgctcaggcatagttcaccatctttcgggtcccgacaggcgtgctccaactcgaacccttcacagaagatcagggtcggccagcggtgcggcccgtgagggcctcccgctcgtcagcttccttgcgcatcccaggtttcagaacccgtcgactcgcacgcatgtcagactccttggtccgtgtttcaagacgggtcggatggggagcccgcaggccgttgcggcgcagcgccccgaggggcgcgccagaggcgcgcggtgaccggctgcgccgacgacggctgccgggggcgcggagcccccgggctttggccgccggcgcggccgacaacagtccacggccgccgagccgatcggcggaccagccgaagccgttccgcatacggccggggcgcatcgccggcccccatccgcttccctcccggcaatttcaagcactctttgactctcttttcaaagtccttttcatctttccctcgcggtacttgttcgctatcggtctctcgcctgtatttagccttggacggagtttaccgcccgatttgggctgcattcccaaacaacccgactcgttgacggcgcctcgtggggcgacagggtccgggccggacggggctctcaccctcccaggcgcccctttccaggggacttgggcccggtccgtcgctgaggacgcctctccagactacaattcggacggcgcgccgactctagagaatccaagcttacgtacgcgtgcatgcgacgtcatagctcttctatagtgtcacctaattcattcctgcccctaattg

SEQ ID NO: 97617 - DNA, 627 bp, Oryza sativa
  Clone ID: PAT_MRT4530_95602C.1
acggcacgaggcctcgtgccgaatacggcacgagggtctccatgcgcaccggcctgctggctgaatgagtgcaaggatatttttgaggctttgtacaaattatttatgatctacgcacctacttgaagccacatgtgtgtctcgtgtacttcttgcggccgctcctttagcgtttgctctggccgctcgccgccatatatccctgggtggttttgctcgccgtgctgcatagtctgaccccgcgtggtatcgccgcgttggtcccactcctgttgctggttacttggccacttcaagcaatgtgattggtcgctcctcccgtgcaaccctggtggtgaaatatgcgtttcgggttttctcctggtctgctttgtctcaagtgtcctgtggtccttccaactctaatcttgggatggagagttaatggcttgtatggtaggatgtgttgctgctcgtgtgcacactacacagtaggtggggggtgtgaaggggtcatatatttttgtctggtagctttgctcgtgggccacaaaacacctcttgtcattgcttctgttgatgcatatgctactgcaaacagctatgattatgttcaggctgtgatttgttagtggacagttgcccctg

SEQ ID NO: 97618 - DNA, 1270 bp, Oryza sativa
  Clone ID: PAT_MRT4530_95603C.1
atagaacctgaaccgccggacggaggcccgggccgactcagagacagacaaggacgagcaacccgcaaccgcgaccagaggagaagactcgatcgaatcgaatcgaagcgggaggatttcgggggtccgtgactccgttcggagaaaaggattcagcttgtgggcagaagaagaagaagaagatggcttccgcgaaatccggggagagggggagcagcagcttcgccatggcctgcagcctgctcagccgctacgtcaggcagaacggcgcagccgccggcgagctcggcctcggcatcagaggtgaagccgatgcgaacaaggggaaggagaccatggagctgttcccccagaattccgggttcggctctgaagctgctgccgtgaaggagaccccggatgcgagggagcaagagaagcgccaattaaccatcttctacggtgggaaggtcctggtgtttgatgacttcccagctgagaaggccaaggacctgatgcagatggccagcaagagttcctccacagcgcagaactgtgtccttcttccatcttccgctactgcaaccgttgccgacaacactaaggtgtctgctgtaccagccccagcaagtgcacttcctgttgctcaggccaatgccccgaaacctgttcgtccaaatgctgctgatctgcctcaggctaggaaggcgtcgcttcaccggttcctcgagaaaagaaaggatcgccttcaggctaaagcaccctaccagggttccccttcagatgcttctccggtcaagaaggagctgcaggagagtcagccatggcttgggttaggacctcaggttgccgctcccgacctgagcttgcggcaggaatcgagccaatgaatcaatgctcaattctgagatgcccctctcatcagatgattcagtcatagaggttatcacaactcttgaattgggtgttttgtgttaggagatgatccgatgacaaggcgatgttcttctgatatatatactaggattgaatgtaaagaaagtagctgatgattatgaccagtaatctgaatcaaattgctatgatagaaagcagaagattctgtaatcagtacaacccaagaaacctcatttgtaccaattcaatatcgttttgctttggcattgccatgtagaagcaaagcaaatgtactgctaatatatacacatcacaagattgattgttattcacttaaaaaaaaaaaaaaaaaaacccggccccgggcctcttcctcagcccggggatccactag

SEQ ID NO: 97619 - DNA, 860 bp, Oryza sativa
  unsure (1)..(860): unsure at all n locations
  Clone ID: PAT_MRT4530_95604C.1
ttcacatcttactgaacagctactactcctgggagctagctcaagctcaagctcaatctcaagctctttccactaagctccgtgtgtctagctcatcaatacctggctagctagctagggtgttgatcgatatatatnctaaaataaggatggacttcgacttgttcaattcctacccggaatcgcagcttgacctgatgagcacgatgcttcagctggagcagctcactgcgctcagtgaccagtcgctgttcatggcggcgccgacgtcgccgccggtatcacccatggggaccccttctccccagttctcaccaccgccgcagatgtcggtcaccaccaccaccgccggtggcggttaccaggatcagtataactccatgccggcaacgtacggcgccggtgcgggcgtgcaccagctggacttcgcgatgtcgtcaccgggctccgactccggcgcgccgcagggctcgtcgtcgtcgtcctcgtcggaggcgatgcgggagatgatcttccacatcgcggcgctgcagccggtggagatcgacccggaggccgtgcggccgccgaagcggcgcaacgtgcgcatctccaaggacccgcagagcgtggcggcgcggctgcggcgggagcgcatcagcgagcgcatccgcatcctgcagcggctcgtcccgggccgcaccaagatggacaccgcctccatgctcgacgaggccatccactacgtcaagttcctcaagtcccaggtgcagtccctcgagcgcgccgccgccgccaccggcgccgccgcccaccgcgccgccgcattcggcgccgcctacccagctgccttacccatgcagcaccacgctccgtggtag

SEQ ID NO: 97620 - DNA, 1743 bp, Oryza sativa
  unsure (1)..(1743): unsure at all n locations
  Clone ID: PAT_MRT4530_95605C.1
ggatccccgggctgcgcccccccggcccggcgtctggttagtgaagaagttgggtgaagaacgaccggggcccggctcgccgcccctttcacacatcccttttccctttctccgcgtcggcgcgtccaaatcctcccgcctccccctcccctttgaatcctcgcccgagcaacggatccccccgccctgaagccgactaacggcggtccggcaagaccagcggcaccttctccattctcccccggattttccacttaagaggcccgcccccaacgcctgaggttattgtccccacctccggggcccccgccgtctttccggtttccccctctcctccttgtgccagcgctagccctccctccccgacatcttctcttctttgctattctcgggagcaatgtgggaaaccaggcttgccgggattagttcggggcagcctgaaccagcgccaccccccccaatgccatttcttcggcccgaaaatgggcagggggcgcccttgcctccccaagttaattcagaaatttggtgaaagaggaacccgggcaagacttacaggcaagctacctctccatggtagttagcctctttttcctcgcaatcattgttgcttccctcctgcaccaatctagctcgaactccctgtcccgccttcattggcaccacctcagacattctactctctgcaaagccagggagccatttctctctctcaggacaatgacaagcattgggatagccaaggcagtagattctcaatcaattggtgctctgtctactaggtgaagagtgacaaataaagaatgtaaatgaccaacaccaaagcaggatctgcaagtcaactggctcatctgcatattatttgaggtgttgtcggactgcctgcgataccattcgtcaactcttttctagttgcactacctctttggttatctaagcttaagaattaatattcaaattacatctcagatgtagctgatgagattggcattgctattgtttcatattagattgttgccaaattgattaattgaacgtggatgtcaatgcattgaaatccattctaccattgtatgtgtgatcatctgtgatgtgttattaggatcctactattctgaatgtaagcaaataatataaatgaatcagcaaacccattttagtttgccctcaaaaaaaaaaaaaaaaaaaattacttgtgatgaaattattattcccttttttcagaagattgggaggcatgttccaagaaagtcattgcaatgtctgttccagtactgaaaccaatctagctcggctccatttcaagccatcataggcaccacctccagacattctactccactgcaaagccaggggagccatttctctctctcanggacaatgacaagcattgggaatagcccaaggcagtanaattctcaatcaattggtgctctgtctactaaggtgaaagaagtgacaaataaagaatgtttaatgaccaacanccaaaagccagggatctgcaaagtcaactggctccatctggcatattaatttgaaaggtgtttgtcngaactggcctggcgaatanccattccgtcnactccttttcctagttggcactaacctcctttggggttatctaagccttaagaaattaatatttccaaattaacatcctcanaatgtttacctggaatgaaaaatnggcttggctaattggtttccctantaanaattggttggcccaaactggaatta

SEQ ID NO: 97621 - DNA, 474 bp, Oryza sativa
  Clone ID: PAT_MRT4530_95606C.1
gcggatctatcttctcttccttttcggccattttttcttttcacctgcgatccatcccggcccgggaggagggaggagcccgaccccgcccgggggaaagcaagggaaaaaaaggaaagaagaaattccccgcccccgtcgccgccgccgtggccattctcaacgggaacggaaaagggggttaagtttcacaaagttgtcaagccgccttttcgccagaagggagaatgaggatcctcatgggccggctcgatgcggccggaaaaaccaccattctcttacaagctcaagcttcggcgagaatcgtcacccacttatccccaaccaatcgttttaaatgtcgaaactgttgagacaagacattagcttaaccgttggatgttggtgtaaggacaagatcggcccctgtggagcactatttcagaaacccagggcctatttttgtgggacagcatgacagagagcgtgttgtga

SEQ ID NO: 97622 - DNA, 263 bp, Oryza sativa
  Clone ID: PAT_MRT4530_95607C.1
tcgcgatctaaactggtcctctcctcctccggcgacgcgatcgagaagcggcgccggattttgccgccggcgacgcgcggctgagggggcggcgggaagggggtgggggtggggaggagcgattaccatagccacaattttaacacttgagcagaattgaacccagcgacagtgtgtacgtgcacaaactcttacggggatgaacatcgtgtatcacaccgaccgagggaagcaatagtgtgcaccggtgtcttaaaagcatt

SEQ ID NO: 97623 - DNA, 1185 bp, Oryza sativa
  Clone ID: PAT_MRT4530_95608C.1
atggctctcgctcaagcactcgtccactactatcctatcgccggccgtctttcctgcaacgatgacgaagacggtggcggcgatttctacatcgactgcaccagcgagctcggagtcatgttcgtggccgcgtccgccgactgcaccatggaggagctcatgcgtgtcgccgacaaccaacctaccgacgacgagacggcggtggtgcagcagctcgccttcaactgcacgcccgacgtcggcgacgacggccctcctcctctgctgtgggtgcaggtgaccacgctatcctgtggaggcttcgtcgtcggggtgacatggagccatggcctggctgacggtgtcggcatagcacagttcatacaagccgtcggcgagcttgcccgtgggctgccctcgccgtccatcgtcccggtcaggcaagacgacatcgtcgcaacccaagtcgtacctcccttcaccatggcccttctccagtttctacccggcctcaagccattagacctcaccttcaacaacgtcaccgtcccgacaagcttgatcaaccacatccgacgattccgaggacgacgaaccaacgacgatggtgggcagcactccaccaccaccatcacggcgttcgaggcagtcgccgccgtgctttggaagtgccgtacacgagcggtgatggcgagtccagaggctcccgccatactagtcttcgtagtgaacgcacgaaagtacctagcaggcgtcaacgacggctactacgggaactgcagcatgatgcacatggccatggcgaagagcggcgcggtggcgaacggcgacatcatggacgttgtggagatcatacggcgagccaaggagcgcataccggagcagttcggagaaggcagcgacaggatggtacgggagctcagcgatgggcagcaggtggatggatacgagagcttgctttacttgacatcatggcgaaacatcgggttggaggaggtggatttcggcagcgggaagacggcgagggtgatgacttacccgcagaggatgctcttctctctactggagaaaactacacccatctgcttcatgctcatgcccacaaaggaaggggctagggtgatgtctggctgtgttacgcccgaccacgtcgacgccttccaacaacaaatactcaagctcaacgccaattataccgccacctga

SEQ ID NO: 97624 - DNA, 363 bp, Oryza sativa
  Clone ID: PAT_MRT4530_95609C.1
atggttgtatccgtccgtagtagtcatggtcacattatcatccttgcccgtgaggggcttgttggaggcatgtcacgagggccttcggctgggtctactaaaaccacaaggaccatgaggtgttggctaagtccaagaggcaaagccataaggaaaagcagctgggcaaaactagatgatgtagaccgaagggtttgccaccaagcccactatcctgacgagccatcactacgggcgaaggccgtaaagcgaagcaggagggttttgcttgagttagaagcggcttcggcagagggcttgggagacaccgcgccccatggaggccttgcgccattaatgggctggcccaaggagttcacttaa

SEQ ID NO: 97625 - DNA, 348 bp, Oryza sativa
  Clone ID: PAT_MRT4530_9560C.1
atgcttacacgggcgggtggcgtaggcggccggcgggcggggaagcggcggcggtggtcggcgacggcggcggttgctaaggtgggcaggtggcgcaggtgggggcgggatcaggagcggcagcagctgctgcaggcgggcgcagaagcggcgtcggcggccggcgagcaacgacgacgacggaggcaccgtagcccgccagccgcttccatccatgcattcgctactaccgtaacggtctctgccttcccttcgttgctgcggcgccacgccaatcttcgttttccctttcgccgccacaccacgggctcaatcagtcgcccatcccgtgcatacgctgccatccgt

SEQ ID NO: 97626 - DNA, 2796 bp, Oryza sativa
  Clone ID: PAT_MRT4530_95610C.1
cttcattgtcggtggcaccacagagaaagacgagcaaaccggcatcactagggagcaagaggaagcacgtgccaaagctgaggaggaacgctagtgaaggcagcacgatcaccgtctaaaccctggccatttgtgcagtaggaggagacaacaaggcactggcgaattacctacctatggcactcgctgattcaacaaggagctggctaatggggcttccaaggcgatccattgattcctgaagagagctttgaagctagttcatcgtcaacttccaaggcacctacgagagacgcagtactcactttgacctataccatgttgttccaatatgtctcttttggactacatctgacatttctcggaggcccgcaacaagatcccgaaggtcactgacgatgttatcaccgctactttccaaaaaggcattcgagacaagttacttattggcaagttcaatcgcaagccttcgtgaatagtcatgaagctatttgagactaccaactcctacgccaaggcagtggacactgtcaatgcatcataggaggaaaagtagtcgggtagctattggcgcccctagaagaataataactcaacaaccagaaggatcgcaagcacaaacctgaagacttggtggccacaacatctaattagcaatcacaacgtcgtcccaaccactgcgataaggttatgaatgggcaatgcctaaatcacccgaactcaaagcacaggtggccaatgactgcgacaagcacaaaaagcgcaactcaagatcaccaatggcgaaggaacttctgggcaaaataaaaacaacggagaagggccttccaagatcccaggaccgagtgaaaccacatcttcggaggcccacccgcctacgaatccaaaaggaagcagaagtcgaccgatagggagatcaacaccatctagccagaagtaccccaatatttatggtggtccgaggtagcaatgatgttcgaccgctcggatcatcttggccgagtggctcacccggagtggtacatcctggtacaagatctagtggttcataatgttaagttgaagcgtgtcctcatcgacggtggcagcgcgctcaatatcctgttcaccaagacactggataagatgcagattccaagatccaagatgaagtcgagttctgctccgtttcatagggttgtccctatgatatcctcaatgctactcggccagatcagccttccagtcaccttcggactcggaataatttccagacagaatatctgctttgaagttgctgattttgaggcagcttattatgccatactgggaaggccagctctagctaagttcgttgtcgtcccctactacacctacttgatgttgaagatgccaagtcaacaacgagttatctcattgcgtagcgacgtcaaacaagccgtcacctccgacaaggagagctgcgagatgacccaatctcatgggagggcactcgaccagcaagaggtctgactcgttgcatcaacatcacatgaaggtgaattgcctgccaagaagatactgaagtcaagagaaagtgatgccaagacaaagaagatcccacttgatcaagccaatccctccaagactaccaatagtaaagatatatttgcttggaaaccttctgatatacttggtattcctagagaggtgattgagcactcattaaatgtgaagactgacgcaaagcatatcaaacaacgactccacctattcgcacaagatcaaagagacgctatgaagaaagaacagagtaagcttctggcagctagattcatcaaggatgtttaccatcccaactggctagctaaccctgttctagttctgaagaagatgggacaatggtgtatatgcatgaactacacggatctcaacaagtattgcctccaagatccctttggattacctcacattgatcaagtcgtcgattcgacggccatcagcgaccttctcagctttcacgactgctatttgggatatcatcaaatcagcatgaaagagtctgaccgcttggagacctcgtttatcaccccgttcggagagtattgttacatcacaatgcctttcagtctgaagaattcaatagccacgtaccagcacatgattcagaaatgcttgcaatcatagcttgggcgcaatgtggaggcctatgtcgatgatgttgtcatcaagatgaaggagaaggataacttaatcgctgacttggaggaaacctttcaaaacatccgggtcttcagaatgaaattaaacccggagaattgctcctttgaagtagcatcagggaagctgtttgatttcatggtgtcacactgtggcatcgaagccatcccagaggaaatgaatggtatgcagaatatgaagccgccaagtacctagaaggacatccaaaaacacaccagatgcctgtcagctcttagtcggtttgtctctaggcttggagaatgaggcatgccctttttcaatggacacctaaagccaaaacctttgaagacttcaagaattttcttatgacaccgcacatgctagcttcaccatatccacaagagcccttgccactttatgtgtcagcaacttcgcatgttgtcagtgcagtgttggatattaaatgagaaggacacatccaaaaggttcagaggcccatttatttcatcagtgatgttttggctggctccaagacacgctatgcataggaccagaagctattacatggagttctgatcacagtccggaagtgggctaagtactttcaaagtcacttggatgccatggttagatcct

SEQ ID NO: 97627 - DNA, 526 bp, Oryza sativa
  Clone ID: PAT_MRT4530_95611C.1
aatatacccatgtccggattcgttatactaggatatgtcacattccatactggttgagatattttagccggggagagtatgggtcatgacactatattttgatgatttcaggatcaaattccggtgattggcaaatctattatggctttaatggggatgccaagcttacaggttactatccaagatctctatttacaagcttgtcagataaaccagtgacatattgtttggtggctatgccttgagaaaggatcaaaagccaagtcctccgatgggcagcgggaatgccccatttaaaaatgccgcatcatttagtagtatcaaattttttgatgccggtggcaacgcccatccatcgattttcgtctcggatttatatcaaattgttacactatctctgttattgaaaatgatgggttcttttatgggggacctggcaatatttgctagcagtttgtaatcgagcttcaacttaatgtaatgaatatcctggggactgcccccccaaaaaaaaaaaaaaaaaaaa

SEQ ID NO: 97628 - DNA, 1820 bp, Oryza sativa
  Clone ID: PAT_MRT4530_95612C.1
gtgcagtaggaggagacaacaaggcactggcgaattacctacctatggcactcgctgattcaacaaggagctggctaagagctttgaagctagttcatcgtcaacttccaaggcacctacgagagacgcagtactcactttgacctataccatgttgttccaatatgtctcttttggactacatctgacatttctcggaggcccgcaacaagatcccgaaggtcactgacgatgttatcaccgctactttccaaaaaggcattcgagacaagttacttattggcaagttcaatcgcaagccttcgtgaatagtcatgaagctatttgagactaccaactcctacgccaaggcagtggacactgtcaatgcatcataggaggaaaagtagaccgagtgaaaccacatcttcggaggcccacccgcctacgaatccaaaaggaagcagaagtcgaccgatagggagatcaacaccatctagccagaagtaccccaatatttatggtggtccgaggtagcaatgatgttcgaccgctcggatcatcttggccgagtggctcacccggagtggtacatcctggtacaagatctagtggttcataatgttaagttgaagcgtgtcctcatcgacggtggcagcgcgctcaatatcctgttcaccaagacactggataagatgcagattccaagatccaagatgaagtcgagttctgctccgtttcatagggttgtccctatgatatcctcaatgctactcggccagatcagccttccaatgccaagtcaacaacgagttatctcattgcgtagcgacgtcaaacaagccgtcacctccgacaaggagagctgcgagatgacccaatctcatgggagggcactcgaccagcaagaggtctgactcgttgcatcaacatcacatgaaggtgaattgcctgccaagaaggaaaacacactcatcatctttctttaagatagtaaagatatatttgcttggaaaccttctgatatacttggtattcctagagaggtgattgagcactcattaaatgtgaagactgacgcaaagcatatcaaacaacgactccacctattcgcacaagatcaaagagacgctatgaagaaagaacagagtaagcttctggcagctagattcatcaaggatgtttaccatcccaactggctagctaaccctgttctagttctgaagaagatgggacaatggtgtatatgcatgaactacacggatctcaacaagtattgcctccaagatccctttggattacctcacattgatcaacatgaaagagtctgaccgcttggagacctcgtttatcaccccgttcggagagtattgttacatcacaatgcctttcagtctgaagaatgttagagccacttaccagcacatgattcagaaatgcttgcaatcatagcttgggcgcaatgtggaggcctatgtcgatgatgttgtcatcaagatgaaggagaaggataacttaatcgctgacttggaggaaacctttcaaaacatccgggtcttcagaatgaaattaaacccggagaattgctcctttgaagtagcatcagggaagctgtttgatttcatggtgtcacactgtggcatcgaagccatcccagaggaaatgaatggtatgcagaatatgaagccgccaagtacctagaaggacatccaaaaacacaccagatgcctgtcagctcttagtcggtttgtctctaggcttggagaatgaggcatgccctttttcaatggacacctaaagccaaaacctttgaagacttcaagaattttcttatgacaccg

SEQ ID NO: 97629 - DNA, 3335 bp, Oryza sativa
  Clone ID: PAT_MRT4530_95613C.1
acgagcaagccggcatcacgagggatcaagaggaagcacgtgccaaagctgaggaggaacgctagtgaaggcagcaggatctgattagaagcggtcacattgcacacaacatcatccaaacccgcatagaagacagtaatgttttcgctacacctcaatagaacgctgtggtggccgtcacgttgattgacacccacatcgacaaagctccagaaaacatgactttgatgttgaataaggtcaagactatgatcgtcgccactgcagaatccaatgctgactcccccaggactctggttggctgtcattagccctcgaatcatagatccaggggccacataaaacctgaatatagcagaggtcacaccgcttccatctagcatcaccaagaaaacagaggtcggcatccagatcaatcatgacaatgtcgagccatcacgacgaccgagaccatgacgaaggacacagacgttgaatacccaaatacttgaggattacgctgaaccaacgtcatcacgatcgggaaaattgctctcaccgtaaggatcaactacgatgacaaaggaatcctagcttttacttgagatctgtatcgagtggattggccgactggtttcaaatcaagagggattgaaaagtacgatggcaagaccgtctaaaccctggccatttgtgcagtaggaggagacaacaaggcactggcgaattacctacctatggcactcgctgattcaacaaggagctggctaatggggcttccaaggcgatccattgattcctgaagagagctttgaagctagttcatcgtcaacttccaaggcacctacgagagacgcagtactcactttgacctataccatgttgttccaatatgtctcttttggactacatctgacatttctcggaggcccgcaacaagatcccgaaggtcactgacgatgttatcaccgctactttccaaaaaggcattcgagacaagttacttattggcaagttcaatcgcaagccttcgtgaatagtcatgaagctatttgagactaccaactcctacgccaaggcagtggacactgtcaatgcatcataggaggaaaagtagtcgggtagctattggcgcccctagaagaataataactcaacaaccagaaggatcgcaagcacaaacctgaagacttggtggccacaacatctaattagcaatcacaacgtcgtcccaaccactgcgataaggttatgaatgggcaatgcctaaatcacccgaactcaaagcacaggtggccaatgactgcgacaagcacaaaaagcgcaactcaagatcaccaatggcgaaggaacttctgggcaaaataaaaacaacggagaagggccttccaagatcccaggaccgagtgaaaccacatcttcggaggcccacccgcctacgaatccaaaaggaagcagaagtcgaccgatagggagatcaacaccatctagccagaagtaccccaatatttatggtggtccgaggtagcaatgatgttcgaccgctcggatcatcttggccgagtggctcacccggagtggtacatcctggtacaagatctagtggttcataatgttaagttgaagcgtgtcctcatcgacggtggcagcgcgctcaatatcctgttcaccaagacactggataagatgcagattccaagatccaagatgaagtcgagttctgctccgtttcatagggttgtccctatgatatcctcaatgctactcggccagatcagccttccagtcaccttcggactcggaataatttccagacagaatatctgctttgaagttgctgattttgaggcagcttattatgccatactgggaaggccagctctagctaagttcgttgtcgtcccctactacacctacttgatgttgaagatgccaagtcacaacgagttatctcattgcgtagcgacgtcaaacaagccgtcacctccgacaaggagagctgcgagatgacccaatctcatgggagggcactcgaccagcaagaggtctgactcgttgcatcaacatcacatgaaggtgaattgcctgccaagaagatactgaagtcaagagaaagtgatgccaagacaaagaagatcccacttgatcaagccaatccctccaagactaccaatagtaaagatatatttgcttggaaaccttctgatatacttggtattcctagagaggtgattgagcactcattaaatgtgaagactgacgcaaagcatatcaaacaacgactccacctattcgcacaagatcaaagagacgctatgaagaaagaacagagtaagcttctggcagctagattcatcaaggatgtttaccatcccaactggctagctaaccctgttctagttctgaagaagatgggacaatggtgtatatgcatgaactacacggatctcaacaagtattgcctccaagatccctttggattacctcacattgatcaagtcgtcgattcgacggccatcagcgaccttctcagctttcacgactgctatttgggatatcatcaaatcagcatgaaagagtctgaccgcttggagacctcgtttatcaccccgttcggagagtattgttacatcacaatgcctttcagtctgaagaattcaatagccacgtaccagcacatgattcagaaatgcttgcaatcatagcttgggcgcaatgtggaggcctatgtcgatgatgttgtcatcaagatgaaggagaaggataacttaatcgctgacttggaggaaacctttcaaaacatccgggtcttcagaatgaaattaaacccggagaattgctcctttgaagtagcatcagggaagctgtttgatttcatggtgtcacactgtggcatcgaagccatcccagaggaaatgaatggtatgcagaatatgaagccgccaagtacctagaaggacatccaaaaacacaccagatgcctgtcagctcttagtcggtttgtctctaggcttggagaatgaggcatgccctttttcaatggacacctaaagccaaaacctttgaagacttcaagaattttcttatgacaccgcacatgctagcttcaccatatccacaagagcccttgccactttatgtgtcagcaacttcgcatgttgtcagtgcagtgttggatattaaatgagaaggacacatccaaaaggttcagaggcccatttatttcatcagtgatgttttggctggctccaagacacgctatgcataggaccagaagctattacatggagttctgatcacagtccggaagtgggctaagtactttcaaagtcacttggatgccatggttagatcct

SEQ ID NO: 97630 - DNA, 528 bp, Oryza sativa
  Clone ID: PAT_MRT4530_95614C.1
tcagtagctacaacgacttccgaatttgagctttagtttttcttcgaagtcttcattgtcggtggcaccacagacaaagacgagcaagccggcatcacgagggatcaagaggaagcacgtgccaaagctgaggaggaacgctagtgaaggcagcaggatctgattagaagcggtcacattgcacacaacatcatccaaacccgcatagaagacagtaatgttttcgctacacctcaatagaacgctgtggtggccgtcacgttgattgacacccacatcgacaaagctccagaaaacatgactttgatgttgaataaggtcaagactatgatcgtcgccactgcagcccaacaagaaaatgatgccggagcttctcgccgaccgaaagaatccaatgctgactcccccaggactctggttggctgtcattagccctcgaatcatagatccaggggccacataaaacctgaatatagcagaggtcacaccgcttccatctagcatcaccaagaaaacagaggtcggcat

SEQ ID NO: 97631 - DNA, 405 bp, Oryza sativa
  Clone ID: PAT_MRT4530_95615C.1
atggcggccatgcatccgccattgacggggtcatcgtccccgtcattgtcgtccccgtcgctctcatcgtcgtcgtcgtcacgtagaagcagtggcaagccggcgcggcgctgcgccgtggcgagggagaggctgttttgcggtgccgagtatggccaccacgggccacatccatccacgtcgaagctacggccgcccacgtcatcgtcgtcaagcggccgccggcgtgggaggcttgccctcgatcagcagcgccgagtgccagacgggatccacctcatcgtcggtggcgacggcgagccacgcacccacatcattgaagagcgcacgcgcagctcgctcggcagtggcgggcgccgcgcgccactgtccatgagggagcggaagagaagacctggtgggtaa

SEQ ID NO: 97632 - DNA, 381 bp, Oryza sativa
  Clone ID: PAT_MRT4530_95616C.1
attagggaatgatgattaatttaactgttcactgttgtgcacaaaagagagccttttttattcatagtcatactgaagtaccgaggctatatactgcgcccaacattttaaaaaagagatgagcagagggctaatattgaacatcatctttacatgcctagaccctcttatatgcattaacgtaaatttacggggatgctggggcccaactaacggcctccctgacggaagcacttgatatttgggacccttactttgcgaagggcgcttacgctcctccataggatgataaaggtggaagtcgtcaaaaaccccagggaagaaatgaattcggccttgaggttttgcggggagccgctggacataaaccccaattggaat

SEQ ID NO: 97633 - DNA, 1973 bp, Oryza sativa
  Clone ID: PAT_MRT4530_95617C.1
cttcgtggtgttgttctgtgccggccgggtcagggggggccgccccgacgtcgccgccgcctggctgtcgctcctggccgccccggtgcgtctccacgccgccccggtctcgacttaccccgccgccgctgggccgcccggccggccagtccccgtgctgctcccggctcgcgtcctggcatctcccccgtctgctgcccctctcgaggctcctggccactcccagttccccagagtctgcatcgcggccgacgcctcgcctggtgaattctctcccagccccgagcgctccggcgcggaaggcacacactagcacgctccattggcatccatggcggctcctcctcctcctcgtcctcagcctcatgtcatggtgcttcccttccctgcgcaaggccatgtcatgcctctgatggagctctctcaccggctcgtcggcctcggcttcgaggtcgaattcgtgcacaccgacttcaaccgcgaccgcgtcatcaacgccatggcgaacgagacgggggcgatccctgatgggatccacatggtgtccttcccggacggcatggaccctgccggtgaccgtgccaacatcgccaagctgggtgacggcttgccggccgccatgctcggcggcatcgaggagatgatcagatcggaggggatcaggtgggtgatcgccgatgtgtccatggcctgggtgacggagctggccgccacggtgggtgtccacgtcgccttgttctcgacttactccgccgccgttgtggcgcacaggctgcaagtccccaagctgatccaggatggcgtcctggacgaaattgggaatgtgaggagaaacgagatgatccaattgagacccacgatgccgcccgttctagcagtcgagctcccctgggttaccctgagcggcacgccggacgggcgcaggatggtcatccagaacgtgttcaagaccaacccgacaatatcctcggccgaggtcatcatctgcaacacgttccaggacatcgagccgggggcgctggccctcgtccccaacgtgctgccggttggaccgctcgaagcgccggcgacgtcgaggttagccggccatttctggccggaggacacgacctgcctggcatggctcgacgaacaggacgcctgctccgtcgtctacgtggcgtttgggagcttcaccgtcttcgacatggcgcgggtccaagagctcgccgatgggctagtgctttctggccggccattcctgtgggtgatcaggcaaaacttcaccaatggtgccggcgaaggctggctggaggagttcaggcaccgtgtcagcggcaagggaatgatcgtcggttgggctccccagcagagcgtgctctcgcacccgtcgatcgcatgcttcgtgtcgcactgcgggtggaactcgacgatggaagggctccggcatggtgtgccgtttctgtgctggccgtacttcgccgaccagtactgcaaccagagctacatatgcaatgtgtgggggactggagtgaagctccaggcggatgagcgaggggttgtcaccaaggaggagatcaagaacaaggtcgagcagctggttgacgacaaggagatcaaggcgagggcagcaaagtggaagcatgcggcatgcacaagcatagcagagggagggtcctcccatgaaaacttgctgaagtttgtgaatttgctaagagaacagtagtgtctaagattgtcaaaattgttctgaaaattgaaaggtcagaattaatcattgaggtgctttggcaaattcatgggactggaagtataccttctcttttttttttctgaaaagtgtaatagatgaatcaccagtgctactgctaaatgtaatgcaatataataaaaactactacctctgttttcaaatataagcatttcaggctatgcaatgtatagccagaaatgcttatatttgcaaacggataaatactgtttttcagatggcc

SEQ ID NO: 97634 - DNA, 2397 bp, Oryza sativa
  Clone ID: PAT_MRT4530_95618C.1
ctactttgaatatgggttgcctgcaatagcttgaagtagtcgtggcactgggggtatgccaacttcaagaagaccttcgagatattgaacaacttcactcattgtaggtcgatcaagctcattatcttgaatacaccagcatgcaaccctgaaagctctttctacctgctccaaatcaacatcgccatgtaaattttggtccaccaaactcccagcattaccatccagcagcttatgtgccactaacagagggaaatattcatagtcatcacgagttgcaaattctttgcttgagttcctcgttcctgagatgatttccagcaaaaccattccatagctgtagacatcaacctttgatgtaataactgtaccactaatccactcaggtgcaagataccctatagttcctcgcattgtagtgagaacttgagtaaactcccttcccagaaactttgccatcccaaaatctgcgatttttggaacaaatgatgcatcaagaagtatgttctctggtttaatgtcacagtgtataatgcaatcctggcaactatcatgaaggtaagctagtcctctagcaactccaagagcaatttgataccttatgctccatttcaagactgtagcgtcattgtgaaataaatgggtatcaagagagaggtttggcatgtgttcatagacaagcaatcttctatcaccctcacaacagaaaccaattagtttaactaaattgatgtgttggatgattccaattgatcctacttcagctctgaattgcttctctccttgacgagcaccatcaagcctttttactgctatgacagtagactcattaagaagccctttgaatactgagccaaaaccacctgcccctagcttatctgaaaagttttttgttgcatgttgcagatcagcatatctaaatgcaataactccactaccactatgaaaattctttcttctgtgaccaagcagccaactcttgttccttgggatcttcgctatcaagaagagtgccaaagcaaaggaagcaacacttgcagtgatggcaacgccaatgaatattgatcgtccactgctttttatactttgcacctctttggcagcaaggcgaaggtaaagaattgctccatcagtattagcaatatcaccacattgtagctgtttcacattaatcaattcatcattccaaacagagcatccagtattaccatagtaatatgctgtgcaagtgcagttgctcaggcaaatttgtgcacatccacctgcacttgtaacatcttctatgatttggccattactgggtaatccaacacacggcatagggtggaacctgtcttgcatactggtgtttctgtttataccacagtctaatggagtatttctcacacagccgcctgttcgatcatctagctcccagtcattgggtgatcgtacagagaagcccttcatacacttgcagataggaagcttgctctcttcgcagactgtgaaagctccacaaatgccatacacatcacactgctttgggttggtgtaggttggtacccaatcttgcacatgctccacccacaaaaatatcttggtctgaccagagatgtccagcataaaacgcatgatcgttgcgttatctagtaaggtatatgtgaagtacacttcttcatcattgttgacaaaagtaaaatcaattaagcgttgacctgtcatctctggtatggaaccaaagtaatgtccgttccattctccactagaccaatatggtatagaggagttgagagctgcaaggatgaacctggtagaaccattgttgtcagttaactcgtaactgtacatgccagaagctgggtctacagagtttttcctggaaacaagacggcggtttaagccagtgaccttgttccggcctagcttcgcaccggcgagatgggtatttgttgggtagtcaaagctttgccacaagacaaccgaagaatttgaggtgttctgcaggacaaggttgccattatccaatagcttgaccattgttgtgtttgctgtgatgtcagcttgggttgaccagaagatggactttgtggcctgatctaagatgacaaggtttccgtcaccggagattgtggcctccggcgaagtggggccagtgacaggctcatctccattggcaacccatgctggagtgagctttggcacctggttgaaccatatccccaggtaccagtttgaagcattgtgggaggacttactgctggttgggaagaagccaagcgcaaacttgccgttgctggagacaagtatgtcattgccggcgagtgtctccccagctgagatggtgtctgtcaccttgcaggatgcaggaatgtgcagtgtgaagaggaggaacaggacagtgatgggaagagccat

SEQ ID NO: 97635 - DNA, 363 bp, Oryza sativa
  Clone ID: PAT_MRT4530_95619C.1
atgatcatcatgccacatatcctcgcaaacaacagctgtccgctttgtccatttcagcagcatgcatactggtgccagccaacgagccagcagcagaccgacgcaaacgggtactgtacgtgctgtggcgaggaagcagggtgggccctcgacgcaaacggcatgggccgtgcatggggcacgtacgacgcagacgcgcacaataattcccgtgtccccgaccgacgcgcccatgcacgcatcggggactcggggtcgacgactccggcggtgcgcatttgtggcttctactgcaatattgccgatccatcgatcggtagtcggattataaagttttggcgtgtcacatcgggtattatatag

SEQ ID NO: 97636 - DNA, 1666 bp, Oryza sativa
  Clone ID: PAT_MRT4530_9561C.1
ctccgccttccccttcccgctctctctctctctcccacgtgagcgcgaggcggcggcggcggcggcgcgaggtgagcggggcaccagcggcggcggaggagatggggaaggcctcgaaggggtcgcggagagggaagaaggcgtggcgcgccaacatcagcaccgacgacatcgaggacttcttcgagaagcagacgcgcgacgcgcacgccggggccgccgccatcccgtccctgccctccgactccctcttcttcgtcgacaagccggcctccgccgcgtccacctcctccgccgccgacgccgccgcggcggatgtcgcccccaaagatattcctgtccaaaggaagattgagaagaagagagagaaggttctatatcatgagagtgtattgaagcggaatccatatgtacaaccagtcccgtcttctttaacgacaaagaaggataagaagaagtcaaagaagaaggaatcgaaagagacacaggaagcgaaaattgttcccatggaagatgattcaggtgataagatccttgacatctggggtgaagatgttaaaggagatcacaaggctaaaaagaggtctaccgcatctgtgattcctgctgttgaagttgaggccccaggatgttcatttaatcccccattcgaagcacatcaggattctcttgctcaagctgttgctgatgagatgcgtaaaatctacacgaaagagttagggcccaaacctgtgccacttattgttcctggtgaagcaatcactgaagaagataaattttttcttgatgcggatgatggagatgaagctgttgaagaaggtgatgaagaccaggctgctgatgctttggctgttcagaggaaaactaaaacgaaaagagttacaagagtagaactgaacaaaagagctcgtcgtaaggagaggttaagagcagaagctgaagcaaagaagatggaaaatctttcaaaggaaatagatagcctgcctgatataataaatgaaattgctaaagaagatgaggaaaaggagaaaaggcacataaggcgaactgtggctaaacaggaaagactgaagtcagccccgcctcgtctgggcagacacaaatttgaaccagctcctgttcaagttctattaacagaagtgattagtggctctctttttaatcttggataatgctgtaatctagcaagggaccgatataagagcatcgagaaacgtggaatacttgcaccaagcagaaaaataaggaagcaacgctagaaatgccacctgtgcatgttccagtacaaatgattccagtacaaatgaggaacatggcgatcccagacgtggagcgtcttgaacaacatcaaggaacaggcgctgtggaggcattggagagcgctcacaaggctatggaaaatcgtactcttcaaacagatctgacgaagccaaaattgcttcggaagtttagacggatagtttattctctttatattcgagtttttaattgttacaagttttgtagtgccagggcaatgctcaatcgttgaattgtcctctgaattgcctgaggcaaagttttggaacgtcgaactataaatctcttattattgtaaactactgttctacttgtttatgtaagatatggctcaattttaccatctctaaaaaaaaaaaaaaaaaaa

SEQ ID NO: 97637 - DNA, 1092 bp, Oryza sativa
  Clone ID: PAT_MRT4530_95620C.1
atgggggcgctgcggcggtggctgccgtgctgctgctgctgctgtcgcggcggcggaggaggtggtggtggtgggagcgtgggggatgggctggtgtgggacgtggccctgaaggcgcacgcgtcgggggactactccgtggccgtggcgcaggcgaacgaggcgctggaggaccaggcgcaggtgttcgtctccccggcggcgacgctcgtcggcgtgtacgacggccacggcggccccgaggcggcgcggttcgtcaacaagcgcctcttctccctcatccaagagttcgcggcgcagagcggcggcatctcggcggaggtgctcgagaaggcgttcggcgagacggaggaggagttcgtggcgtcggtgcagaggtcgtggccgtcgcagccgaggatcctgacggcacgtgccgccggcgccgcccacggccgcaagggcaagaacagggtggttcccgagcgcctctccagggaccacaacgtcgccgacgaggacgtccgccgcgagctcaaagagctacaccccgacgactcccacatcgtcctcaacacccatggcgtctggcgcatcaaaggaatcatccaggtgtcgaggtcgatcggcgacgtgtacctgaagaagccggagatatgcaagagcaacccgatgctgcagcagacgatctgcccgttcccgctgcggcgaccggtgatgagcgcggtgccgacgatcaagacgaggaagctgaggccaggggaccagttcgtgatcttcgcgtcggacgggctgtgggagcagctcaccgacgaggcggcggtggcgatcgtggccgggagcccgagacggggcgtggcgatgaggctggtcagggcggcgcagctggaggcggcgaggaagaaggacgtgaagtacgagaggatcaggacgatcgagaaggggcagaggaggcacttccacgacgacatcaccgtcgtcgtgctcttcctcgacaagtgccgcggcaaggccggccgcggcgacgagatcgacggcaccgacggccccgtcgacgtcttctccctcagccccgacgaccgggaggacccgaccaggccagtgctccgttga

SEQ ID NO: 97638 - DNA, 1694 bp, Oryza sativa
  Clone ID: PAT_MRT4530_95621C.1
atgggggcgctgcggcggtggctgccgtgctgctgctgctgctgtcgcggcggcggaggaggtggtggtggtgggagcgtgggggatgggctggtgtgggacgtggccctgaaggcgcacgcgtcgggggactactccgtggccgtggcgcaggcgaacgaggcgctggaggaccaggcgcaggtgttcgtctccccggcggcgacgctcgtcggcgtgtacgacggccacggcggccccgaggcggcgcggttcgtcaacaagcgcctcttctccctcatccaagagttcgcggcgcagagcggcggcatctcggcggaggtgctcgagaaggcgttcggcgagacggaggaggagttcgtggcgtcggtgcagaggtcgtggccgtcgcagccgaggatcctgtccgtcggctcgtgctgcctcgtcggcgccatcgaggacggcacgctctacgtcgccaacctcggcgactcccgcgccgtgctcggccgccgctctgccgccggcgccgcccacggccgcaagggcaagaacagggtggttcccgagcgcctctccagggaccacaacgtcgccgacgaggacgtccgccgcgagctcaaagagctacaccccgacgactcccacatcgtcctcaacacccatggcgtctggcgcatcaaaggaatcatccagatcaagctgctgatcgatgcatatgcaggtgtcgaggtcgatcggcgacgtgtacctgaagaagccggagatatgcaagagcaacccgatgctgcagcagacgatctgcccgttcccgctgcggcgaccggtgatgagcgcggtgccgacgatcaagacgaggaagctgaggccaggggaccagttcgtgatcttcgcgtcggacgggctgtgggagcagctcaccgacgaggcggcggtggcgatcgtggcccgggagcccgagacggggcgtggcgatgaggctggtcagggcggcgcagctggaggcggcgaggaagaaggacgtgaagtacgagaggatcaggacgatcgagaaggggcagaggaggcacttccacgacgacatcaccgtcgtcgtgctcttcctcgacaagtgccgcggcaaggccggccgcggcgacgagatcgacggcaccgacggccccgtcgacgtcttctccctcagccccgacgaccgggaggacccgaccaggccagtgctccgttgatcgacggcggccggagcttcaattccagccgccgccggtggtgtgtgtacgtacatacgactgttcttggttctttaatttgctccccaaatcgaggtttgcatttggcgcgaaattggccgtttcagccagaaaggtttggttttttaagttgccagttgccacgcaggtctggtgttcatcaccctcaaatcgttttctggttcaaagcttcaaaattcaatttgttttggttggttttctagaaataatgctgcaaccacttcatcggagagaactacgtgtaatttagttgtgaagagtagacagtagtagtactgtagtagtgtcgtgtcttgtaaattctaaacataacaagttgctcaagcttctccattggagagaggcatccaaatttgttaaaaaaaaaattctgttagtgttcttgaatgcagccaagccaaccaaagcagacattgggtctcacaaaaaaaaaaaaaaaaaaaa

SEQ ID NO: 97639 - DNA, 224 bp, Oryza sativa
  Clone ID: PAT_MRT4530_95622C.1
cccaacggatgagaaacctagcgaaaatctcgtccttgcggcagtacctctcccctcctctgatccctgctggtcttgatcttgtgatccaattccccaccaacatcacggctaccgattaaggactgcaaagagtacgtcctacggcacggagaaggggcataccctgaaggaggccgcccagcacatcttctgggaccatgtgctggccacatcatgggcag

SEQ ID NO: 97640 - DNA, 438 bp, Oryza sativa
  Clone ID: PAT_MRT4530_95623C.1
atgaacaccgacgccgcccggagagcgaggagaccgacgcggtggcatggatccggagcgccggcggtcgaggaggccgaggcggcagcgtggatccggagcggcggcggaggcggcggcggtcgaggaggccgactcgacgacggcggcgacatggatctggagggcgtcgacgacgacaactcgacgacggcagcacggcagtgggatctggagggcgtcgacgacgatgactcgacgacggcggcggcacggcggcgaccccggctctcctctcctcccatgcccagcgtggtcgtcctcgcttccgagaccgcaaccgacgacatcttcccgccaccaccgtcgcacttctcttccgcccatcctctggcttctccccttcctcaccggaggctggactcggtagcgcggccggtgagctacaagcccgtgtga

SEQ ID NO: 97641 - DNA, 181 bp, Oryza sativa
  Clone ID: PAT_MRT4530_95624C.1
gacaagctcgttctctcggccatcgtgctcgccgtcctggccggcgtgttggcagcggggatgggctacggcgacgtccgcgagtactgccgcgtgcggaaggctgtatctcgaaacctcggcccgtcgtgccggaactacatcgagcgttggtgcgccgacgccgggggccgaatggact

SEQ ID NO: 97642 - DNA, 261 bp, Oryza sativa
  unsure (1)..(261): unsure at all n locations
  Clone ID: PAT_MRT4530_95625C.1
cagattccccagaggggttagcgggatttgtgtttggcacaatgagnatnccccagggtctcttcccataccaaaatgaatcacatcaaaacttctggccacttcagatctggcggggtgtttgtaggcacttggacttcttgggacttgtgntgcaatccaacatggcgacttggcctctgcattgtttgtgccccacaatcgtgtgggaccaatcatngggccacccattttatttgtcaccagggtgtccagcatatc

SEQ ID NO: 97643 - DNA, 519 bp, Oryza sativa
  Clone ID: PAT_MRT4530_95626C.1
atggcggagaaccccctgcttgatgaggtggtcgccatgtacttccacctcgtcgacaaccccgacgacgccagggccctgctggacgacgcgcacttcaacgccgcggagaacgaccacgagatcgccatggtggggattcagctccgccatatccagcaccagacgaacgagctcatgacccagcccatgaccgacgcggagcgggaggcgcagcgcgtccaactcgaggaggactaccgcggcatcaaggtggacgccgatttcctcctggagaaccgcaggcagctgcgccaagtcgtcaagatgctcgtcttcatctggacctacgccatcatcaggcgcgccttgcggcgcttcctccccgccgtggccctcacgttcgtggccggaaccgccgccttggccgtctacgtcgagttgaggcgcggcggcacggtgcccgcgttcgaggccctcgggaggatcttcacctggctgacgtccttcttcctcttgggctatcgggttcgcctctga

SEQ ID NO: 97644 - DNA, 110 bp, Oryza sativa
  Clone ID: PAT_MRT4530_95627C.1
caaaggcgagagacatcgtccaggttatgtatatcacccacagtttcaggtgtgatacatacagatgtcacaacatatttttaagctgcgtaccacttgactgctaaaac

SEQ ID NO: 97645 - DNA, 114 bp, Oryza sativa
  Clone ID: PAT_MRT4530_95628C.1
atgagccagccagcggacgccccaatcccactgcctctccgtagcgagccacaggcgaacgcgtcgagcgacggctccgatttcatcagcaacaacctcctcttgaacggcctg

SEQ ID NO: 97646 - DNA, 4329 bp, Oryza sativa
  Clone ID: PAT_MRT4530_95629C.1
atgaagctaattctcatggtagccttccaggctatgagcctcatctccatatcaactgcaagtctgcagtacaatttctacggctcgtcgtgcccaaatgccgagcagacgatcagcaatgtcgtctacggcttgatcgatgctgacccttccatggccccggcgctgctgcgtttgcatttccatgattgctttgtcatgggttgtgatgcgtccatccttcttgatcccacgaaggcaaacggctcgccggagaagacagcgatcccgctccgcgggtacgacgccgtgaacaagatcaaggcggccgtcgaggccgtctgccccggcaaggtctcctgcgccgacatcctcgccttcgccgcccgcgactcggtggccaagtccggcggcttcgtctacccggtccccgccggcagccgcgacggcaacgtgtcgtccgccttctccgtcttctccagcatcccgtcgccgttcttcgacgccggggagctcgtccagagcttcgccgccaaggggctcaccgtcgacgacctggtggcgctctcgggtgcgcactccatcggcaccgcgcactgctccgggttcaagaaccggctgtacccgacggtggacgcgtccctggacgcgagctacgcggcggcgctgagggcggcgtgccctgacggcagcgccgccgacgacggcgtggtgaacaacagccccgtgtcgccggcgacgctgggcaaccagtacttcaagaacgcgctcgccgggcgggtgctgttcacgtcggacgcggcgctgctgaccggccagaacgacacggcggagaaggtcagggagaacgccggcgacctgaccgcgtggatggcgcggtttgcggcgtcgatggtgaagatgggcggcatcgaggtgctcaccggggcgcggggggagatttttgggatagcacttggattcaatcttctatttgaatatgatgatctcatcactgggatatgttttgcaaccgttgttcctaatctgctaccatatgctatatcacacctgggaaagaagatggtggggacattaaatgcttgcattgcaggctttgcgcttctttgctacgttcttggtttattggtcagccaaccacaaattcctctgacaacgaatgtaattttccccaagctcagtggtgaaagtgcttattctctgatggctcttcttggtgcaaacgtaatggcacacaacttttacatccattcatcagttgttcagggtcagaaaagatctgcctttgccgttggtgccttatttcatgatcacttgttttcagtattatttatttttactggaatttttctggtgaatcatgttctaatgaactctgcagcagctgattccactaacacccttcttctcaccttccaagatgttgtagaactaatgaaccagatatttgtaaaccctatggctccaactatatttctagtggttcttctcttctctagccacatcatctcgttgacatctgctattggtagccaagtgatttcgcagcatttgtttggcattaatcttcctctctctggacatcatctgatactgaaggcttttgccatagttcctgctctgtactgtgctaaggttgcaggtgctgaaggaatataccaattactgataatctgccagattatccaggccatgctccttccatcatcagtcgtgccactcttccgtgttgcctcatcaagattgataatgggtgcccacagagtgtctttgcatctggagatattaacatttcttgcatttctcctcatgctgttttcgaatatcatctttatggcagaaatgctgtttggtgacagtggttggctgaacactctgaaagggaatactggaagccctgtggtgtttccatctacggttctcatcacggtggcttgtgtctctgttgcattttcactctacatggctgttacaccactgaaatcaggaagccatgaagctgaattgcagcaggaatggtctgtgccttctcagaaagagctcttgaatactactcaagacagagaagagacttgtgcgggcaatgttacctatgaggaagatcagagatctgatgttgtcccttctcctaggattcagcctgtggattgtctgaaatcagctctggactacattgatagttcggacacagctatagaatctgatcatgattctcaacattccactgctcatacatctaccgctcctgaatcctgtcactctccatcattcattcctgaagagtcaaaatcagttgttgctgttgactggccagagcctctggagccaatttctaatgctattgtggctgaggaaagtacagtagagagtgtggactccaagagcacaggcgaaagggatattgaagtagaaccagctcttttgatggacaatgataaggaggctccaaatattctagagtctgacaacaagtcacttggaggcaataatccttcctgtgcatcggatgatggcccaccatctcttaccttcagcagggggaaaggctcagatgcaggcaatggcagcgggagtctctcgaggttatctggtttgggccgtgcagcaaggaggcaactagcagccatacttgatgagttctgggggcatctctttgattaccatgggaaactcactcaagaagctagctctaaaaggtttgacatcttgcttgggctagacgtaagaacacctagctcaactgtaagagcagacagtcaagctaatgaaatcccgaagagtcccatggtacgagacaatttacaagggtctgccttcttgggaagttcaagggatctgatgtctactaagaatgagatgtcgaatttggatctgacatatgggcttcagatgggcaataacattgggtcatcagcctggtctcagggcatgcagttaccaagtacccaactgcagagttcaagcaacagcttactcgatcaaggtgcaagattaaattcaaattttagcacgccatcatacgcagacaacaaccaattctaccaacctgcaacgattcatgggtatcagctcgcatcatacctaaaacagatgaatgctaatcgaaatccttactctagcatgccattggacccacagcgacttccaaaatcttctgcatcggctgtgccaacctatgtcgattctgtcatgcatgctcgtaaccagaacttgcttgcttcattgggagctactccttcacagatcgcagcaacatcccggatagcttactcaaagaagtaccacagctcaccagacatatctgcactgattgctgcaagcaggagtgctctgttgaatgaatcaaagttgggtggtggtaccattggatcccagtcgtaccttagcaggcttgcatcggaaagatctcagtatacaaactcggtggccaggcctgcagctcccttggcgtttgatgagctctctccacctaagctcccaggggatatcttctcaatgcaacaaagcccaaacccaagtgcaagatccctttgggctaagcaaccttttgagcagctgtttggtgtgtcgagtgcggagctcactaaaagcgagttcaaccctgcaggcagatcgggtggcatgaccaaggatgatttctcttacaaggagtctgaggcgaagcttcttcagtctcttagattctgcatctcgaagctcctgaagctagaaggatcagggtggctgttcaagcaaaatggtggcagcgacgaagatctgattgatcaagttgctgcggtagagaagctattgcaacaaggaaccagtgacaaccaactgctgcttggtgatactcagcaaccaccatgtgataaggcagacatccagtacatgcgcgtactgcctaactgcggagacgactgcatctggcgcgcctccctcgttgtcagcttcggtgtctggtgcatccgccgggtgctagacctgtctctggtggaaagcaggccagaactttggggcaagtatacctatgttctcaaccgtcttcagggcatcctggatcctgcattctccaagcctcggagtgctctcagcgcgtgtgcgtgccttcacagagatatccgggtgctcaacagcctgcgccacagtagcctggtagcaacaaactccattccaaggcaaatccgaggttccttcaccaccgcatctgtggtcctggagatgatcaaggatgtggagaccgcagtctcagggcgcaagggcaggagtggcaccgcagctggggatgtcgccttccccaaggggaaggagaacctggcctccgtgctgaagcgatacaagcggaggctctcgagcaagggacaacaataa

SEQ ID NO: 97647 - DNA, 311 bp, Oryza sativa
  Clone ID: PAT_MRT4530_9562C.1
cccacgcgtgcgtttaacttttgaaaacacctttgcaatgagctgtaaacacaacattatagagcacttcctttaggaaagataagcatatgcaaactgatacggatttcatggctgaaatcttgacttgcgaacatcgctctttctttgatggatctctgacgagaagaagagcaacgcatagagagatactcgaatggttgtttgaactttatattcaccattgcaagttgacaaagccatcgagagggccataccgattacgggagcgcaacccattgacttggatcgcccatcaagggaagagctga

SEQ ID NO: 97648 - DNA, 1941 bp, Oryza sativa
  Clone ID: PAT_MRT4530_95630C.1
ttagctgttggtggcgttgcagaaccccctgacctccccccgcgccccggtgagcacctcgatgcctcccatcttcaccatcgacgccgcgaaccgcgccatccacgcggtcaggtcgccggcgttctcccggaccttctccgccgtgtcgttccggccggccagcagcgccgcgtccgacgtgaacagcacccgcccggcgagcgcgttcttgaagtactggttgcccagcgtcgccggcgatacggggagccggttcttgaaccccgagcagtgcgcggtgccgatggagtgcgcacccgagagcgccaccaggtcgtcgacggtgagccccttggcggcgaagctctggacgagctcgtccgcgtcgaagaacggcgacgggatgctggagaagacggagaaggcggacgacacgtcgccgtcgcggcggccggaggggaccgggtagacgaagccgccggacttggtcaccgagtcgcgggcggcgaaggcgaggatgtcggcgcaggagaccttgccggggcagacggcctccacggccgccttgatcttgttcacggcgtcgtacccgcggagcgggatcgctgtcttctccggcgagccgtttgccttggtgggatcaagaaggatggacgcatcacaacccatgacaaagcaatcatggaaatgtaaacgaagcagcgctggggccatggaagggtcagcatcgatcaagccgtagacgacattgctgatcgtctgctcggcatttgggcacgacgagccgtagaaattgtactgcagacttgcagttgatatggagatgaggctcatagccattaattcagcaacctttgcaagatctttacatccaagaaattctttacttctcctaacattgctaataaaatttccaagttgagttcgtagtagcataagatcaccaaccaaaaaatcttcagcataaatttcagcaagcctcacaagcttatccacatcaaaattggagaaggaattccgtggattaagagatgacatgcatactaataactctgaactaacttcactaaagcgatggttcatttcaaccaaaatggcatcaatggatctctcaatatgttgaagaccaagaaacctctccatcacctttccttcatcattcacaaacctcaagatgacacccatttgctcctttattgatacatctcgagactcatcaataagtacagagaaatttctatttccaatctcatccataataactgccgtcactttttccttgctaagggaagtatcagactcatcatgtccacgaaaagcatcaccttgttcaatgagaaacccaatggccaatgcaaagtagcagtctagcagactagcagtggcctgcccggctgcccctgtgctgtggctgtgcccaactgcccacggcgttgccggcgccgctggccgcttgcggcctgccgcctgcccgcccgccttgcggcctcgctgggagctgggcagctggcagtcgagtcgccggcgcgccgcctcccctacggcgcggcggcgctttcccgccggctggcccgcgcggccgcgcccgcctcctgtccgccctgcccgcccgccttgcggcctcgctgggcgctggcagtcgagtcgccggcgcgccgcctccccgacggcgcggcggcgctttcccgccggctggcccgcgcgcccgcgccagcctcctgtcccgaccccgccgcggcgccgcgccgccgcctgcggcacgccggtgtagccgcgccgtctccactcgccggatccactcgcctccactcgccggccgcctcccgtcgcccccgtcagccgtcgccctccgcgcgccgccgcgccgcccagcgccgcccactcagaggtggtcgtgggctgtctttcctttatatttttggcccaaatcacgaatttctcttcctccagcccccacat

SEQ ID NO: 97649 - DNA, 457 bp, Oryza sativa
  Clone ID: PAT_MRT4530_95631C.1
tatcaggtgtgatacctatcaggtatcagacgattctacacacgtttcaggtgatacttgcaaagtatcatgtgatacctgtaaggtatcagacgatttctaccacgtatcgcgtgatactcgcgaggtatcatgttaggtatcagacaatttctactatgtatcgggtaatacaaacgaggtatcagatgatacttacgaggtatcaggggttcggggcatgggacacgtgggcgcgggcgggacaggtggctaggtacggcgacgccgacggtgggtacgggtgtggtgacgccggcaggggatggggatggcgtcggcgggggacgggcccgccggcgaggtccgttgacggcgacggtggggaacgggcgtggtgacggtgggggacgggcgcgcattgatggcttcggccacgtcgcatgggtgagaatcgcgtttgcggaggaggagcatc

SEQ ID NO: 97650 - DNA, 4860 bp, Oryza sativa
  Clone ID: PAT_MRT4530_95632C.1
ttttttttttttttcgagttttttttggaaatctggcaaaagctttttctcagtcttggcatcctctctgaagagagattacacagggcattcattcagtttgtcaatgacccccaaaaaaaaggttaaaatgcagagactaaactttacaatggtgcatcagctgactacatctgttgtacattttggtggttgttcttctggcacatgaacagttaccattatacaacacatcacatgcaaaaaagaaaaaaaagaaagaaataaaaaaaaacgaaatatgatggaagggaccagtaagtgttggccaattcctctaggtccctgcaaacgttgtgcaacgaataatatccaggcctcagggagggcagagccaccttggctggctgcctatcctggaagatcaatggtctaagtccccctagaacccgacaggatcacgctgcccagatgcctttgttattgttgtcccttgctcgagagcctccgcttgtatcgcttcagcacggaggccaggttctccttccccttggggaaggcgacatccccagctgcggtgccactcctgcccttgcgccctgagactgcggtctccacatccttgatcatctccaggaccacagatgcggtggtgaaggaacctcggatttgccttggaatggagtttgttgctaccaggctactgtggcgcaggctgttgagcacccggatatctctgtgaaggcacgcacacgcgctgagagcactccgaggcttggagaatgcaggatccaggatgccctgaagacggttgagaacataggtatacttgccccaaagttctggcctgctttccaccagagacaggtctagcacccggcggatgcaccagacaccgaagctgacaacgagggaggcgcgccagatgcagtcgtctccgcagttaggcagtacgcgcatgtactggatgtctgccttatcacatggtggttgctgagtatcaccaagcagcagttggttgtcactggttccttgttgcaatagcttctctaccgcagcaacttgatcaatcagatcttcgtcgctgccaccattttgcttgaacagccaccctgatccttctagcttcaggagcttcgagatgcagaatctaagagactgaagaagcttcgcctcagactccttgtaagagaaatcatccttggtcatgccacccgatctgcctgcagggttgaactcgcttttagtgagctccgcactcgacacaccaaacagctgctcaaaaggttgcttagcccaaagggatcttgcacttgggtttgggctttgttgcattgagaagatatcccctgggagcttaggtggagagagctcatcaaacgccaagggagctgcaggcctggccaccgagtttgtatactgagatctttccgatgcaagcctgctaaggtacgactgggatccaatggtaccaccacccaactttgattcattcaacagagcactcctgcttgcagcaatcagtgcagatatgtctggtgagctgtggtacttctttgagtaagctgatgaaccagcattttcattcccgtcaagagtggaagggacataataggatctttctgccatcatagtacctatccgggatgttgctgcgatctgtgaaggagtagctcccaatgaagcaagcaagttctggttacgagcatgcatgacagaatcgacataggttggcacagccgatgcagaagattttggaagtcgctgtgggtccaatggcatgctagagtaaggatttcgattagcattcatctgttttaggtatgatgcgagctgatacccatgaatcgttgcaggttggtagaattggttgttgtctgcgtatgatggcgtgctaaaatttgaatttaatcttgcaccttgatcgagtaagctgttgcttgaactctgcagttgggtacttggtaactgcatgccctgagaccaggctgatgacccaatgttattgcccatctgaagcccatatgtcagatccaaattcgacatctcattcttagtagacatcagatcccttgaacttcccaagaaggcagacccttgtaaattgtctcgtaccatgggactcttcgggatttcattagcttgactgtctgctcttacagttgagctaggtgttcttacgtctagcccaagcaagatgtcaaaccttttagagctagcttcttgagtgagtttcccatggtaatcaaagagatgcccccagaactcatcaagtatggctgctagttgcctccttgctgcacggcccaaaccagataacctcgagagactcccgctgccattgcctgcatctgagcctttccccctgctgaaggtaagagatggtgggccatcatccgatgcacaggaaggattattgcctccaagtgacttgttgtcagactctagaatatttggagcctccttatcattgtccatcaaaagagctggttctacttcaatatccctttcgcctgtgctcttggagtccacactctctactgtactttcctcagccacaatagcattagaaattggctccagaggctctggccagtcaacagcaacaactgattttgactcttcaggaatgaatgatggagagtgacaggattcaggagcggtagatgtatgagcagtggaatgttgagaatcatgatcagattctatagctgtgtccgaactatcaatgtagtccagagctgatttcagacaatccacaggctgaatcctaggagaagggacaacatcagatctctgatcttcctcataggtaacattgcccgcacaagtctcttctctgtcttgagtagtattcaagagctctttctgagaaggcacagaccattcctgctgcaattcagcttcatggcttcctgatttcagtggtgtaacagccatgtagagtgaaaatgcaacagagacacaagccaccgtgatgagaaccgtagatggaaacaccacagggcttccagtattccctttcagagtgttcagccaaccactgtcaccaaacagcatttctgccataaagatgatattcgaaaacagcatgaggagaaatgcaagaaatgttaatatctccagatgcaaagacactctgtgggcacccattatcaatcttgatgaggcaacacggaagagtggcacgactgatgatggaaggagcatggcctggataatctggcagattatcagtaattggtatattccttcagcacctgcaaccttagcacagtacagagcaggaactatggcaaaagccttcagtatcagatgatgtccagagagaggaagattaatgccaaacaaatgctgcgaaatcacttggctaccaatagcagatgtcaacgagatgatgtggctagagaagagaagaaccactagaaatatagttggagccatagggtttacaaatatctggttcattagttctacaacatcttggaaggtgagaagaagggtgttagtggaatcagctgctgcagagttcattagaacatgattcaccagaaaaattccagtaaaaataaataatactgaaaacaagtgatcatgaaataaggcaccaacggcaaaggcagatcttttctgaccctgaacaactgatgaatggatgtaaaagttgtgtgccattacgtttgcaccaagaagagccatcagagaataagcactttcaccactgagcttggggaaaattacattcgttgtcagaggaatttgtggttggctgaccaataaaccaagaacgtagcaaagaagcgcaaagcctgcaatgcaagcatttaatgtccccaccatcttctttcccaggtgtgatatagcatatggtagcagattaggaacaacggttgcaaaacatatcccagtgatgagatcatcatattcaaatagaagattgaatccaagtgctatcccaaaaatctccccccgcgccccggtgagcacctcgatgccgcccatcttcaccatcgacgccgcaaaccgcgccatccacgcggtcaggtcgccggcgttctccctgaccttctccgccgtgtcgttctggccggtcagcagcgccgcgtccgacgtgaacagcacccgcccggcgagcgcgttcttgaagtactggttgcccagcgtcgccggcgacacggggctgttgttcaccacgccgtcgtcggcggcgctgccgtcagggcacgccgccctcagcgccgccgcgtagctcgcgtccagggacgcgtccaccgtcgggtacagccggttcttgaacccggagcagtgcgcggtgccgatggagtgcgcacccgagagcgccaccaggtcgtcgacggtgagccccttggcggcgaagctctggacgagctccccggcgtcgaagaacggcgacgggatgctggagaagacggagaaggcggacgacacgttgccgtcgcggctgccggcggggaccgggtagacgaagccgccggacttggccaccgagtcgcgggcggcgaaggcgaggatgtcggcgcaggagaccttgccggggcagacggcctcgacggccgccttgatcttgttcacggcgtcgtacccgcggagcgggatcgctgtcttctccggcgagccgtttgccttcgtgggatcaagaaggatggacgcatcacaacccatgacaaagcaatcatggaaatgcaaacgcagcagcgccggggccatggaagggtcagcatcgatcaagccgtagacgacattgctgatcgtctgctcggcatttgggcacgacgagccgtagaaattgtactgcagacttgcagttgatatggagatgaggctcatagcctggaaggctaccatgagaattagcttcat

SEQ ID NO: 97651 - DNA, 267 bp, Oryza sativa
  Clone ID: PAT_MRT4530_95633C.1
atggaggcagccatcttggtaagacggggctttgcgcgacggcagccaggacaggggcttcccgcgacggcggctgacggcgggggcttcgcgcgactgcagctggcggcggggggctttgcgcgacggtggccaggacaagagcttctcgcgacggcggtcgacggcgggggcttcgcgcgacggtggccaggagaggggcttcccgcgatagcggccgatggcaacgataccgatggcggtggctttggcttcgtgcagcgctag

SEQ ID NO: 97652 - DNA, 2190 bp, Oryza sativa
  Clone ID: PAT_MRT4530_95634C.1
tcaagcattggagcttttagaagttggaaccaaactttgtttctcctcatcaagctcaatgccctcattgtcatctttggtttgctcagatgattctggttcatgctgcggcgcggtaattcctttctttgtaaccgattgctggtagagaactccaccagcaatggtgaagagcaagcagatcaaaccgaacgggctcgagtgcttgtcccagatcaatacattgatcgccacggtgaggaacttgttgactaccccggtcactgtaaatgctgttgctgagatagctttcctcgtcgcgaaaccgaagaagctgatgagcaatccaaacacacatgacaatgccaccgccacaaatgcatcaacctgaaaccacctctcaccccttgattctatcgcggtgaagagcgatttgtactcccctgtcaagaaccaaaagaagggggccatcatcagcgaaagaaggttgttgtagagcacaaaaccccaagtgttgagccccaaatttgtcacaatgtgcttgatgtacaccatctcagttgttatgatcaccagataagcaagcgcccacgagtacgcggtgaggctgaatgctgaatctgttatcacatatccaactgctcctcccaatatgaccacaagggacaggaatgtgagcttggaaggacatggctgcttccgaaaggcggtgtcagcgatggcaaccaaaagcggagtcaaggatctgaacactatgaaagtgtcgacattggcatggtagaggaggtttgtgttggtgaatatggcaaggtagaagacaattgcggccggcgcgaatttcttggcattctccaagttgaaaggatcatggcagagaaaacctagctttccaaggatccacacaccaccagcagatgtcaagtactgcaatgcagtcaggagagcaggatagccgaactttgtgacggcatacttgttaatgattgcaagcaagcttgagcataatgcatagcctatcacaaggctgctcgttgcgtagtactgtttcgccataagagtagagtgaaaacctgcaattgcgtaaatatcagcaaaatattcgtaaaccctctcaactgaagccgttgccaccggaagtatcaatgataactcaatgagcctatacaccaagtgataagttctattctttccggtctgaaccattaattcagcaacctttgcaagatctttacatccaagaaattctttacttctcctaacattgctaataaaatttccaagttgagttcgtagtagcataagatcaccaaccaaaaaatcttcagcataaatttcagcaagcctcacaagcttatccacatcaaaattggagaaggaattccgtggattaagagatgacatgcatactaataactctgaactaacttcactaaagcgatggttcatttcaaccaaaatggcatcaatggatctctcaatatgttgaagaccaagaaacctctccatcacctttccttcatcattcacaaacctcaagatgacacccatttgctcctttattgatacatctcgagactcatcaataagtacagagaaatttctatttccaatctcatccataataactgccgtcactttttctgcacaagctttagtaagatccttcttgtctttgtaccaatcaaccatctctttaaatttacccttgctaagggaagtatcagactcatcatgtccacgaaaagcatcaccttgttcaatgagaaacccaatggccaatgcaaagtagcagtctagcagactagcagtggcctgcccggctgcccctgtgctgtggctgtgcccaactgcccacggcgttgccggcgccgctggccgcttgcggcctgccgcctgcccgcccgccttgcggcctcgctgggagctgggcagctggcagtcgagtcgccggcgcgccgcctcccctacagcgcggcggcgctttcccgccggctggcccgcgcggccgcgcccgcctcctgttcgccctgcccgcctgccttgcggcctcgctgggcgctggcagtcgagtcgccggcgcgccgcctccccgacggcgcggcggcgctttcccgccggctggcccgcgcgggcgcgcccgcctcctgtcccgaccccgccggggtgccgggccgcccccttgggcatccagggtccccgcgcctcctccat

SEQ ID NO: 97653 - DNA, 733 bp, Oryza sativa
  Clone ID: PAT_MRT4530_95635C.1
ctttccttggctgtcctttgccagttaatttgagagcgggggctgccccgcaagagggcgaacctctgagcagatggccttaatatctatctactgaagcttggcttcgacgaccttatcatcgaattagcgtggcagtttagctcggaagacaggcagagcaagaggtagcacatcctctccgaagggaagatatgagcgaccagagctcgtaccctaaccctgctcaagggtactaccagggtcccccagcctcggcggcggccggccaagataacacggcggccggcggtggcaagtccaacgcagccaagaaagaccaaccgagcttcatggataacctccttgcttgcctcccctgtgcccgcccagccgaagccaagaacgacgcgagctaactaaccttgctccatcaggcagcctagcacgggaaggaaggctgcaaagctactgcatgattatgcccagtgtttgtttgattattcagcatctaagtaagcacgtcgttaattagttcaatccggattgctcatttgcgttttgtgtactagtgaacgatttatgtatttgtcgggggcgcatgtaatttaatttattcccctttggattcattattcagtttatcttgtcatgattttgtgaggaaagaatctgttttacgcatggttaaattgtactactactacttcacacaattctttaaaaaattctcgaggttaaaagttaacttttc

SEQ ID NO: 97654 - DNA, 232 bp, Oryza sativa
  Clone ID: PAT_MRT4530_95636C.1
gaagcaaaccccgccgagcgcgcccacagggccagcttcgtgaaatgatgaggccaccgtcagatgagctgggagggcggtagtcaccggattctacagctgaggctgtcagttcctcagcgcactcctgatgttgtgggccaccacctgctactagcgatacacacccttctgaccataacacacatacatgcataggatcatgaatcggtccactgcacccttgcatctg

SEQ ID NO: 97655 - DNA, 160 bp, Oryza sativa
  Clone ID: PAT_MRT4530_95637C.1
gacccgtggtgcgtaaagcctgaggtgtctaacgattgatctatctcacattctgagcgttgcactcactgcaaaccttccatgccggatacctgtctgacccggtgcatgaacgagtagaccaacactccgtgataggcggtctgcctcttgcgcgctc

SEQ ID NO: 97656 - DNA, 356 bp, Oryza sativa
  unsure (1)..(356): unsure at all n locations
  Clone ID: PAT_MRT4530_95638C.1
ccacccccantaaaggccaagcggcggcggcggcggcaacttgccattcctngtaatcngctccccttttaagaaaaaaaaagttttagtagtagctggagtagcatgcaaccgtggtagtgcggtccttagatttcctattggagtactcgtattgggtgtgcgtcttgcgttatcactacattatgctatggttttgtgtaagatcagactcggtacatttggttgggcctcgatctcttctttcatgaacaagggtagcagcagtagatttgccttagctagggaggagtgagatttgtgagattcggttattataattatgtgaattattactgcaaaaaaaaaaaaaaaaa

SEQ ID NO: 97657 - DNA, 309 bp, Oryza sativa
  unsure (1)..(309): unsure at all n locations
  Clone ID: PAT_MRT4530_95639C.1
actgggatgtgtccctgngattataaatcgtnataatcttggttaattggtgagcagcaaagtctgtngtattgttgctatcattgtngtacncaggtcngttcngttatctgtgtcctatatgcaaagattaacaattggtcctctatccattagcaaaacatgtcnccatgtatcagtctataacctggcaataacagtgatggttgttctgaccaattaatactatattgtacatttgtactaagtaataaagcttgngattacattnttataaaaaaaaaaaaaaaaaaaaaaaaaaaaaaaaaa

SEQ ID NO: 97658 - DNA, 399 bp, Oryza sativa
  Clone ID: PAT_MRT4530_9563C.1
ccaccagggaaacaagctatggcaccaatggattaccgccaagctcttaatacgactccaacttatagggaaagctggtacagccactgccaggtaccggtcacggaattcccgggtcagacacacaccgccgtccgccttgctgcataattatgttcgttccatatagtgtaattccctatataataatggtataatataactcgattcgtacctaataattggtaataacaatccaatcaaattactgtggtaacttcaaattaatccctagctacatcgaagagccacgccgcccactagttagttttcctggtactagaagctagttaattttcctctatggatgttattatgattgattgagtcgggagtattaaaaaaaaaaaaaaaaaaaaa

SEQ ID NO: 97659 - DNA, 376 bp, Oryza sativa
  Clone ID: PAT_MRT4530_95640C.1
atttctgtgttgatcaccctgacctacctggggagggggagcggcccaagagatcacgactgccgctacgaccacagctcctcgcccgccggcggcggaggctggctccatccgcgggcgatcgtacacggttgatgatcaggctgctactggtgctgagacagcgggaagactgacgaccactgagcctgcctgtgcacacagggtcgtgactgctgcgacactggccccatctgagcgaccaggaaggatggttggtcgcatacaagtggcggctccatgccaagaatttgcttacatacactatcatgatctgcaagactgaccacacttcaatggatggtgggacgtcgttagctctggccctgtggttgcc

SEQ ID NO: 97660 - DNA, 468 bp, Oryza sativa
  Clone ID: PAT_MRT4530_95641C.1
aaaacttaacaatgttttagagcaagataccagtacatagtacaaatcaacatacagatttgccacaatttactttagtacaattttacttattgacaaacacattccattctccgtggtccatttgctctgattgcagaatgctccaatatgaaatccctgccgattcttcacttctgaccatgcacagttgggacggcaaaatatactcagaaacaatatcaaagcaagcaagcaataaaacatacttagaaaaaaaacttttggaactcttatttttctatagtatcggattggaaaggcctcagaccgtcctagttcatgagcaatatcaacatagctctggcaacaacgatgtgtgccagttctgaaaccatcatgtcatcaaaggcatcagatccaatccaacaattcgcattcaactcacaaaagattaatctgcacgaacagtcatagaatttaaaaggt

SEQ ID NO: 97661 - DNA, 231 bp, Oryza sativa
  Clone ID: PAT_MRT4530_95642C.1
atgtcagctagcctgagaggaggacagagcagcggcttcacggcgtcgccggcggtgaacggtggcagatttcacgatgcgaccaaaacagaaaatgcagagtggaacatggcgaagctaatggtggtactttcgcgggctgcgatggtcggtgtcagcgttggcggcagcgcgagcggcagggttggtcttgccctctacaggccctcctccacgtctaactcggggtag

SEQ ID NO: 97662 - DNA, 158 bp, Oryza sativa
  unsure (1)..(158): unsure at all n locations
  Clone ID: PAT_MRT4530_95643C.1
gcgcgcgcgcacagcacgtcgcggtgcgagtcgtactgaaggggcggaagcaccaccgccatgggttcactacccgacacggctcgcatggacccgtctcgcgcgggtcgtcgccaaccctagcttctcccccggagggcggnggcgggggccggggt

SEQ ID NO: 97663 - DNA, 334 bp, Oryza sativa
  unsure (1)..(334): unsure at all n locations
  Clone ID: PAT_MRT4530_95644C.1
gtaaaagagataaagcaccggcaaagctaccttgatttattagtctattgagccgctttgtgaagtagctccttgttttctaattgtgatttgcgcttcacaaactccatgacaaggaaaattctcagtttcatgtaatttggcatatatgcgtggatatagcctaaaaattgatgatttagatgattcccagatattgcatattatttattatcttttttttattatggtattatgtattctatgtataatggacnaatcaagatgtattacgggaagtttgtgaagttttgtttttttcccttttttggagtaaaaaaaaaaaaaaaaaaaa

SEQ ID NO: 97664 - DNA, 690 bp, Oryza sativa
  Clone ID: PAT_MRT4530_95645C.1
atggcgagggagaggaggcgaggggcggagaggcgctgccgcccgttgccacccgcggaaggagagctccgggctgaagacggcggctggagaggaggaggagaaaaagtctcaaatgatagagagaaatatagtagctggatccgttcacggttgtcgtcaccaccgacggatccagccgccgatgctgccaccgccgccggatctaccgcgcgagaaaggcgagagggggcggagggagccgctaccgccggatccgcccgcaactgccgtcgacgtcgccaccatcctcggatccgcctgcgtccgccgccaacccgccgccactgcgagagggagagggagatgagagggagagggaggcgagatggggcggagagagcggccaccaatgagggaggtgagacggggcggagggcgcggccgcagccactcgttggggagaggacgccgcctccgccgctcgtgggaagtgggggaagggcaccgccgcagtcgcttgtgagggggaagggcgccgccgctgtcgctattcgatcgagacagagaggagggatcggtggcagggaggaaatgaaatttaaggttgggattaatctgaaccgtccattcaatcagacggctttggcttctctcgcattgggccgcggcactattgggcctccaaattggtccgcaagtttgggctag

SEQ ID NO: 97665 - DNA, 185 bp, Oryza sativa
  Clone ID: PAT_MRT4530_95646C.1
atgatctttccacgggataaaataaatacgatacccttggaatactctcgggtgaaatgctacaatggtatatccgtgcgcttgcggataaactctgcaaccataatataccagaagtatttctgcgccattgctggaaattatatttctagtaatatcgttaagaaataccaacaaagtcctag

SEQ ID NO: 97666 - DNA, 402 bp, Oryza sativa
  Clone ID: PAT_MRT4530_95647C.1
aaaaaaaattcccaggcggaccccaaccggaggggaaaaaacaaccatcaacaaagacaaaagggtctaaaaatcccttattggggagggcccccctcccggaaatcaacatctaaggaccggtgggaacgacaacaatttggccccgggccggaaagggtcattccgcccaaaaggaaaaccccaaggggaagggggaacccccccaaagggctttaaaaaaagggaaaagaaaccccgaagttggcaaaaatatcttggaaaaagcccaatggggtgccagtcttgaccggagccccccaacaaccccataaaagaacccttcaggggccaaggaaaggcttcttgggacgtttgaaaaccccggaaaaaaaaaagcaagggctttgggcatcttcccaa

SEQ ID NO: 97667 - DNA, 759 bp, Oryza sativa
  Clone ID: PAT_MRT4530_95648C.1
atgtcgaacgacaccaactccaaggacggcacgccgcgccgcaatgtgccgtcctgccacaacacgtcggccgtggtgccggtgcaggagatgagcatcaccttctcaacagcgggcgccctgccgccccaccctcaaatccttcttgaagaacgggcggcgggcggaacggcggtgggcaagcgcggcggcgggctgcgagcggagcggcgatgggcgaatgcggcagcagtttgcgggcggcgaagggaactagaggagagcttgcagagcaccgtcgccatgaccatgtataacaagtcagaaattgcttcaccgtatcaaccttcttatagtattaggtatgaaaatggtgatcgactgagccctgaacatgaaaaggcaattttggaacgattgcttccttatcacccacaatatgagaagaaaattggatgcggtattgactaccttacggtagggttacatccagaatttgagaactcaagatgtcttttcatagttaggaaggatggtgagcaagttgatttttcattctggaagtgcatcaaaggtctcatacgacaaaagtaccccatgttcagagtcttgagacacacagtgagaagcaagggcacgcctctgcactttggcgagcacgatccgacacgagagaaatttggtgagaagaacgacatgcgttacaagcagatccacccttacgacggctcatgggccgtttctcattcgctgccggtgtatctagacaggcttgtttaa

SEQ ID NO: 97668 - DNA, 1815 bp, Oryza sativa
  Clone ID: PAT_MRT4530_95649C.1
atggtgcgcgagctccgcctcgactccttctacgcgcgcctccgcgccgccgccgccgcgtccgccgccgacgcatcctcgccgctcctgatcctcccctccgccgccgacgccgacgccctctgcgcgctcaaggtgctcacccacgtcctctccgccgactccatccgcttctccatctaccccgtcgcctccgccgccgccgccgcctccctcctcgcctccttctccgcctcccacccgctctgcctcctcctcatcaactggggcgcccaccgcgacctccgcgccgtgctgccccccgccgccaccgcgttcgtcgtggattcgcaccgccccatccacctccacaacctctcggcggccaacgaccgcgtcgtcgtgctcttcaccacggacgacgagcacaccgccgatctctcctacgacttcgacgtctcctccctcgccgacgcctccgacctctccgctcagggggaggccgacgaccacctccgcgtcgccgaggaggacgaagactccgatgcttccgactcggattccgacggcgagggtgggaggaggaagaggcggcggctctccgacgatgcggaggcggatggcgacccggagaggctgttcgggaagctgaggagggagtactaccggctcggcaccttccacgggaagccgtcggggtgcctcatgtacgagctcgcccacgcgctgcggaagaacaccaacgagctcctctggctcgcctgcgtctccctcaccgaccagttcgtccacgagcgcatcaccaacgagcgctaccaggccgccgtcatggagctcgagcagcacatcaatggatctggcaatctcgacccatctggcgtcggcgcggtggtgacgctcaaggatggcaccaagatccgggcgccggaggcctcacgcatcgcctatgaagacgagccgcggctgatgctgctccgggagtggagtctgttcgactccatgctctgctcgtcgtatgtcgcgacgaagctcaagacctggagcgacaatggcctcaagaagctcaagctgcttctggcaaggatgggattcccgctcgccgactgccagaagaggttccagtacatgagcatggaggtcaagcggaagatgcgtgatgagtttgatcggttcttgcctgagtatgggctcaccgagttctattaccggagtttcttgagggtgcatggctaccgctccaaggtttctgctgcagatgttgtttatggcgtcacagctttgcttgaatcactgaatgccgagtccaaggactccaaggggtcttctgctgctgagcaattctgggttgcatactcggcgttgtcgctgagcaatgtcgatcagctgcggaaagggatgcagtctgcaattgagatacagagggcaatactgaggcaaggaagctcagcgattaccaagaccgggttcattcggagtgcaaagaagtttcggtgggtgaagcttgatgatccagtggatacggataagctatgccaacctcaggctcttaccaagttctgctttttccttatggacgcactgagagagcgaggagcaaggatgaagccacttatctgcgcttgcttagcaagggagcctgagaaagtgcttgttgtgggggtatgtgggaagccaaggctgggggctgttaaggggaatgcatttggtaatgcatttaggtcagctgccgaggagattggtgcagactatttccatgacatgtttgagtcatcatggattgttctcgacgttgttgctgtcagctctttcatgattcggttaacagagaagctatga

SEQ ID NO: 97669 - DNA, 213 bp, Oryza sativa
  Clone ID: PAT_MRT4530_9564C.1
tcaagatgtgatctcggcggccggcgacctcgtccacagcacccctgtgtccggcaagaggcgcacatgaggaggaacaacgacatcttccttgggcagatcaaacggcgacgccgccggggttatcgtggctgccatgactatttctgaaccatctccgctgccatcgagactcatccgcccgccgtcatccacattcatcaacatctccat

SEQ ID NO: 97670 - DNA, 482 bp, Oryza sativa
  Clone ID: PAT_MRT4530_95650C.1
ggcccaggccaagtacgtcgggtcgacgacggcaggtctggcccgcgcatcatgggaattggccccactgtcgccattcccaaactactggccaagcacggcatcacgctggctgactgcgacgttgtcgagatcaatgaggcgtttgccagcatggcggtctactgccgcgacaacctcggtctcgacgccgagaccaagatgaacccacgcggtggtgccatcgcactcggacacccgctcggagcgaccggtacgaggcagatcgttactggtctgagcgagtgcaggcggacgggcaagaagatcttattgaccagcatgtgcatcggcacgggtatgggcatggctgggttgttcgttaatgagcagtagagtgatggattgctgatattgttgttttgtcctgtaaaactgctaagtatgtaaattgttatcaatacctaacttggttatctcgaaaaaaaaaaaaaaaaaaaaaa

SEQ ID NO: 97671 - DNA, 320 bp, Oryza sativa
  Clone ID: PAT_MRT4530_95651C.1
ccattatcgaggaggaggtgaggagaggaccaagaagagctagattacggcggctaggagtatgcccatggatagtagtaatgcgccggctacggtgtaaggactgctcatgttgtctctactgcagatacaagaccacatagggaggacgaggcaggtgatccccttgatcgtggtcaggagaactgagtccgcggacagggtccacgccggagctgtatcaagatcgcgattaggcacagcaagataagcgtcggcgacgactgcctttgcatgggacgcgggaccaagatggtgcgagacagcggcgcacgatgtgg

SEQ ID NO: 97672 - DNA, 435 bp, Oryza sativa
  unsure (1)..(435): unsure at all n locations
  Clone ID: PAT_MRT4530_95652C.1
cggcccggaatccccgggtacgccccacgtcgtactgccgaacatatantgccatcctacaaggggttcttttatgtgcctcgttcgtgggcccctcgaacgtgcgccacggtatgcatgcgcgcaggctgacaaagcgagccaactgaaccgcaactacacgcattacagcactgagcgaacgccgatcatggctgaccccacatttgcctcctcaatcgataccggtgacccggaatcccgggatggacctatggacgcgcttaaggccaccctgggcaccgacccagtggccaccgtggaggaactcatgcgcacgatgaccgtcgccgaccgcaccgagaggcccgggagctcggatactgtcgttgcgcttaacaagatgatgaagctcactcaccagaagatgaccggggcgaacgaccgcacggaact

SEQ ID NO: 97673 - DNA, 1509 bp, Oryza sativa
  Clone ID: PAT_MRT4530_95653C.1
atggagatgatggtgcagaagcaacgacacgaggagggggaagaggagcgaggaggcttgtgcgcccgcgagatcaaggagctcgacttcttctccgccgccggtgccggtgccggccggagagacgacgacgacgtcctccgtgcggatgggatcagcagcagccacgccggatttatggtcagcactgcgctggacttgctgacagcggtcaacgacggtgatcatcatgaggagaagaaagggcagtcaaatattcaccaaagcaagcagatggatgcggcggcgacgacggtggagggggagctccggcaagccggcgaagagaaccggcggctgcggcggaggctggaggagctcaccagcagctatggcgccctctaccaccagctcgtccaggcgcagcagctgcacaccaagcatcagcagcaggctccgatcgccggcgtgcagttgctggacgcgctcgcggcggcgtctccggcgagccaccggcgacgagcggcggcggcggtggacggcgatagaacagctgactctgatggtggcgagggcgacgagaacgtgtcgccttctcttggtagcaagaggccggcggcggcagcgacgttaacgcggctgacgccggagagcggcagcggcggggagaataatggcggcggcgagcaggcgccggcggcggagatggcgccgtgccggaaggccagggtgtcggtgcgagcacgatccgaggctccaatgatcagtgatggatgccaatggaggaagtacgggcagaagatggccaagggtaacccttgccctagagcctactaccgatgcacaatggcttcgcaatgccccgtcagaaaacaggtgcaacgatgcgcgaaggacaagagcatcctcatcaccacctacgagggcacccacagccacccgctgccgccggccgccgccgccatggccaagaccacctccgccgccgccgccatgctcctctccggccccgccgtcagccgcgacgcgctgttcgccgcccaccaccacgtcgtcgcgccgccgcccttcttccaccacccctacgccgggtccaccatggccacgctctccgcctccgccccgttcccgaccatcacgctcgacctcacccagccgccgccgacgacgacgaccaccgccgccgccgccatgctccagctccaccgcccttatgccttctcctcattgccgttctcgatgtacggcgccggcggcggctcgcaccggccgcccgtcgtcctgcccccgccgtcgtcggtggtggagacgatgaccgccgcgatcaccagggaccccaacttcaccacggcggtggcggccgcgctctcctcgatcatggcgggaggcggcgcccaagctcgaacacctccacgcggcgggagtgacgccgccggagacatcaacggaggcggcggcgccgaccacgccactgccggagcacgcgccgcggcggcggcgacgcagccttgcggcacgtctcccacctga

SEQ ID NO: 97674 - DNA, 4025 bp, Oryza sativa
  Clone ID: PAT_MRT4530_95654C.1
ctcaacctgatatttgctgtttattaaaccgatgactgaaatttatgtcctaatcaaaacctcctagctacttctttcagggttcttgctaactaaagcctaatctgcgacaccaaaaaaaagaaaacagacccacaaaataatgatcaatccaagctccaggcctccagccatggcgcatgggcatggcgcccccctgatgatcaactctcctgcgtcttgacgacgatggggccccgcacttaaatttctcatcttatcttttcttttacgctaagcaacagctgcccaagaacaaattatgccaagtgcgcatatgcacacataagagtccgtaaatcataacaaccatcatccagatcagccaacccctagattcccaaagccaccgcctctattcaatagcttgtgaagagctcctgttagaaactatcctcaggcttggcttcagaaattcttgcaactcatactttgacctgatgaaatctgctctctcttcctggctagaatcgggatgtggcttgtgatagcctcctggaagaaatgcctcatagattgcattggcgtaagagtttccaccgacttctagcatggagttaatctcatcatcagtccactcatctagagtgactgatagaacctttgaaatatgcgtccccagacttctgtgaattccagaacattttaggcatatgaaaactcctatactagctggtgcccatgtaggatccggtgagctgcagtcagcacatattcggttttcactcttgtgcagcagctccttgagctttctcatcttatctctgccggtactcatttcagcagctgccaccaaacactcccctccaggtgcgcctcaacgctcgttcgaaacgaaaatcagcttgaaaaatcccaagaagcttcgaaatcaggatggcaaaccgaagcgccggcccttaggagaagaagaggagagatcgccagatggggtctcgattcctggagcaagaagctaaaactgcaagcgatgcagatgaagcagcagtcaaacttctcccttcaaatatcaccctctttacacttgactttgcagggtcagggctatcaggtggagagtatgtcagccttggttggcatgagaaacaggatctcaaatgcgcggtgtcctttttgcgaaacaataaggaagtttcttgcataggcctttgggggcgatcaatgggtgctgttacaagcctactgtatggagcagaagacccctcaattgccggtctggttgtcgacaagtgctttctctaagctataatacttagtgatggattcagaaattctttacacacatcgttttacctggtgaaatcttctctctcttcctggctacaatcgggatgtagcttataaaagcccccaggaagaaatgcctcatagattgcattggcgtaagagtttccaccgacttctagcatggagttaatctcatgcaccaaatgccatgcttattcagccccatcacacggaccgtattcatcaggcatatgcgggggacaaaaacttaatcaaatgcatatgaaaactcctatattagctgatgcccatttgggatcaggtgagctgcagtcagcacatattcggttttcactcttgtgcagcagctccttgagctttctcatcttatctgtcagtgacatggagctctcgtacacgtaggagatctggtaggaattggaatattcctgatcaagctggtggttcccgtccgaccagacgatggcgccgaacgcgtagttcgccgccggcgcggggtccctcacggcgaacttcacccagaacgtcctcacctcgccggtgctctcgaacgtcagcgtcgtcggcgtcaccgtcacctgcaccccctcgggctccctcacgacggcggccgtgtacgtcgccggcgggccgacgttcctcaccctccgccgcgccgtcgccggcgggcccgccggcgccaggtcgaacgcggtgatggacgggtagttgaagtcgagcgggtcgagcgggtcgtcggggcaccggaacggcgcgccgttgaagagcgccagcgccgtcgcgttgtagccgatggtgcagaggaagctcaggtggtcgtcgacggtcaggtcgtacaccaggcccgggtccatcgcgcggtgcgggaacacgtgcccagcgccgcagctgaacggcgtcgccggcgacatcgacgagttcatgatcggcctcatgtcgttgcccagctccgtcgcggtggtcatgatggcggacttgatggcggcggggctccagtccggatggagcgtcttgatcaggccggcgacgccggacacttgcgggcacgacatggacgtgccgctctgggcgttgaatgccacccgccgctggtcgtacggcaagcccgtcggccccgccgcgccgctccacgccgcgatcacgctcacccccggcgccgtcacgtcaggctttaggatctcagggttgacggtgttcggcccctgcgacgagaaggccgccatcaccggcgccggcttaacgccgaccaccgtcttcgccctcgtgatgaaggctttagcgcccttggtggagttgatgtaggccaggagcgcgtggccgtcggcatggttgatgtgcaccgccgggaggacgtgcgcgtcggcgatgacgtcgttcccggaggcctcgtcgttgacgaggatcattgcggcgccgccggcgcggctgacctcctcgcccttctccaccctcgggttgcctcctcgcatgcacaccacgatcttccccatcaccttcttgccgtccagtgctcccagctcgcagagcagggcgtcggcgggcgggtagccgggaacggcggcgttggcggcgctgatcatggtgtagaaggtcttcccgcgcagccatgtcggggagaggctctggccttccacccggttgcggttgaagacgaggtgcgccgggaacgccctgtccatggtgctcgcggcgacggtgaggatccatggcgcgacgttggtgacggtgccagggtcggggccgaagttgctggcggagcagacgacggtgatgccggccttgacggcgtggagggcgccgatggcgatggcgtcctcgaggtagtcgttggggtcggcgccgacggaggcggagatgacgtgcacgccgtcggcgatggcggcctcgaaggcggcgaggatgtcggagtcgtagcacgcgtcgctgccgttgaagggagggtagcagacgcggtacgccgccacgcgcgcccgcggcgacccgcccctcgccgtgccgccgccgaggccgaacgcctcggcgccgcgcacggccgacccgccggcggtggccagcgtgtgcgtgccgtggccgttggcgtcccgcggcgtcttgtgcgtgtcgttcagcgggacgccgatcaccttcgcgtagccattgttgaagtagcgagcgccgatgagcttgctgttgcacttaaacgttttgtcgtgttcattccggcaagctcctttccaataatttgggatcggaccaagctcacggtcattaaagctcagcgattcaggccacacgcctgagtcgaggttgccgatgatgatgttctggccatacctggcggcctcccatggcgaccacggcgggacgcttccgtcgggcctctcgaggcccaagaactgccacgaccgcgtggtgtgcatccgccgccccctgtccgggaacaccgacaccacgccgggccgctccgccaccgccgccgcctcctccgcctccagcctcgccgcaaagccgttgatgttcttcgtgtacaagtagaagatggcgtcacgtgccttctccctgtctccgaggacggagccgaggaggtcgtagtgcgactccgcggccgtgcggtgcgcctcctccggcgagatgacgccgccgtcgtcgccatgggagtggcggccgccgaggtagacgatgtaggacggcttcgtggcggcgagggcgggagcaacgatgaagacgaagacgacgaggagttcgaggcgcgtggacat

SEQ ID NO: 97675 - DNA, 151 bp, Oryza sativa
  Clone ID: PAT_MRT4530_95655C.1
atggtcattgctgcggtgttccttgagattgctgtggcatgggctcgaattgattatattgaggaacaaactggggttgagccgaccctgcctgctagtattgaacttgaggtgatggtggctgatactaatagttcaaattgcccgcttg

SEQ ID NO: 97676 - DNA, 422 bp, Oryza sativa
  Clone ID: PAT_MRT4530_95656C.1
aatacattgtactgggatgtgtacgatgtgtctcatccagtcctagtttgcaatattttgggatgaagggagtagctagctagcagtcccattgtcttttaagctgttactaaaatttgtgtacttcttcatgatcaacagaaccctcatcttgacttaattatgcgcatattatgctacgtgaaaggcaccctcaatactggcctccacatcggcatcggtccattcaatccttgactgcgtactctaatacggattgggcttgttgccttgattcatggtgctatattttcgtatcatgtgtcttcctcagtgatgatctagtttattggtcttccaagcgcaagacgatggtctcccactctggtgctaagacggaatatcgtgcgatggctcatgctgctgctgatcagtgttctcga

SEQ ID NO: 97677 - DNA, 334 bp, Oryza sativa
  unsure (1)..(334): unsure at all n locations
  Clone ID: PAT_MRT4530_95657C.1
atgatgaactgatgcggataaaggatggaacctaatcctcgcttgtcgagcttagttcaagttcaaggtaaatcttctgaaagcctgaacattatcacctctaatagtatgaaaatactgacttctcctgaatagagtttgtccgctggtactgaaaatggtcatatatatgtaagtttatagtaggaaaagcaaagctatgcattctatatttagttggatgacatgcactgtttttctctaactaattaaattncgttgtatatatataccggcaattcagcatatgtgcatnagtggatggttttggatgttaaaaaaaaaaaaaaaaaaa

SEQ ID NO: 97678 - DNA, 147 bp, Oryza sativa
  Clone ID: PAT_MRT4530_95658C.1
atgtgcggccaggtggttgctgaccccaggacgacaatgggcgcggtcgtggtggcggactgcaatgggtgccggaatggtctcgggccggcgtggtcaggccggcaaaggacgacggcggacgcgattcgcgcaaggacggcgtgg

SEQ ID NO: 97679 - DNA, 387 bp, Oryza sativa
  unsure (1)..(387): unsure at all n locations
  Clone ID: PAT_MRT4530_95659C.1
tcggcaatttgtttcactgccacaggtagtgttgatgatcatacttggatagcaaatttgtgagagccttctgtggcgcttgacgacaccattcggattgttccatcacttccatacttagtgctggttgtgagattagcattagactacaatgtccaatccttcagtcttctgcacgtgtaccctaagttatatgggttctgttaaatgngcacagcttaccaangttgagggaacatccatagctatgaatttttgcacaacatgtgtagggttctgacggaactaagcatatacaagattgcgaaaactttcgaaaattttctcaactttaaatcttttgataaagtaaaaaaaaaaagaaagaaggctatagtcacacgagac

SEQ ID NO: 97680 - DNA, 1611 bp, Oryza sativa
  Clone ID: PAT_MRT4530_9565C.1
atggggagggaggcgccctcgccgccgccggcgcgcgacgccggctcctcgtcggggcagaaaaggaaggcgttcaccatggtggaccaggacggcggcagcgaggacacatggctgaagctgtcgctcggtccggtcatctacaccgacgcaacgaacgtcgacgactctccggtaacgacgacgttccccaaagagctgccgccgccgccggcggcggtgggtcctccaattttcatggcctcggcgaccaccagcttgatcgaccatggcaaggaagctgctcgcatggcgaccgacgctctcttcaacggcgatgcaacaggctcgtcgtcgttgcatctccaacgccatcacgaatcctcctcagcgcgtcatcccacccaacgtcgcagcacggcgtccaccacaagctccaccagcggcagcgcaggcgacgtaccggccatcaccggcgacggtataaacggcggtagcgacgacaacaatggtgcagctggcatggtaaacaacgatagagtgctcgtgaataatccaccttatccgtgggctaccaacagagtggccgtacaccactctctcgtcgagctgtctcgccgtggcatcttcaccatcaaaggtgaggctcggtgcaggcgctgcgacgtacgcaaggagttcgtttacgatattgaggccaagtttcgagagttggaagattatctccgccgaaactgcatgagcatgaatgaccgtgcatcagagaggtggaagaaccccatcgtacccaactgcgacggctgcggccaacagaactgcatgcgtccggtgatcgccgctgagaaggagcgcatcaactggttgttcctgctgcttggagagacgttgggtttgtgcacgcttgatcaactcaagtttttctgtgcgcacaccaatcaacatcgcacgggcgccaaggatagagactccgtggtggccacggcgacgcggagccgcgacttgtataaacgcggcggcgaccggcggcggcggcgcgcgatgcgtcgtctgctgctcacgggcttccctgcatcctccgccctgaccttccgcccacgcatccgcttcttcccccgcgcgaaccctagaagcatggcggccgcaggacctgcctgctgtgccccagccgccgccgccgccgccgcctcctcgtcggcttctgcttctgctgctgctgcggctggcgatggcggcggaggagcccagaagccgtggctgctcatcgggctcgggaaccccggcaggatgtacaaggggactcgtcacaacgttggatttgagatgatcgatgctattgcagaagctgagggtatttctgttagcagcaagcaattcaagtcaatggttggtaaaggccttattggtgatgtcccagtaatgcttgccaagccacagacttacatgaatgcaagtggtattgggcgccccactgggaagttggatgctatcggctttgttctaaggtcattcaccaaggaagaacaagaagagaggttcagattgcttagggattcaaatgaagagtgtacaatagctgttgttgttagaagcacccagaatagctgcacaaagcacaaggaccattctccttga

SEQ ID NO: 97681 - DNA, 220 bp, Oryza sativa
  Clone ID: PAT_MRT4530_95660C.1
gtcgactctagaggatccccaaaacggaagagcagcaggcaggctcggctcagtcggccgccccgcctcgccacgcccattgccgaggccaactcggcgcacgcgcgcgtgtgtagcagtccaaccatcacctcaaccggtttcactcaaacccttaactggtactgggctgccgaaattgaagagaagcgcatccatgaagaacaaactcattttgagg

SEQ ID NO: 97682 - DNA, 516 bp, Oryza sativa
  unsure (1)..(516): unsure at all n locations
  Clone ID: PAT_MRT4530_95661C.1
tggaactcttaccctcatcatgcactaatgtctttaaaacagtttcaaaatttgtgtttatctaaataatcgttacaaaatctggactggattaggtatggcaatgcaagctatgtagatgaaaggcaccgccaccgatatgaggtgaatcctgaaatggttccagaatttgagaaggcaggtctctcttttgttggcagggatgaaagcgggacacgcatggagataattgagctaccaactcataggttttttgttggcgcacaatttcatcctgaattcaagtcaagacctggaaagccatccccacttttcatgggtaaatcagcctttcacctctacctcatcttgcctgaaacatatatgctatttatttatcttttcaagccaaatgatcaatttcgtttgcaaagccgaatagttaaactaaacaatatgcctgaatttcaagccaaatgatncaatttgctggcaaagctgaatacttaaactaaactaaatgcctgaatgataaca

SEQ ID NO: 97683 - DNA, 367 bp, Oryza sativa
  Clone ID: PAT_MRT4530_95662C.1
gaggtattgtgtgcgtatgggatgcggagtcgaatttagaaggagtccaaatttggtatgagtggttacgtaaagtttgtttcttgtactagagggtttcctagggtgattaggacttctagtatgagtttggttcgtggctttaggctgctttcctcgggtataaatagagggggagcgacacaccggcagcattacgacggtcagaccggcaggtgacctgcggtcagaccggcgaagtcaacaggcgtggcaggcgatctcagggcagtcagaccgattgatctacaccggtaagaccgacggcacaggcgcggtcagaccggcaggacagtttcggtcagaccgatctccgtcgaatttaagg

SEQ ID NO: 97684 - DNA, 273 bp, Oryza sativa
  Clone ID: PAT_MRT4530_95663C.1
atggagaaggcgaagcaactgcaaaggcctctgctgctggaggggtttacgggttggggagggggggcttggggtggaagccagcggtcgcggtcgcggtcgcggtcgcggctcccgcggatggcacgcggactggcggagcagcaccggtgggtcccgcacgtcagcgagcgagcgagagagcgtgggaccgggacggacgaggattcctcacgcgagagcgagagagagagagaggagagattctctcgtcacgtcgtcgggtcgccttga

SEQ ID NO: 97685 - DNA, 132 bp, Oryza sativa
  Clone ID: PAT_MRT4530_95664C.1
atggagttccgaagatcgtccggcccatcttccacgcaccacgttctttacagggatcagctcgccttgcagcagaggattctgaatcctcgccgcttgacggcgtcagggcaggtcgctggtttccgctag

SEQ ID NO: 97686 - DNA, 315 bp, Oryza sativa
  Clone ID: PAT_MRT4530_95665C.1
atgagcaagaccaagaggcatcaacaagagataagcatgcaacaatatgatcaccaaatagctcaacaagaaagcgggggctgccacaacgagggtgtggacggatgcagattttctcccacgggtctgtcgggcggggccctgactttagacatgggcgggggtcacgcccggaaatatacaccatttccaaacgctcagtgcattaatcctcgtcccaggaggcgagccaatcttatgtggaagaatggaaagtcacgtattaaatccgagaaagtcattaagaggatttggaaatatgcctatcaaaagtag

SEQ ID NO: 97687 - DNA, 876 bp, Oryza sativa
  unsure (1)..(876): unsure at all n locations
  Clone ID: PAT_MRT4530_95666C.1
atggagagtcaggtgctccgggacgccggcgccgccgtgctcaccggagccaccgcgctcgccgtgcttcgcttctgggaagaggtcggcaaccgcgccctcttggaccagaaactttgcaggaaactcgtgcacattactgttggcttagtatacttccttatgtggcctttgttcagtgcggatgatgtctatgctccatttcttgcttccattgtcattgcattcaacatcataaaggttaccttgattggacttggtattgtcaaagatgatggtgtcattaactccatgaccaggaacggagaccccagagagcttcttaaaggtccactgtactacgcttgtgctatgactctcgctactgttattttctggaggacatctcccatttcaatcgctgtgatttgcaacttgtgtgccggagacggtgtagctgacatagctggaaggcgattaggccgtataaagcttccttacaaccctgacaagtcttatgctggatccattgcaatgttcttagctggtttccttgcatcaatcctgtacatgtgctacttccacctctttggatttgtcgaggagagctggaccatggtgattgcctttggtgtgacatcgcttgctgctgcaattgtggagtcgctccctatcagcacacgcttggacgacaatctgactgtgccactcgcctctgtcctcgttggtgtccttgttttctattatattggggccagaaacctgtgctgcatgagcgctgacagcagcgatatttctgcacttgtgcagaatcagatggtcttgggcaggttctaggtatcttgtaatcaagaaaaacaaaagctatctgatatactngtaaggcaaaagttgagt

SEQ ID NO: 97688 - DNA, 375 bp, Oryza sativa
  Clone ID: PAT_MRT4530_95667C.1
aaattcacccattcccatgacttataggcaagcacaatagtcataactcatgatagcaagctaacaaaaaaagggtttttaacatgttaagagcggagcaaaatctgggggtcctgcgaaaatgacaattttacatagcgaactgatgaagcttgagtcacctaagcttccttgccttccttgggctgtccaaccatcaaatgctttaaaaaatgaccgccttccatgatactacttttttagcccgaaccattgaggggatccagggtttttgggacatgccttatagagggccttccctttggattggcctgaacgcaagcgagagcaactttcagggctgggaacattttattttcccgttcagagtctttg

SEQ ID NO: 97689 - DNA, 194 bp, Oryza sativa
  Clone ID: PAT_MRT4530_95668C.1
cacttggtcagcaatcggtgggacaatggtgccaaagtggagtggaggatactgcagccatcgtcgaggagatcgggatcgacaatccccttgccgtcgacaatcgcgcgaagccacagccttttttttctcggcagtcgtcaccaccgctcccctccttcgatccgacctccgtcgtccctcgcctctggtga

SEQ ID NO: 97690 - DNA, 175 bp, Oryza sativa
  Clone ID: PAT_MRT4530_95669C.1
ctgatataaggagcgcgccgagcaccgccttagacaatgtcgaccgcctacgccggcgtctctggccagagcgggtgcgtcgacactgctatcccgcgcacccgcgcaacagtcgaagccagccgtgtctagcaagtaccgacctgcactggccgctgctacaacaggagcaacc

SEQ ID NO: 97691 - DNA, 762 bp, Oryza sativa
  Clone ID: PAT_MRT4530_9566C.1
atggcgaagctcaccggcgcgcggcgcggacggggctccggcggcggattgctacggaggaggggtggacgggacggcccgcacgacgacccacgagggtcgatcgtggtcggggagatcgcgatttcgccggcggagtggggagaggtggggaggagagagaggcgggattcaaaaattgaatcccggccgtctcgagcgcgggcgcgggcgggagagagggggaagtgggcgcggggacgcgggcacgagggtgacgtgggcgacgtggcccgggagacgcaggagcggggcgcggtgacggttgctgggcgcggcggcgccagctggaggagggagacgggcccgacaggagggccccacctaccacagaggcgcaggtactttaccaccgagtggcaggcgcttggctggctggccgccggcacgccgggccagcctctgatcactgacacctcacgcttcttctcgtctcatgccggcggccagcctctgatcactgacacctcacgcctcttctcgtctccactccccacatgcggtgacgggaggagaggcggcagcggcgggcggccctctgctagatccggtgggaggggaggcagtggcagcggcggcggcccacgggcgacgtcggcgggctcacgtcttccagatccagcaacctctccgaccgcctctcctcctatcgcctacctcctccttcatccggtgagcagcggtggtcaacgctctgctgctttcaccctgccgattctctga

SEQ ID NO: 97692 - DNA, 807 bp, Oryza sativa
  Clone ID: PAT_MRT4530_95670C.1
atgagcggcgggctccccggattccacaatgcgccggtgtcgagggccgtggtggtcgccgccgcgctcttctccgtcgccttcggcttccgcggccgcttcctcgacctcggcctctcctacgaggcaagtctccctgcccctacccgacagctgatgaggttacccttaccatcccttccaatgcagaatgtttatggaaagctgcggatttggaagctgatcacctcgttgtttgctttttcatcaacgcctgaacttatctttggagctgccttgctgtactactttagggtgtttgaacggcaaataggttcaaacaagtattctgttttcatagtcttctccacagcggtgtccgtactgcttcagatcctttctttggcttacctgaaaggtccttctttaaatccattgacatctgggccatatggcctcatatttgcgtcttacataccattcttctttgacattccaatcacaacaaagtttcgcatatttgggttgcgcttaagtgacaagtcattcatatatttggcaggactccagctacttttctcatctggatggcgttcaattatacctggactttctggtatactggctgggcttttgtatcgtctgaatatatttggcatccgcaggttgaagggtgtgcacccaactacagaagatccaatggagtcttcaatcgctacacttgtttccatgggttttgatcgtggttctgcaatacgggctcttgcactgacaaattatgatgttaatttggcctcaaacattcttcttgaagcacaatccatgtag

SEQ ID NO: 97693 - DNA, 462 bp, Oryza sativa
  unsure (1)..(462): unsure at all n locations
  Clone ID: PAT_MRT4530_95671C.1
cactttccccaccttgttctactagcctagccttcacaaaagcaaatccacgcaaaatctgctccatggctgcgggatgatggccgggaaaccactccagcttgcagatccagtgagtgaaggctgaaggctagtgaaggctcaagttcttttacaaatcctcaacgaatcaacatgttctctctccttctctctgcatgtgcatactgaaatgtttccatcgaaaggcttgttgtcagatctgaaattgcaaggtcacgccctcggtctcgggctgtgcttcggtgcgggccccgcccttggctttggcagggccggcttcccgctcgtgtgggcctgtcctttctttttggcccccagctctcggtaaatgccgtggtgggttaggactttggcaatgtgtgcccggtgcctcccaaggggtcctttaatatatgnatatgaatggngtattttctttca

SEQ ID NO: 97694 - DNA, 288 bp, Oryza sativa
  Clone ID: PAT_MRT4530_95672C.1
atggaccatgcatgggagaagggcaagtggaggcttggcgccgaaggacatgatgcagtggtgaaggagcaacggggcggcgtggatccgactaacgcgtgtgcacgcagggctgacggcaccgctcctggccgccgtctcctcgtcgtcattgtcggctggggcgaccgcgtcacccgctgcccatcgcttctcccgaacccaccgccaccgctcctgagcccgccaccgccgccgccaccgctccccgagcacgtcgccgtcgcgcccgccatcgcgttgctgtga

SEQ ID NO: 97695 - DNA, 280 bp, Oryza sativa
  Clone ID: PAT_MRT4530_95673C.1
ctcacgcgtacgcccactcgtacttccactcttccgcttagcatcaacgtgaattgaacttctattatagttgcccaaccttaattaaccgcgttatatgttttttttatataaaaaaacaacttaactttgttggacaaaaaaaaaaaaaaaaaaaaaaaaaaaaaaaaaaaaaaaaaaaaaaaataatgtagggtattataaaaaaaaattaaaaattggaactgtctttaaaaactagtgcattacttttatggtcccctcatattgatatttcttt

SEQ ID NO: 97696 - DNA, 201 bp, Oryza sativa
  Clone ID: PAT_MRT4530_95674C.1
aacactagtcttttctgcacactttgtcctcactcgtgcacacctggaaagaatttcccgatcggtcatccatcccaaattgctccaggccaagcacgcttaacctggagttctttggaaatcggcttccggaaaagaagttgtaacttgttgatatgagtattctattaatcctattaagccctgagccgggatgtcaca

SEQ ID NO: 97697 - DNA, 142 bp, Oryza sativa
  Clone ID: PAT_MRT4530_95675C.1
actaccgatcttgatcaatggagatggcgatattgaggggatggctaatctggacaaaagatttttgagggttggcgaattttgacacacaaaatattattccagttgcaagtggtaacaaaaacaccctgctaggctgttt

SEQ ID NO: 97698 - DNA, 558 bp, Oryza sativa
  Clone ID: PAT_MRT4530_95676C.1
atggatgccgtttgcaaccaccgtcaacgaccatcttcatcgacgctgccacaacagttggagcactcacctcgctcaccgtcattgtcgccacaccaccggatccaccgttgccgagccccctaccgccactatcgcccgagctgcgtgccaccgctcgagcccaccgtcgttgtcgtcgccaccaccgccggagaactcaccctcgcctgtcgtcgtagccctccctactgccggatgcgccgccgcagccctcctgccttcggatgcgccgccgcagccctccgctcctccggatgcgccgccgcagccctcccgcctccagattcgccgccgcagcccgcatccggattcgccgccgccgccctccccgccaccggatccaccgtcgctgagccccctgccgccgccgtcgctcgagctgcctgccgccgctcaggcccatcgtcatcgtcactcacggtgggcagaggagaacgaccagtgggcaacgagaggggcgagcgagcggcgtgcgacgatgtgagtggggacgatgcgagcgagcgagcggggtga

SEQ ID NO: 97699 - DNA, 807 bp, Oryza sativa
  Clone ID: PAT_MRT4530_95677C.1
atgacgatgggcctgagcggcggcaggcagctcgagcgacggcggcggcagggggctcagcgacggtggatccggtggcggggagggcggcggcggcgaatccggatgcgggctgcggcggcgaatctggaggcgggagggctgcggcggcgcatccggaggagcggagggctgcggcggcgcatccgaaggcaggagggctgcggcggcgcatccggcagtagggagggctacgacgacaggcgagggtaccaaaaacgagacgatccatccgctcggagaaatcttaacccaccaccgcaaatcccgtcggctgtgttcgggaaaacgatgctcgcattccggcacagcagtcatggcgggcggcggtcctcgtgcttgtcgtcgtcgtcctcggagcggtcatggcgggaggcggcggcgcgtcctcgccgcccccctcaccgacggcgctctcctcactacctgccccaatgccgagcggcggcggtatcctctggacctggcgaagaagcggcggcacggatctggagcgtcctcgccgtcctccaaaacgacggcggcggcgccgtggatctgaagatggtggcggcggtggcgcgtcctcgcccgccctcctcaccggcgacggcggcgtggattggagctggacctgaagtcgtcggagtggatggagttcctgctcgggaatcaaggtcggcctcctctgcacggcgcgttctcgtcctcgcatctctcatcaatgggccccgcgctcaactttttgagcgaggttctcattccttcgctgggaaccgaagaagctag

SEQ ID NO: 97700 - DNA, 875 bp, Oryza sativa
  unsure (1)..(875): unsure at all n locations
  Clone ID: PAT_MRT4530_95678C.1
tcggcaccggccgggaggtagccatccattagctagccaacttctacacggccgtgtatccccctgatccgtccaagtccggcgagtcgtcggcggcggcggaggttcctcccctggcgccggcgccggagccggtgaccggcatccccgtcggcatgttctaccctgctccgccgatggagcgtgtggtgtcttgtcgcatggcgccggccgcaggaggggcatggaccaccgccctctgcgactgctccgacgactgcaacacctgttgtatggcgtgctggtgcccgtgcatccctgtcggccagatcgcagaaatcgtcgacaggggctcatcatcgtgcgcgttgaacgcggtgctgtactgcctggtgttccacgtgtcggcggggatgtgccagtgggtgtactcgtgcgcctaccgtgctcgcctccgggcggcgtacgacctgccggagacgccgtgctccgactgcctcgtcaccttctgctgccagacctgctccatcgcacagatgcaccgtgagctcaagaaccgcggcctcgaccctaaccttggatgggaggtgaactcgcgaaggacgatgacgatgactcctccccaacaccaagcgatggaaggaatgacgactcgctcataaccactcgtcatcacctctcggtcgagcaagcaatacgtacacaagctagctatcacacgcgtgtaccctttaatttactgaaatttccacgtacaaatataaagtgccaatacatacatatataggtgtgtgacgtttaatttaatttgtacgaatattttattgtctctactactttaaagacgcagtcnattctcctccaaaaaaaaaaaaaaaaaaaaaaagnaacanaca

SEQ ID NO: 97701 - DNA, 618 bp, Oryza sativa
  unsure (1)..(618): unsure at all n locations
  Clone ID: PAT_MRT4530_95679C.1
nnggggngggggggttttaaaaanaaaanncnnggggggnttngggggggggaaaaaaaannncccttttctcgnggggggaaaagggnaanttgngggggggaaaannccccgggtttttttttcccccgggggntngggaaagggnttaaangnnncccngaaaangggggggggtnangggggnggggggcccttnnaaataaaaanttttttttgggggggnggcgnccaaattttttggnaaaaagntttggntttngggnaaaaggggancccngggtcccccnaanggggtttttggnggngagnanttttttccnaaggnttgganaaanaaaaagggggggggttttnttttttttttggnnnngganttntttntttntngnccccggtttnttcccnttttttnggaacccgccccntnnntcccccnnggttattccnttttttnaaaangnannnntnggnggggnanttttncnncccnaanaaagggttngntnnaantnccccnaaaaaaaaaanaaanaaananaaaaaaaaaaaaanaaanaaaaaaaaaaaaaaaaaaaaaaaaaaaaaaaaaaaaaaaaaaaaaaaaaaaaaaaaaaa

SEQ ID NO: 97702 - DNA, 399 bp, Oryza sativa
  Clone ID: PAT_MRT4530_9567C.1
ggggttaacacaagcagcaatgtcatgagattacggtgaactcaagcatgtcaccatacagacaatatttttttgttctctaaaacgagttaagcaagccaggtgaataatgtcttggaccaaagaccctgagacaggttcaaccaaacacttccaagacggtcatacaaacatactgaaaatgtcttggcaaacatggttaatataacagcattctaacagtgcagaatagtagggtttttcctggggctggcatcggggaacaagaaaaccaggatccagccatcatttattaactgaacaaaagcgtgacccagaactacttaagtaatttaagaacatcatcgtctcctccgcgatggtgcgacgacagttcgtgtactagaagatagctactga

SEQ ID NO: 97703 - DNA, 337 bp, Oryza sativa
  Clone ID: PAT_MRT4530_95680C.1
atgtctgacgtggtgccgggggctactgtcggagatatgggctcggggccgggaggcctcgaggtgccacgtcatgcccctcgggccctcgcgccaccttgccccgaggccctcgcccaactgccatgtggcggggggaacgtgcggtgccacccgactgacgcactgtcattcggagctccctccacgaaaggacgaccaccacaagtcttcacccatttatgagggaatgacaaggttgtcccccgtgtcaggcggggggcggcgctgggtcccgctcaaggacaagttacggcttagcttccgggcgaagggatagatcgtgatccggtcaagg

SEQ ID NO: 97704 - DNA, 305 bp, Oryza sativa
  Clone ID: PAT_MRT4530_95681C.1
gaattccactgccacatcgatacaaggtcccagatttctccaagttctcaggacaagataatgtgtcgacttatgaacatgtcagccgatttttggctcaatgtggtgaggcatcggctaatgatgctctgagggttaggttgtttcctttgtctttgtctggatcggctttcacatggttctctaatttgccatacaattttatcaatagtttggccgatttggagaaacaatttcacagttacttctacagtggggttcatgagatgaagttaactgatgtgacatcaatcaagcagaagcat

SEQ ID NO: 97705 - DNA, 285 bp, Oryza sativa
  Clone ID: PAT_MRT4530_95682C.1
atgcagcacaaacgggctttagaagcgaatagtcctgacatagcctcctcaccactgggccagaaaatcagagactcgagcacaacgcccgaccttcccggaggcggacctatccatatcggaaagcatgcgtgcatccactcgaataaccatcgggtgatcgatggaacaccgtatctgattctgctgcactatgctgatcagctgatgcggtccacacgttggcacgttgctgtatattctgggaagcatggcgtgttctacgccaacacgacgacaagtggc

SEQ ID NO: 97706 - DNA, 1404 bp, Oryza sativa
  Clone ID: PAT_MRT4530_95683C.1
atgccttattattgcaattggataatctgtcctcatcctgggcgtatgtcccatccaagtgatttcgacaaactacagcaatatggggatggaacttgcagtacttgctccaggttctgagcgcaagactgaggactttaaggcatgttatttcactactatacttcttttgtcgaatgcaatcgccaaggggagactttggttaatgagggagtcataataatgaaagatattgtagagacagagttgggaaaagttggcactggagtccttaatgttggtttaccagcatatgtaatccttattgcactccttcggtcgacaaaagctaatgcatgttggcctacgcttaagtgattgctttgggaatacatctgattataggccaaaacatacactctatgaatggttctttgaccctcttttggtcatctaagaacaaattaaagccgtgtattttacagaagagccggtaaaatatctcaaaattcgagtttagttgatagttgtccctgatcctctccagggctggcttcccgatgtgtcgtcacgggattggcgaaataaggtcgaaatagacacagttgctcgaagacggcagcgcgatcttgtattcgtggtaaaaatactaggatgagaggggactcttcgatagtcaggaccgtcagcgagcgtctttgcttcaccgaacgttcggttgcggtcaatcaacctctggggcctgttccttattctaagcaggctgatttaggcttgatgcatatccctgaggctatattgccagctgcataaggaagcgaactagatgctacaatggtcacgctaagcgccatctacacataccctgtgaaggttttaaagtgatggaaactactcattgaagttattaatgtgggattaggagcatttctaatcattaatgcactcctttggtcagctaaagctattcttcttggcctactcttaagtgttggctctgttcttacatctaacaaaaggcctaaacatacactctatgaatggttctttgaccctcttttggtcatcaaagaacaaattaaagccgagaattttacagaagaggaggaaaaatatctcaaaatgcgagttttgttgattggtggccctgatcgcgtcaagggcagtcttcccgatgtgccatcactggatgagcgaaaaaaggccgaaatagacgcatttgctcgcagactgcaagggatcacaaagtcgatatcaagataccctaccgcgaagcgacgcttcgatattcttgtcaagcagctcttgtctgagcttgagaggacggttttgacgcgtcatgacaattgcaacgcctggttttgcaaatacaaccagtccgttaaatccatgttccatggagtcagaaattgttacgatacctga

SEQ ID NO: 97707 - DNA, 1321 bp, Oryza sativa
  Clone ID: PAT_MRT4530_95684C.1
tttttttttttttttttttttttttggagcgaacactgaacatcatagttcacaaaatatggagtttactttaagtacagttctacaaagcttctacaaggtgccatacacacttgtaaatgcaactagtgcatccagcttcagatccggcaaccgattcgtcaaagcctcagacataaatgctgacacctcagtatttaagaaaagagattacagcaacagtgattacatcaatcaattccaaccgtccaatgccatatggagcagtacagagaaatcacaaccgcaggttctgttcccttaatctaaactagcctttgccttctttgaacttctccagacttcagaatttctacagaagttcaggttctctcacttagcgacagatttctcaacaggcttcctcatctgtagaggctttgcaaatgtaacatcctccaaggggactggaattggaccagcagcttgcttgtaaatagtagatggcctctttcgaacttgacttggccgaagcatgggaagatctggggcgaggtcatcctttggtgttattgggcggaggtcactttcatctggaatccaacctttgaggaccagattgtccttcactttcaccgtaatgagagaaaacccaggaactttgttggacatcttaccaacaaaatacttgccaacaataccatctttgactgaattactttgcaaggaagcactagtataagtggaggcttggctgagagaagtcttaaccagattggcagacggaccaacactaccacctgatttatgattgatctgtatcccatcctgttggatatttgagctatcttctgtgctgtgaagaggtgggacgctctgaatgggctgtacactatatggtttttcatgcatgccatactcagacttccgtggacgaccacgcttacgcttagaaccagagcttgatgcctctatgggttcattaggtgtaacagctttattctcttcagatgtcatctttggtactttgcttcaaccttttgtagctgaacctaggaacgatgagaataccagcaaaagtgtattcacaatttttctccccctgcaatccgattcgaaccgagatgatcgattgatcgccgtccttgcgccgcaccaagggggataagagcagggcagggttcaggtaagaggacgaggcagtccgcaccgtgcctcccgggccggttcgccggcggcgagagcgcgcgcggaggcgaggcgaggcggcgcggaggagaagggctcgccgtgtgccaccggcgaggtagagagagatgggggaggagtagacgagacgagt

SEQ ID NO: 97708 - DNA, 386 bp, Oryza sativa
  Clone ID: PAT_MRT4530_95685C.1
atgagcaatccacgtccgcaaaacgggcagaatccacgccacgttcgtgcttggacccaccaacatgaggtcctcgcgtccaaagaaggtcacaagttcttcggtgatatcgaggtcacgtggggcagggagagagcgccgcagccgcactgtggagcgagtagcttctccatcgttgctccgcgcgcgcactcgtccagctccatgtctggcaccagccgcctcgctccaagtctggcgatggcgccccactccacgtctggcgtcgccgcccgctccacgtccaacaccggccgccccactccacgtccggcgcccacctacctgtgcttggaccgcgccgggagagaagcgatgagtgggacccaccacgagtggcctgcact

SEQ ID NO: 97709 - DNA, 935 bp, Oryza sativa
  Clone ID: PAT_MRT4530_95686C.1
ttttttttttttttttttttagcaacatgtaagggcatgaagtgaactggcggctcaacgcgttacacatcttttgtcaagcactgtatgaggatgatacacacgtgatgctacaaaacgtgatgtacaagaagaatcatttgatgcgaatcactaagggaacatccttacagtcttaatatacaacaaagagcgagagtcgcagaaaccttgaaacaaaatggtttctatgctcatgctagttgctagcattctttgtgacatcaaggagaaccaaatgtgttctcctttctaatttctacgtggcctgctgtcaaatattcctccgaatttccaggacagatggaatattaacagaatcaggagcttacctccagcgcaaacttcacactgcaataatccaatgcctgaacttctacttttgccagtttgacatcaataagcgagcttggatttggctcacgggatgaggcaatcagtagtagtgctccctattcggccaggagtccaataccggaaaatggatctccccaatatgttcttagaaggaagagggccccacacatgtgaatcataactgttgtttcggttatctcccattaccaaaactgagttctcaggtacttgcactgggttcatgtcataagaaggtggctcaagaatgaactcttcatttctaacttcaccattgacaactagttttcctttatgaacctccccaacatctccctccctggcaacaattcgtttgatgaaaacatcattgtcagtataaccgacctcctgcagcactggtggacttttgaagattactatgtcatttatacatggctttctaaagtagtatgtaaccttctcggcgacaatccggtcgccgacgtcgaaggtggggaacatggagagcgaggggatgaagcgcggctcggccctcgtgc

SEQ ID NO: 97710 - DNA, 885 bp, Oryza sativa
  Clone ID: PAT_MRT4530_95687C.1
atgcagtggggaacttctctccgctgcgagggctggaggtcccgtgctgatgaggagaccgtggatgggatggtgaagtgtgagaaatggattcgagatgacgaggagaggtcagaacaatcaaagacgtcatggtggctcaaccgcctcattggccgaacaaagaaggtctctgttgattggccatacccgtttgtggaggactgcatgttcgttcttactcttaccgccgggttggagggttaccacgtgaacgttgatggacgacacgtcacatcatttccgtaccgcactggatttgtgcttgaagatgccactggcttatcattgaatggggatcttgatgtgcaatcggtgtttgcagggactttgcccactgcacaccctagcttttcacctcagaaacacctagagatgttgcctatttggcaggcccctccccttccagacgaaccaattgagattttcattggcatcctgtcagcaggcaaccattttgctgaacgtatggctgtgaggaagacatggatgtctgctgcccagaagtcctcgaatgtcgtggcccgtttttttgttgccctgaacagcagaaaagaagtcaatgcagaattgaagaaagaggcagagttttttggggacattgttattgtgccattcatggacagctatgacttagttgttctaaagactgtggcaatatgtgaatatggggtgcgtgttgtttccgctcgatatataatgaagtgtgatgacgataattttgttagacttgaatcagtgaaggatgaacttaagaaaataccaagaggtaaaagtctctatgtgggaaacatgaattatcaccacaagccattgcgcactgggaagtgggctgtcacttatgag

SEQ ID NO: 97711 - DNA, 332 bp, Oryza sativa
  Clone ID: PAT_MRT4530_95688C.1
gggcgacgggacggcgcggcgcgacggcgacagtgcgcggcgtgggcggggctcgaggcgctgatggcgatggcggtgacgcgatggcgcgcggcaccgcgcgcagggcgacggcgacgggatggcgggtgacgcaacggcgacagcgcgcggcggctcagggcgcgaggccgacggcgacggtcgagcggcgcggcagcgacagggtgcggggctcgaaggcgtggcagcgcgaccggcgacgactcgcggcgcacggcgatggcgacgcgacggcgacggcgtgcggcacgatgggacgcgaggggggcacggtagcggcggctcggtga

SEQ ID NO: 97712 - DNA, 406 bp, Oryza sativa
  Clone ID: PAT_MRT4530_95689C.1
tttttgtttgttttttttttcaccaacttgctgttacacagctgcgattgatgacagaccctcagcaagacaccctttttacactacactctcacaacagcaacggtaggggttacaaaacgtacagcacagcagctccatgccaagtacgtttagtacacctccacatgccactggttcttgtgcttgaggttctcgacgaactcgtcgaagttgcgtcccttctcctcggacacgcgcttgagcatgtccaagatgcctggcatcatgcccttcagaccgcagaagtacatgtgggcgccgttgtccagcaggtcaaacacctcgtcagcatactcctcaaccttgtcctggatgtacatcttgccacccttcctgttctgctgctcacgagacagggcatagt

SEQ ID NO: 97713 - DNA, 486 bp, Oryza sativa
  Clone ID: PAT_MRT4530_9568C.1
atgttgaggcggcgacaggcgacggttgcggcgtgcacggcgacggcgacggctccagcatgtgcggcgcgcagttccgacatgcgcggcgacggcggcggttccggcgagaagcgtggcgatggtggcggttccggtgtgtgtgacggttccgtcgagaagcccggtgatggcgactgttccggcgtgcgcggcgacggcagtcgagcgcgagtcaatggctggtctccggcagtccggcgtggcggcggccgtgcttccatctcttgcgcgcaggcgacggcagacggcggccgtggggcaggcgacaacgggtcttccagcgcagtgaaggcaggcggcgacgagtcttccggcacagcaagcaagcggtataaaagttggagcaaaaaagcaacaacaactaagggtatcaatgtcttttattctaaaactaacaccgttaaactgggcgtcaaaagtgagggagcacacaagaaccgaaca

SEQ ID NO: 97714 - DNA, 664 bp, Oryza sativa
  Clone ID: PAT_MRT4530_95690C.1
gggcgattgggatctcgaggggcggcgggctggtgaggtgaggtgagttgagttggggattgattgatcgattctccctccacaataaacatcattttcttctttgctctccttgctattgctgcatgtaccgcctctgcccaggtggatgctgttactcaaatttacaggcaatatcagctgcacccccatctcatgctccagcaacagatgcttagcccatgcggagacttcgtaaggcatcagtgcaccacactgacaacccccttcttccaatcacccgtgtttcaactgacaaactgccaagttatgcagcattagtgctgccaacagctcaggatgatcccacaacagtctcactgccaggacattaacagtgttcaggctattgtgcaccagctacatctacaacagtttgctgacgatctacttcaatcatactcaaattcaaggccaacctatgctgtacctaatcttgtccccaatatgcggaatctacccaacctacaacactgctccctgtaacattcctaccgtccctggtatctgatattgaattgtatcaatatacaagcacatcacaccaaaataaagtcatgcatcatcttgtatgacaacctgaaccatcaaaatgatacaaatctgaataccaccgacatgcaat

SEQ ID NO: 97715 - DNA, 627 bp, Oryza sativa
  Clone ID: PAT_MRT4530_95691C.1
cgaaccaagagcgccgacctgcaaatctccaaaaccccggtgtacggtcgcctcaaaccccgatctccccctccggccgccgtccgccgccgcggcactccggccggcgggatgagcccctccgggcggctccccgcccccccccgcgccccccgcgtccgcccgcggctcgctctggtgccgtcaccggaggcggccgagtccacgccggggacgcggacgcgcaagatcggcggcgccgcctcggtgttctcgctcttcaacctcaagccccagaacaagttctggtcggagtccgtcatccgcacggaattcgatgacttggagggctcaacatcgcgggactccagcaagaaggcgctgctcaacttcactagagctggtaatattgccaactatatgagccttgcagaggttgattctatatatctttcagtacctgtaaacttcatctttataggatttgatggacaaggaggtcacgagtttaaactgggacctgaagacactggaacgctggtttacaaaaatagatcacatatttgagcaaacaagaatacccccagttggcgaagttcttactccgttctacaagaccagtgttaagaaactaaagcaatatgacct

SEQ ID NO: 97716 - DNA, 252 bp, Oryza sativa
  Clone ID: PAT_MRT4530_95692C.1
ccgaccttgtcccaaaagatggtaccatgtgccaagatcatggctgaaccggggcggcaacctgctggtggtgctgaagaagtacggcggcgacctcgccggcgtcagcctggcgacgagaaccacatgaacgaattgcagcgagagatcatcaccaccatttgatacagtcgtcgacggccgcgtgaacagcttcctcctgtagcacgcagaattcgtcgatggtatttacacacacagacgaacacctta

SEQ ID NO: 97717 - DNA, 876 bp, Oryza sativa
  Clone ID: PAT_MRT4530_95693C.1
atggggaggttgagcttgcttctcgtggttttcacggcggcggcggcggtggttgggctcgccggagccagcttccgcgacgagtgtgacatcccgtgggagccccagaacgccaggttcaccgacgacggcaatggcctctcgctctccctcgtcagcaactactcaggctgcatgctgcggacaaagaagcagttcatcttcgggagcgtctccactcttatccaacttgtccccggcaattcggccggcaccgtcaccacatactacacatcgtcggtcggagacaaccacgacgagatcgactttgagttcttaggcaacgagaccggccaaccctacaccatccacaccaacatctatgccaatggcgtcggcgacaaggagatgcagttcaagccgtggttcaaccccaccgatggctaccacaactacaccgtctcctggaccgcttgcatgattgtgtggtacatcgacgggacacccatccgagtgttccgcaactatgaaaaaagcaacggtgtggcgttcccaatgaagcggccgatgtatgggtactcgagcatatgggcggcggaggattgggcaacacagggtggccgtgtgaaggctgactggtccaaggcaccttttgtcgcgaactaccatggcctcaacatcaatgtatgcgagtgctctactacctctggtggaggcaacagttgtgctgcaaaatgtgcttcaacctataatagcaagtcatcagtatgccagttgagtgattcagagctcgcacggatgcggaaagtgcaggatgagtataggatctacaactattgcgttgatcccaagagatacaacggatctgtaccagtcgagtgtagcctaccacaatag

SEQ ID NO: 97718 - DNA, 135 bp, Oryza sativa
  Clone ID: PAT_MRT4530_95694C.1
atggggaggatgcacggtggcccagcaaggagtggagaagttggggtcacgcccgcagcacatgaagccgatgctgagaggacgtggtcgccagggccaacaggcacaaccggcaacgtgaaagtgttcggctga

SEQ ID NO: 97719 - DNA, 4758 bp, Oryza sativa
  Clone ID: PAT_MRT4530_95695C.1
atggcgcggatacggcgcgcgagctccggacaccacgtgacagagaatggggaagaagatgaggaaaggaaaaaaaaaaaattctcgcagcatctacctcttgccgccttcgccgccgccgccgcgagaaacccagcggcgtcccgggaaaccctagccccatcccccaccccgccgcgcgccctcatgggtcgtccgcgtcggcgccggtagtagccaggagcgggtggcccgccccgtcgccgacgaggggcatccaacgatggcgcggatacggcgcgagagctccggacgagggcttttggaagatgctcgaaggaaaaccttcttaaattttttggctgtggtatttactctggaattgattaccagaatcaatttgattgcccaaacatcagctctaaatgtcgttgcccctgctatatctccatctcaaagttggagaccagttcgctccatcttgttaaaagcaaaagttgacattagtatttcagacagcgaacaaagacgaaagaagctatattcatcaccagctaatctatctgagcacccttcaatttcagtgccaaggtagagcacactttaaggatgttttgtgctatcaatatgatacttcctatgaatgatataaacattatttctttatatttacagccctctccaacattcacaatatcacctaaaccctctccatctcaagcatctacagtaccaagacacagtgcggataccagcaatgaaaaacacatgagcttgattactatcatttgcatatttattggtgctctaattgctgtcttggtgattgccatgtttatttgcttctgcaaattaaggaaagggaaaaggaaggttcctccagttgagacacccaagcaaagaacaccagatgcggtttctgcagtggactcacttcctcgcccaacaagtacaaggttccttgcatatgatgaactgaaagaagcaaccaacaactttgatccgtcaagtatgcttggagaaggaggttttggccgtgtctttaaaggggtactaactgatggcactgccgttgctataaagaagcttactagtggagggcaccaaggagataaggaatttctagttgaagtggagatgctgagcaggttgcaccaccgaaaccttgtgaaactcattggttactatagtaaccgtacaggattgggagctagccgccccttggactgggacactagaatgaggatagcactagatgctgccaggggattggcataccttcatgaggattctcagccttgcgtaatccacagggatttcaaggcttctaatatattgcttgaggatgactttcatgctaaagtgtctgattttggtttggccaaacaggcaccggaaggttgcacaaattatctctcaacacgtgttatgggaacattcgggtatgtagcaccagagtatgcaatgacaggacacttgcttgtaaaaagcgatgtatatagctatggagttgttctacttgaactacttactgggaggaggcctgtggatatgtcacaaccttctggccaggaaaatctagtgacatgggcacgaccaattttacgagataaagatacgctagaagaactagctgatcccaagcttggtggccagtatccaaaagatgattttgtgcgagtatgcacaattgcagccgcctgtgtttcaccggaggcaagccaaaggccaacaatgggcgaggtggtgcagtcactgaagatggtccaacgctctgagttccaggaatccataccaacacctccagcacgacccaatgttaggcagtcctcaaccacctatgaatctgatggcacttcatccatgttctcttctggacccttttcaggcctcagcccctttgagactgagaacatatcgagaacggctttctctgaagatcttcacgaagggcgagcctcagagtctctgaccacccatttgaaggctggtggtgcaagtgacctaaccagttttattgggagggttcggtgctcgccggcggtggcgctggcgctcgtcgtggcggcggcggccgcggccgcggcgacggcgaagctgtacagcccggcggacaggatcctggtgaactgcgggtcgacgacggacgggctggacgcggaggggcgcaggtgggtggcggacgcgacgaacgacacgtggctgacggactccggcaagtcttcgatcatggcggccgccgacgagctggagacgatgctgccgtcgtccatcccctacatgacggcgcgggtgtttaccatggacacggtgtacaacttcacggtgaacccgcgcgaccgccactggatccggctccacttctacccgtcgtcgtacaacgggctggagccccaggacttccggttctccgtcttcaccaccacgggatacacgctgctccacaacttcagcgtctacttcaccaccaaggcgctcacccaggcgtacctcatcagggagtactcgctgccgcgtgtcccggagggccacttcggcgtcaccttctcgccgtcgcccatgatgaacgtcacctacgccttcgtcaacggcatcgaggtgatctccatgccggacatgttcaacaacccggccaccatggtcggcttcgccgaccagaccgccgacgtctccgccgccgcgttccagaccatgtaccgcctcaacgtcggcggcgcctacatcccgccgtccaacgactccggcctcacgcggccgtggtacgacgacacgccgttcgtccagggccccctgcgcggcctcgtctacaacgccggcccgcacttccacatcaagtaccccagcgacgccgccgagtacgccgcgccgccggaggtgtacctcggcggccgctccatgggcagggaccagcgcctcaaccagaactccaacctcacctggagcctccacgtggagtgcaacttcacctacgtcgtgcgcctccatttctgcgagctccagctcatccacggcaaccagcgggtgttcgacatctacatcaacaaccggacggcgcagacggacgtggacgtgctggagatggcgacggagcgcggcgtgccggtgtacaaggactacgcggtgaggctgagcaacgacaccgccgacgagcatctgtgggtggcggtgcacccctcggtgatgctccgcccgcagttctacgacgccatcctcaacggcctcgaggtgttcaaggtgaacaacaccggcggcagcctggcgtcgccggaccccgtcccgtacaagctgctcgcggagaaggagctcggctggggcgggccgccggagttctccaccgacaacccggccaacatggcgtcggtgatgggcggcacggcgggcggcgcggcggcggccgggatcgtggcggccatctgcgtggtggtgtacagcaacaagaggagcaagaagctgggcggcggcggcgccgactcgcacacctccgcgtggctgccgctgtaccactcccacaccagcggcaagtcgtcggggcacatcacggcgaacatcgccggcatgtgccgccacttctcgttcgcggagatcaaggcggcgaccaagaacttctccaacgacctggccatcggcgtgggcgggttcggcgtggtgtaccgcggcgtggtggacggcgacgtgaaggtggcggtgaagcggtccaacccgtcgtcggagcaaggcataaccgagttccagacggaggtggagatgctctccaagctccgccaccgccacctcgtctccctcatcggcttctgcgaggaggacggcgagatggtgctcgtctacgactacatggagcacggcaccctgcgcgagcacctctaccacaacggcggcaagcccacgctgtcgtggcgccaccgcctcgacatctgcatcggcgccgcccgcggcctccactacctccacaccggcgccaagtacaccatcatccaccgcgacgtcaagaccaccaacatcctcgtcgacgacaactgggtcgccaaggtctccgacttcggcctctccaagtccggccccaccacgctcaaccagtcgcacgtcagcaccgtcgtcaagggcagcttcggctacctcgacccggagtactaccgccggcagcagctcaccgacaagtccgacgtctactccttcggcgtcgtgctgttcgaggtgctcatggcgcgcccggcgctcgacccggcgctgccgcgcgaccaggtcagcctcgccgactacgcgctcgcctgcaagcgcggcggcgcgctgccggacgtcgtcgacccggcgatcagggaccagatcgcgcccgagtgcctcgccaagttcgccgacacggcggagaagtgcctctccgagaacggcaccgagcgccccaccatgggcgacgtgctctggaacctcgagagcgcgatgcacttccaggacgcgttcgacgccgccgccggccgccccgtccccgcgctcgacgccgccgccggcagcagcagccacctcgacgacgggagcacggccagcatcaacacgctggccacgtcgtccacgtcgcacccgcacgagccgtgcgtcgacgttgtcttggagcccgacgacgtcgtcgcggagcgcgccaccttctcgcagctcgtccagcccaccggccggtgaacctgttaaatcccattttaatccccccctgggaaaagaccaaattgttacaagaacattcggtggctttgtatgatggaaatgattttgttccaagttcttttttgctcccat

SEQ ID NO: 97720 - DNA, 1112 bp, Oryza sativa
  unsure (1)..(1112): unsure at all n locations
  Clone ID: PAT_MRT4530_95696C.1
gtggagatgctgagcaggttgcaccaccgaaaccttgtgaaactcattggttactatagtaaccgtgagtcatcacagaacctactgtgctatgagcttgttcctaatggaagcctagaggcttggcttcatggtacattgggagctagccgccccttggactgggacactagaatgaggatagcactagatgctgccaggggattggcataccttcatgaggattctcagccttgcgtaatccacagggatttcaaggcttctaatatattgcttgaggatgactttcatgctaaagtgtctgattttggtttggccaaacaggcaccggaaggttgcacaaattatctctcaacacgtgttatgggaacattcgggtatgtagcaccagagtatgcaatgacaggacacttgcttgtaaaaagcgatgtatatagcttggagttgttctacttgaactacttactgngaggaggcctgtggatatgtcacaaccttctggccaggaaaatctagtgacatgggcacgaccaattttacgagataaagatacgctagaagaactagctgatcccaagcttggtggccagtatccaaaagatgattttngtgcgagtatgcacaattgcagccgcctgtgtttcaccggaagcaagccaaaggccaacaatgggcgaggtggtgcagtcactgaagatggtccaacgctctgagttccaggaatccataccaacacctccagcacgacccaatgttaggcagtcctcaaccacctatgaatctgatggcacttcatccatgttctcttctggacccttttcaggcctcagcccctttgagactgagaacatatcgagaacggctttctctgaagatcttcacgaagggcggtaacagtggtggtttgtgaagctgttttgggtagagcctcagagtctctgaccacccatttgaaggctggtggtgcaagtgacctaaccagttttattgggaggtaaatcctgtaaattccatttttattcaccacctgcgaaagaccaaattgttacaagaacattcggtggctttgtatgatggaaatgattttgttccaagttcttttttgctcctat

SEQ ID NO: 97721 - DNA, 247 bp, Oryza sativa
  Clone ID: PAT_MRT4530_95697C.1
ctgccatggcgctcgtccgctggtgaccgcgggagccggcggcgcgccggcgccacgctcgccttcctccgtctcaggcgaggaggcactgaggcaacatgaactctacggtgatggactacctgtactggctccggcctcgggcatggccgccggcaacaaggaagaagacatgacatcgctgcggatgtccagttgcatgttagacaagttcaaaagaagaaaaaatggaacaatgggcgaataa

SEQ ID NO: 97722 - DNA, 255 bp, Oryza sativa
  Clone ID: PAT_MRT4530_95698C.1
tttgttttttatgcaaagcaggacaattattcaaatatagaatgatgaaagacgcaagaagaaaaaagaaagatgaaaacaaaatatgactacaagagccatgagagatgtgcatacacagataacaatggcagacataaaatgaaactgagaaaatgcgtagcagatgctacatcctactgataatcaacagtaagagttgccacgagtgaaataggatggataggaggatacagataatggctagctccactg

SEQ ID NO: 97723 - DNA, 341 bp, Oryza sativa
  unsure (1)..(341): unsure at all n locations
  Clone ID: PAT_MRT4530_95699C.1
gcgtgcccccgctgctgcggactcggcctgtcgccactgcgtgccgccgtcagccgcctccgccgacgtgactcagccgccgctngctgccancgacgcaaatgaaaccttccatggccggcctcgggaggaggatgggggaggagagagaacgggaggaaagaagataggaagggtagctcaatggcatttttgtgtaaatagactaaaaaattaaagggtagtgggtctttaaggtggagtggagctgtggagcagaaaaacccagctatacccctgtagtacaaatttgtgaagtagctctactgttgacgtttgatgtcgtaaaaaaaaaaaaaaaa

SEQ ID NO: 97724 - DNA, 1881 bp, Oryza sativa
  Clone ID: PAT_MRT4530_9569C.1
gcccgcgggcggcaaaacaactccgcccccgagaaaaggaggccacgaaattacgagaatgccactccacctcgcctcctctcccgccgccgccgccaaggtctgcgccggcgtgcgcgcgtccccgcgccacctcctcccccgcgctcttgaccaccagagccgccgcgtcctcagcttgtcgtcctcgtcgtcggcggggcgtgcggcgggcgtgcgggccatggccgcggcggaggccggtgcgtcgacggcgacacaggctaagtcgagcgcccgagtcaaaccagcactgggatcatgggccgttctgtcggtcttgcccgtgcttgggcatcgccttctcgcctccgggttttctattatttcgactggtggcacagcatcaagcctggaagcagctggagttaatgttacaaaagttgaacaaattacaaattttcctgaaatgcttgatggtagagttaaaacattgcaccccagtgtacatggtggtattcttgcaagaagagaccaggagcatcatcttaaggcattgaatgagcatggcattgggacatttgatgtggttgtggtgaacttgtatccattctataacaaggtcacctctggtgtaatttctttcgaggatggcattgaaaacattgatatcggtgtatacagaaaagggtcttgagatcctcaaagggaaatcaaagacattgaggatactggaggcgaagagaagtggaaaagggatgctatcactcaggcaagtcagtggtggctggttggctcaagagtctgatgatctaacccctgaagatatcaccttcacaacagtgtccgagagagctcctcaagacagtgagctctctgatgccaaatttgcctggctttgtgtaaagcacgtaaagagtaacgccattgtgatagccaagaataactgcatgttaggcatgggaagtggccagccaaacagactggagagtctgagaattgctttcaggaaagcaggagaggaggccaaaggagctgctttggccagtgatgcattcttcccattcgcttggaacgacgccgtggatgaggcgtgccagaacggcatcggcgtgatcgcggagccgagcggcagcatgagggacggcgacgccgtcgactgctgcaacaagtacggcgtctccctcctcttcaccggcgtcaggcacttcaggcactgagctagctagcctcatgaaccttgatcttcctgcaaaaaaaggaaaaaaaacatgggcatgtcagatcgatcgctcttgtctgtatcacaagagcatgcagatcgaccagcgtttgatcaccttgagaaaaactcttgacggcttgtactaggctgcctgccacctggtgtgacagaatttgatcagcttgacattttgcaataagattcatggtgataataagatttcactcaggcaagtcagtggtggctggttggctcaagagtctgatgatctaacccctgaagatatcaccttcacaacagtgtccgagagagctcctcaagacagtgagctctctgatgccaaatttgcctggctttgtgtaaagcacgtaaagagtaacgccattgtgatagccaagaataactgcatgttaggcatgggaagtggccagccaaacagactggagagtctgagaattgctttcaggaaagcaggagaggaggccaaaggagctgctttggccagtgatgcattcttcccattcgcttggaacgacgccgtggaggaggcgtgccagaacggcatcggcgtgatcgcggagccgagcggcagcatgagggacggcgacgccgtcgactgctgcaacaagtacggcgtctccctcctcttcaccggcgtcaggcacttcaggcactga

SEQ ID NO: 97725 - DNA, 446 bp, Oryza sativa
  Clone ID: PAT_MRT4530_956C.1
atggcatgcatggctaccaacgcccccgtcgtcttcttcttcctcgccgccgccgccatcgtcattagctgtcacgcagcacgcgcgggcaacgccaccgccaccgccgccgccgccggcgacggcaagctgtcgggcatcaccgtcacggcggcgaggacggggaaggtggtggaggggctgccggagtacgaggtggccgtggccaacgggtgcggcgcctgcccgcagaacggcgtcagggtgagctgccccggcggcggcggcggcggcgtgccgagcgtcgagccggcggacgagagcaagatccgcgccgacgaagccgggctcggcctcgtcaacgacgccatatgccggtggcgaagggctcgccggtgacgttcgtctacgcgtggaagcagccgctggagttcgccgccgcgcaggcgacgccgcggtgctcgtga

SEQ ID NO: 97726 - DNA, 2778 bp, Oryza sativa
  Clone ID: PAT_MRT4530_95700C.1
atgggttcagataagcagagtggtagcccattattgggaaccctcaagatgaagagcgtcaggacgatcctgacacacacatatccatatcctcatgaacactcaaggcatatcatgactgcagtcataattgcatgcctctttttcatctcgtctgacaatatgcataccctcatacataaactggacaacaatatcaagtggtggtccataaacttctgcaaatgcataactaagttgttaggagaagtgattctgtcacttgtattgcataattgcaggaacaagacctggaatttggaccatattccagaactgtactattgctcattggaagattatttctgcatttgtttcagtcactgtgggaatcttgctgtgcacaaaagtaaatctttcagtaggaattctgatccaaatttgcttgcttttcttgagaatgaaaagggaaccacctggatatcaaattttctccgtatgaatgagttaaaagatcagatatgttcatcttggtttgctccggttggatctgctagtgattatcctcttctatccaaatgggttatctatggggagctagtttgcagtggatcctgtgctggcccttcagatgaaatatctcctctgtactcattgtgggctacatttgttggcctttatattgctaactttgttgtggagagatcaactggatgggctcttacacacccatcaactgtattggaggaagagaagctgaagagacaaatgaaaccagatttcctggacatggtaccttggtattcagggacatcagctgatttattcaagactgcatttgatcttatggtctctgtaactctttttgttgggcgatttgatatgcgcatgatgcaagctgcaatgaaaagaacaacagatgaaactcagaatgatgaccttttgtatgactacttcaatgaaagagaagacctttggtttgactttgtcgcagacactggtgatggaggaaattcatcatatacagttgcccgattgctagctcaaccatccattcagactgtaattggtggctccatgcatactcttccacgtggaaatctgcttcttattggcggagaccttgcatacccaaacccatcgtcatttacatatgagatgcgcttctttagtccttatgagtatgccctgcaacctccaccttggtatagagctgaacatatagctttggacaagcctgaggttcctcttggtatatcaaagatgaaagattatgacggaccacagtgtttcataattcctgggaatcatggtggatggtttctgcctcagaagaagagttattttgcattgcggcttccccagggttggtgggtatttggacttgatctagctcttcatggtgacattgatgtataccaattcaagttctttgcagagctttgccgaaacaagatcttgttgatccactacatttctgaagttctgcagattggagagaatgactctgtgattgtgatgacacatgagccaaactggcttcttgattggtattggaaggagactactggcaagaatgtttcacatttaatccaggactacttgaatggaagatgcaaacttcgtttggccggggatttacaccattttatgaggcattcagctaatcagatagacaaccctacttctgtgcaacacttgcttgtcaatggatgcggtggtgcatttttgcacccaacacatgttttcaaaaactttgagcagttctctggagctacttatgagtgcaaggctgcgtatccatccttcgatgactccagcgggattgcgctgggtaatatactaaagttccgcaagaagaattggcagtttgacacaattggtggttttatctacttcatactggtattctcaatgttcccacagtgtaatcttggtcacatcttaaatgaagaaacttggtcagggcgtctgggaagcttctcaaatacaatatggagtgctttgctctatatttttgaacactcttatgtctcttcagtaggaagtctaactttattactggcatcatattcatttgtaccatccaagctctcacggagaaaaagagctattataggtggtctacatgttttggcccatctcactgcagccctgcttttaatgttgctgttggagttgggaattgaaatttgtattcggaatcatttattggcaacatcaggttatcacacactatacgattggtatcggtcaatggaaagtgagcatttccctgatccaaccggtcttcgtgctcgcttggagcaatggacacttggactgtacccagcatgcataaaatacctaatgtcagcctttgacgttcctgaggtcatggctgtgacaagaattaatatctgcaagaatgggatgatgtctctttctcggagtgttctgatgatgtactacacttctgtgtttatctacttctggattttctcaactccagttgtctccctcatatttggtagttacctatatatctgcatcaactggttccacatacactttgatgaagccttctcttcgttgcgtattgcaaactacaaatcattcacaagattccacattaagaaggatggtaacctggaaatattcacgcttgcagtagacaaggtcccaaaggattggaaattggatcccaagtgggaggcagaggaaaggaggcctcatcagctcagccatcaccggaagcaccccagcaagtggaggtcatcctcttccccagaccctgtcacgtcgatccagctgacttag

SEQ ID NO: 97727 - DNA, 144 bp, Oryza sativa
  Clone ID: PAT_MRT4530_95701C.1
atgcgcgcacaggcgccgacgtacgagccgcccgcccaccggaacgacgtgtcaaccaacccgccgcagcagctggcggggacgcaggacaacggcgcgactgttacctccctcggcgtcaggggtggcgcgacgacgacgtga

SEQ ID NO: 97728 - DNA, 204 bp, Oryza sativa
  Clone ID: PAT_MRT4530_95702C.1
atggatgattttgaggaacatggtattagttctcgtgaagactcggactgtagcgaggcaaattgtgcaatttcagattatgttccaagcaaggatgccactggtgagcactctgcaggcaaagataacagctcggcagaatctgaaagtaacagagttgaagtacagcagtcttcagattctgcaataaacaaaatggaggta

SEQ ID NO: 97729 - DNA, 946 bp, Oryza sativa
  Clone ID: PAT_MRT4530_95703C.1
aaagcatctgaagacatagacgcatatggccatggttcagtacagtgagaatatcaagtatgacgaggagttttttgtgaactcccgtgacaacaagctgttcacctgcagatggacaccgcataaacaagaaccaaaagctatggatcagtacagtgagaatatcaagtatgacgagctgcacaaatattcagacaccgccgctcgattggtgcgagccggatatgccgtttacgggattgatcatgaaggccacggtagatcatctggtcagagatgctacataccaaacttcggtgacatcgtctcagactgcgcaaactttttcacgagtatttgcgagaagccggagaacagggagaagaagaggttcctgtacggcatctccatgggtggaggcgtggcgcttctcctccacaggaaggagccaacctactgggatggcgccgtcttgcttgctcctatgtgcaagattcctgatgacatgcggcctcacccgatcgcggtcagcgctctgaaaatggtgtgcgctgtggctcctagttggagaatcatacccacaccggacataattgacaaagtttgtaaagatccagagatgagaaagcaggttcgctcaaatccgtacatatacaggggaaagctcccactgaagacctgtcatgaactcctgatggtcagcctagacattgagaagaacctgcatgaggtgacactgccgttcttggtcctacacggcggagacgacatcgtgaccgatccttcggtgagcaagctgctgttcgaagaagcatcaggcagggacaaaactttcaagctttaccctgggatgtggcatgctctgacggctgagcttcctgacgatgtcgagcgtgtctattctgacatcatctcctggctggacgaaaggtcggattgtgcaggcagtgttcctgaaactttctga

SEQ ID NO: 97730 - DNA, 176 bp, Oryza sativa
  Clone ID: PAT_MRT4530_95704C.1
acctccgctaagctcggcaaaatcagagttgtcagaaaggccatcgctaaatacttgactgttatcaaccaaagaaacagagaaagagtcagagaaactcttaagggcaagaaatactaccccatcgacttgagattcaagaagaccagagccctcagaggcctctccaagagcag

SEQ ID NO: 97731 - DNA, 321 bp, Oryza sativa
  Clone ID: PAT_MRT4530_95705C.1
gtgtttgtgacactacatatagcggaagggatgtagactgtattgaggaatacggaccccttgcactatataaggaggggtccgggtgccaataggggcacgatattgacccagatcatacaatcaataatacactcggccggatcaatccccggacaggagtggggcattacttgttgattaagaaggcctgaacctgcataaaaaaccttgtctctaaacccatctacttttctagcttgatagccaccccttttagtattgccgaaatcttgtctcgacaatagcccttaaatctttactatgcctaaaattctatac

SEQ ID NO: 97732 - DNA, 406 bp, Oryza sativa
  Clone ID: PAT_MRT4530_95706C.1
ggtgtttttttaaatttttggggttttctttttttttttttttttccttttccttctttttttctttcacacaaaaccacccccaaatttaacggggttataacaccttcaacataaccaccccacagcagggttaaacaccccaaaagagaaaacggcttcaaactacaacatttaaaatttccactgaaccaccccggaaacctactaaaacctgaaccttccaaaccctcattttgcaccaacggtcattttcccagcttttccccaaggaatttttaaaccccaccccactgttacatactggacagcttccccacaatgttcctcacacctaaaaatctttccagaaaatacaccttctcagatatcaacagaaaagtcctggatctttgcatgaatccga

SEQ ID NO: 97733 - DNA, 802 bp, Oryza sativa
  unsure (1)..(802): unsure at all n locations
  Clone ID: PAT_MRT4530_95707C.1
tttcttttaaacttgaattagacaatatattgcatgaatatttccctcaatggaattaaccacccgtgctattattactttggctgaaagtagatcgagacatactaatacacaatgaagatggtgagacagggagagacctccggtaagatggcaaataaaaagaactacaattgttacaacaattgtaccaacaaatgccccgataaatacatcatgcgccacctaaattatcgcatctcccaatgttctgttacctcttatgtaacagttgtctggctaggctgcccccagacaatatatatcgcagactatggtttccaacgggaataatgtacaattcacattctcttgttcctgtccctattccaatctcctgcagatcctagagatgaggtcaatgttgctttcctcagcttctgctggttctcatactcctttgcctgcgatgacacctgattcggatgccttgcagcattgacatggttttgcctcatatcaagcacaagccctctctcagacttgacaggagatgcgccatcttcaataggaacaggccacctaatagatcctttcccagggttattcatgcgtacagaatcattcttcctatcaactattttcttggtggagtgattatttccggcacgagctgcatcactattccgagatccagatgagctctcgggtgtaccaaatgggggatgaaggcttgcgggcctttcataaccttctcagaaggtgactttggccacttgattgtcccattgctgaatacctgcggactccaaacatncatgct

SEQ ID NO: 97734 - DNA, 1187 bp, Oryza sativa
  Clone ID: PAT_MRT4530_95708C.1
ctatatcttgtttgaaggatgcctccacgcaagcaaacctcccacaagtccaagcaccaaagggaccgctctcccaccccatcctctcatgatgatttggacagtgattggtccgggagagaggatgcggttcctcaggttgcgcgtgtggcttgggccgacactctccctcctcggcggtccactcaagctcttggtggtggtggtgatggtgagggctcctctcatcaaccgcaaacaccaccgcaccaacccaatgtccccacaggtccttttcgcattcatacacccaagagggatccggcggtgattcgccaagtgtatgattggaagcggaagactgaggttgttgctcctcgccgggatgaggatccgcgcccccttcgccgcaccgccacggattcgcggttttggactctctttcaacaagactttgatgagtctgtgatcaagtccaaagctcatcccaccgttcccatgcaatggatcaactaggaggagctgcaggcgcatgatgatccggtgctaaactttgtgattgcaaattgtgagctcatgggaattcgctctttcgtgactttgcagcagaattggtgcagcgaagtcatcgctcaattatatgccaccgttttctttgatccttattgtgccatgcattggatgacccaaggctcttactattatgtctcctgtccgcgatttgttgagatttggggttttgacgtctgttccttgctaaaccttcctgatatgcatgatcttcccattcctgccaacactaatctcctccctctttacactccaaatgatcctaatgtggtgttgggtaaagtcgacggtctcaaaccgtactttgcctgcttgaaccggatgttttgccggtcctttgtgcctaaggatggtgatgccagcagcattaaccacctctccaggaccgtacttctcaggttcaatcccctcctcatcgctttcatgttttgcactttgtgtgggaggagatccgcatggcctccattcagtacaagaaggggttggtctatgctcctcacattatgcggatgatcgagactgtcactcagcttcagtttcatcatgatgtgactcattcccagcttcacttgcgccttgttaaggcagtaaggttagctaagacccaactcttagtgagctcctcaacagagagtaga

SEQ ID NO: 97735 - DNA, 645 bp, Oryza sativa
  Clone ID: PAT_MRT4530_95709C.1
atggcggacggctatcggcggcgggcactcacggcggcttcgaccctcgtcccggccgcgtgcggtagcgtgggaggcatgccgtgcgtatcggcggcaaggggaggcgggcgtaagctcctcggcatcgctacgggcgacggccgtcaattgcgttgcggatggcctcgaaaggccgtcgagtcggtgtttcagatggcggatcgacgagggaagcaagatgtagctgccggaggggatcaatcgccccatcaccaggagcttcggcgcccagcttctaaagaaagctcaggagaacgccgttggggtgaacaagattgtcgtgcagaacccggtcaggaaggaaccagctccgaagtcggccaggtcgtacctcgtcccgataataccgccaaggccagcaccggcgccggcgtcaacgagaacaagaagccttcgaagtcggagggcaccggcagcagcggcagcggcggcggttcagcccacaagtactccaggaagaaggtcgtgaacacgcttacatctgggcttactgctcgttccaagcactcgtgtggcattactgagaagccaaaagaagtcgtcgaggacatcgacaagctcgacggcgacaaccagatgacatgtgggccccaccatttttag

SEQ ID NO: 97736 - DNA, 330 bp, Oryza sativa
  Clone ID: PAT_MRT4530_9570C.1
atggcgactgttccggcgtgcgcggcgacggcagtcgagcgcgagtcaatggctggtctccggcagtccggcgtggcggcggccgtgcttccatctcttgcgcggcggcggccgtgggcttcctgctcccttgcatggcgacagcaggcgacggcagacggcggccgtggggcaggcgacaacgggtcttccagcgcagtgaaggcaggcggcgacgagtcttccggcacagcaagcaagcggcgggcccgcccgccaccctcgctgacgggtggggcccacctgtcatccccgacctcgcgccgcgcccgccgcccgcccgtgccctag

SEQ ID NO: 97737 - DNA, 310 bp, Oryza sativa
  Clone ID: PAT_MRT4530_95710C.1
gatcactgttttttttagacaacttaagaggactcttagatagaactcgtagtcataaatacatttacagttcccaacttgataaccccaagaacaacatagccctatgcgttatgcctttggctgaggtaaaacttaactgacaaaataacccaatcccacccaccggcggcacgttctgaaggatgaacacttgaacattactccaaggcttcggggggtactttcgctgcgaaggattcttctagggaaaaaaaaaaagaaacccgcttaatcgacctctagactctttgctatgctgggctaacaa

SEQ ID NO: 97738 - DNA, 135 bp, Oryza sativa
  Clone ID: PAT_MRT4530_95711C.1
atggccgggtcggtggaagcctcggcctgcgatgtgaaggctaacgatgacatggtggccgagaaggcggtgatgaagctcgccacccgccgttttcttcttcccaagactcaccagctgtcgatgctgatctag

SEQ ID NO: 97739 - DNA, 516 bp, Oryza sativa
  Clone ID: PAT_MRT4530_95712C.1
atggcggtgggagcggcggcggcggtgatgggaatgaggatggcggcaaccaaggagtgcgacgtagcggcagcgtcactggccgagttccacgcgtcgcccgccggtgtctgcggcctcgtcgagtctggcgccaccgccgtgccaccgtcgtgccaccgctcttcctttcgccaggctacggccgtgcgcgctcgccgccacctccaccgctgcgaccgacggccttcgacagcagcggcggcggctgttggatggggatggtggacagtgcctcaaatattttatggacgtattcagcttggtgggcaaccacatcagtatgaagaactacatcaatattggccagaagaacctcatcagtatacgcatggtgaagggtatcattgtatgcaaggaacaatgtcgcatcactataacatggacaatgtaaggaataatgagtgggccgatagagatgatgagagaacagtttgggatcgatcaaacctatatgtatcaatgcccatatcctaa

SEQ ID NO: 97740 - DNA, 3401 bp, Oryza sativa
  Clone ID: PAT_MRT4530_95713C.1
ggacacatgtcatgatgttaatggacaggaaagattaagaatacaagagataatatattaattatcacgtcatacacagccaatcatgcaatcacaaggctcatagacagtggcagcacaaccaccttcttgtctcctaaagtggtccacaaagcacacctggacatttctaatcatgaaccaattccagtcaccatagctaatgggggtaccttatttactgaagctcaatgtgttgatcagccatatgagatccaaggtgttcagtttgtatctactttcaaagtactggacattaaaggttatgatgtaatctttggttgtgactggattctccaacacagccccctctcccttgatttgaaaaacaggcagctatctctacttcttaatggtacccaagaagttaccctgtcagatttaatatcacaaggggctgttggagcacttttcatggttcagccactcacatgtgctgctgcagaacttagttccactcactctcctgtaatttccaaggtcttggcagattttgcagatgtctttgctgagcctcaagatttacccccatccagagactgtgaccatactattccattgctttctgatgctaaacctgtcaatgtgcgaccttatcggttaccacatcataagaagaatgcacttgaagatctggtccaacagttgctttcttctaacaccattagacccagtgtgagtcctttttcttccccagcaatacttgtcaaaaagaaggatggttcttggcgcttatgtattgactatcgtcaactgaatgctcaaacaattaagaacaaataccctattcctgtgattgaggacttgcttgatgaactacatggtgctgcctatttttccaagattgacttaaggtcaggataccatcaaattcgcatgcatccttcagatatttataaaactgcttttagcactcatcttggtcattttgagtacatcgtcatgcccttcggattaacaaatgcaccagccaccttccaagctcttatgaacaaaatcttggccaaatacttgcgcaaatttgtcctagtattttttgatgacattctaatattcagtcgaacgttggacgaccatgctctccatttgcaactcgtgctgcagttacttcgagacaacaacttgtttgccaaaccatccaagtgtgtttttggacaacaacatgtggaatacctgggctatattatctctgcacaaggggtggctacagatcctgaaaaaatagcagcagttcaaaactggcctattcctactacggttacacagttgaggggttttctgggtctggctggctattatcgccgttttatcaaacactttggcattatttgtcgacccatgtttaatgtcctgaagaagaatgagttccaatgggggcctgatcagcaacaagcctttgaagctctcaaacttaaactttcgcaggccccagttttagctctcccagattttactcaaccctttgtgttggaaactgatgcaagtgggtatggcattggagctgttcttatgcaaggaggtcagcctttagcctacttcagcaagtctctgggaatcaaagctgctgccttttccacatatgacaaagaagctttagccatattagaagcattgaagaaatggaaacattactttttgggttcttctctcttaattcgaactgatcaagcaagcctcaaatatatcaatgaacaacgtatcacagatggcattcagcacaaattactcattaaattaatgagttttgattacaaaatagaatacagaaaaggtaaggaaaacaaggcagcagatgctctctctcgaatggccccacctcacaacattcaggcactcaatgttgttgttcctgaatggataacacaagtactggccagctacaacctcgatgacaagtgtaaacttctccttaccaaactcagtgtgaatgcccaagctcaaccccctttttcattacaaggaggcttacttcgttataaggacagattatacattggcaaagatcttgttctgcagcatcagttaatggagacctttcatgcttctcctttgggtggccattctggtgaaagaggcacttatcaccgtttgaaattgattttctattggccaggaatgaaatcagctgtgattaacttcattaaagaatgtcctgtgtgtcaaaagaacaagactgaacatgttcacatcccaggtctccttcaacccttgcctattcctgagctagcatggacacatattactatggatttcatagagggcttaccaaaatctgacaacaaggatgtaatctgggtcattgtcgatagattgacaaaatatgcccatttcattgccttaagtcaccccttcacttctgaacatattgttgatctcttcaagacacacttttacagattacatggattaccaactgttattattagtgatagagatcgcctctttacttccaacacttggaaacaagtcttcaatgctgctggagtcaagttaaactttagcagtgcataccaccctcaaactgatggccaatcggagcgagtaaaccaatgcttggagacttacttgcgctgtcttaccttcaccaaacccagaaagtggagctcattacttgatcaagctgaatggtggtacaacaccaatttccacacttcgctcaatatgacaccatatcaggctctctatggccagaaacctccaatgataggggaagccctactaccatccactttgttagaaggtttcagaaatcgccagcaagcaaaagatgccttattagacacagtcaaagctagcctagacaaggcacaagctcggatgaagcactatgctgatgctaaccgcactgaacgaactctagaagtgggtaatatggcatacctcaagatgcaaccatatcgccacaattctttgggtctacattcctctctcaaattacactctcgctattatgggccattccgtgtgattgaaaaaattgggtcagtcgcttacaaattactattgccataacattctcaaatccatcccgtgtttcatgtcagccaattgaagcgccatgcaggacgcaaagctatccctgaacctggactgcccctaattgattcttatggtaatatactcactgcccctgttgctgtgttggaacgacgattgattcctcgcaacaacgcccctgttgttcagtggaaaattcaatgggaaaatcttccatctgaggctgccacctgggaagatgcatccttcatcactaaagtgtttcctaatttcaccccatgagggcatgggtctttcaggggggaaggaaaaataaagtccgactcagaaaacgataaaaaaaagcttgtcgtgaaaaaaaaatc

SEQ ID NO: 97741 - DNA, 450 bp, Oryza sativa
  Clone ID: PAT_MRT4530_95714C.1
accactaccagcaaggaggaagggctctcctctaatcctctccgtctctccaagaatccaaccaggtagcagctgcttggcagtgggcagagcaacatgtctagcaatccggttggtgtcgataacactttccggaggaaatttgacaaggaggagtacttggaacgagctcggcagagggagcgggaggagaaggaagaagcgcggaaaggcaaggaaaagggccctcctgtgcaaaggcaacctttgaagcatagggactatgaagttgaccttgagtcccgtcttggcaagactcaggtggcaactccaattgcacctttgagtcaacaggctggttactattggaaagctcgtgaatgtgtcgttaaagattcagctaactatttggaccatataaatggcaagaaacatcagagagcattgggcatggctatgcgtgttgagaga

SEQ ID NO: 97742 - DNA, 237 bp, Oryza sativa
  Clone ID: PAT_MRT4530_95715C.1
atggcggatgctgtcgccgcagccgcggaattcgggccacgccaaaagatgacgctcgatgcggatttggtacaggtgctcaccgacggcgacgcggtccgcatggaggagctgttgatggggagagaaggctgcggcagcgacgacggtggctaccgtcgaacagacgccctgcaggtctcaatcaacgtcggcgccgcggccctgcgtgcagcggcgccgcgacagaaaagttga

SEQ ID NO: 97743 - DNA, 461 bp, Oryza sativa
  unsure (1)..(461): unsure at all n locations
  Clone ID: PAT_MRT4530_95716C.1
gacaattaacatcactaggagagaaatcaagaaacaagctagccagcaatggtgtctctccgcgcggccatcgtcctcgtcgtcgccgcctcgtcggtcgccgtcgccttctctcatgcggaagggaacgaggggccggacttcacctacatcgaaggcgccatggacgggccgtcgaactgggggaagctgagcccggagtacaggatgtgcggcgaggggaggtcgcagtcgccngattcgacatcaacaccaagaccgtcgtcccgcgctcggacctcgacacgctggaccgcaactacaacgccgtgaacgccaccatcgtcaacaacggcaaggacatcaccatgaagttccacggcgaggtcggccaggtgatcatcgccgggaagccgtacaggttccaggcgatcantggcangcgccgtcggagaaancatcaacggcaagcgtttccgttc

SEQ ID NO: 97744 - DNA, 617 bp, Oryza sativa
  Clone ID: PAT_MRT4530_95717C.1
ctcccttcctccgggtcgaacacctccgcctccccgtcctccccggccaccaccaacctcccccccacctcccccgccgccatgtaccccctcgccgtgcccatccccgccgcctcctcccacccgttcctcgccgcgctgtacaccgcgacgctcctcacggccttgtcgccgccttccaccacgcccccaatcacatagatctcacctcggcgtggtaaccccaccaccgcgaacgacccagccgcggcggcgccaccgggcacgggcggcagcagcaaccacctcctcgagaacgggtcgagcgcctggcactggagccgccgggaggccgggtcgaacgcaaacgcaaacaggaacggcagcgacagcgacaccgacgccgcggccgcggacgggaacttggccggggagacggtgaggaagcggttccaggtggaggagacggtgcggaagaggcggtggtagaggaacggcaggtggaggaggcacttctcggcgacctcctcggggaggccggggatgagctccatgacctcctcgccgccgccgccgccgacctcgtcgccggcgacttcgagcacctgctgcttgctcatcgacgacgagaagctcat

SEQ ID NO: 97745 - DNA, 432 bp, Oryza sativa
  Clone ID: PAT_MRT4530_95718C.1
aatcaagggggaaaagcaaattaattaattggaacaagttcgatatcatcattgaagctacacttggttctttttttttcctctctctctctctttgcattgcattaaattaagtcattaattaataaactcgaaattaataagctcatcgacgacaagcagtagtactagctaagctctagctaatgacatgctctcgatcgaccgtgcattagtgttcatcggctgaaataacaaataatctcttaatctcatcatcatcatcttcttcttcttgttcttcttgttgttcgattgatcttgttttgttgagacgatgatgcaaatgaaactagcaaattgatgatgatttgatcatggaaggaagtagatgatgataggtagctaggttgctaggttctagggttatgagggaagaactgggtgcctgca

SEQ ID NO: 97746 - DNA, 488 bp, Oryza sativa
  Clone ID: PAT_MRT4530_95719C.1
ctagacggagctggcgtgggaactcctggagttagcacgtcggtcccggcggtttgtgactggtctgacgccggtcacgtcatcagcaaacaaccgtgctcccacgttgcacctgcctccgtcatctggaggttggtatgacccatcccatcggagggtcattcggacagcagccattgcaaatctccgcccataaatgaaggaaggacagggttatcccggtgtgaggcgaaggcatgagccatgttttggtcaaaatccaccagaacacaggagtagggtattacgcttctcagcggcccgaacctgtctacatcgcccgtgtcttgtgcatttgctctctcgcgaaacattccacaaatcgagggcttagaacctcacctagcgtccccggccgaaccggcaaaggggggcccgcgcggtctcccagtgaggagccccacgctccgtcagtgtgtataagtaacttaagatttaggatgctgatt

SEQ ID NO: 97747 - DNA, 999 bp, Oryza sativa
  Clone ID: PAT_MRT4530_9571C.1
gccgccgttgccggctagctgctggcgctcttgctgccgccgctgctgcttgctactggggctgctactgctgctgccgccgctgctgttgctgccgccgctgccagctgctgctgccgctggccgtggtggaggcggctctagaggagctcgggagtgatcctagctgtggtgggaggcggcgatggcggctggcgacggcggctggtgatggtggttggtgacggcggcagcggcagacgactgccgacggcggtggcggcagcagctgttggctgcggcggctggtgacggctgcagcgacagacggcggtgggaggaggcacggtggctgaggtgggaggaggcatggcagcctcggacggctagccgagggcgtggcagatgactgcatctggccgacgcgacagcgtttggaggaggggttggagaccggcttggcgcaaagaggcgcagccgatggcagcggaggctggctcggcgcaagaggcgcaggcggtggagatggaggccggcttggcgtgagaggcgcggctgatggggggaggccagattggtgcgagaggcacatccggtggaggaggccggcttagtgcgagaggcgtggccggcggtggagaaggcgacctcggagcgaggaggagctgccaatgaatgtggcgtggtcttcggcacacgaaggctggccggcggggggcgtcggtgtagtggtcccacatgttggcagaggttgagtggtggtggagtatcggtgcagggtgatctcgtatgtgttcctttgttggtctagtagcggtcggtcacgtttagcggcggctggtccggtgttagccttctcccgatcttgtgtgttggtgctatcggtgtgtgggtggtggtatattttttttctttttcctggttacgacccttcagggttgtaatcttgtaatttttttctgctctatcaatacaacgtgtgagacattaaaaaaaattgacattgctcgtataagtgtg

SEQ ID NO: 97748 - DNA, 286 bp, Oryza sativa
  Clone ID: PAT_MRT4530_95720C.1
gagcgcgacaaggcatgacatgtcagcatatggacgagataaacacaggccatagcaaatgctactaaatatcatacagcatacatgctgtgacggcactccagcaccaaagcgaggatataacctattaggggaaccaaagctgagtataaccgagaacattgactgagacaactcagaatctggctcgcacatacatgcatcctacagaaagcacaatgtacagttgcgtaaggaagaactttgaccacacaatgaatgaaattacactcatttaacacttcac

SEQ ID NO: 97749 - DNA, 882 bp, Oryza sativa
  Clone ID: PAT_MRT4530_95721C.1
atgccattttccgaacatgtacggcaccgatgtcgtatccagataacgtataaggggcaaggaggagaaatcaacggctggatcgcgacgattcagcgtgcggcgatccgagtgccagcgacgccgctgccatcgttttccctccctcgcctagcctcactgaacctgagccgttggttgggaggcgacgacgtggctgagtttgagtgggaggagattgagaagattgggaagatacgcaaaacgagattaattttttggattaaacgaacaagacctgatggggcagtcggctgccctgctcggtcgctcgctagtgctttatccactgcaagcatcgtgcggcaacggatcggcatgagccatgtgacactcgcgagtcgcgagatcacccaagcgcatgcttatccggtccgtgatcggtcgcagtgtgtgaccggtcacagaccgcaaacaaccgtgcttccacgttgcacctgcttccggcggagtggaggttggtatgacccatcccatcggagggtcattcggacagcagccattgcaaatctccgcccattaatgagggaggacagggttatcccggtgtcagacgaaggtacacgccaagttttggtcaaaatccaccagaacacaggagtagggtattacgcttctcagcggcccgaacctgtctacatcgcccgtgtcttgcgcatttgctctctcgcgaaccattccacagatcaagggcttagaacctcacccagcgcccccggccgaaccggcaaaggggggcctgcgcggtctcccgtgattgaaatgatgccacattcaaatgaattgaattcgggctcaagtgatcacaatcgcgacgaaccgatcgaatcagttattgggatg

SEQ ID NO: 97750 - DNA, 509 bp, Oryza sativa
  Clone ID: PAT_MRT4530_95722C.1
aaaacccccaaaaagttttaattggaatggccccggactaaaaaggttaataactcgcccacaaaaaggggggggggaaaaaaattttttattaaacgagtctttgcacaaaaaaatttgataaacaaaaaaaagggccataacccgaggaaaagttttttaaaccccctctcaacaaggaaaggggggggaacatccactggaagaagggggaccaaaaaaacccccttcccagcatgtggcctaaaaaccaacaaagggatcggaaacccaggtctaagttttaaaacgaacgggctccgggccctttttttccacaaaattttggttttccaaggcggaagggaacaaactggaccttaaaaaaagccaaaattggccgtttatttggcgggacaaaaagcccaccccaataccaaaaaattttgggccaaaaaacaggaccgccaaaaccaaaaaaaaaggccttcaaaaaaccaccacaaaaggcttttgggagggcaaaccaa

SEQ ID NO: 97751 - DNA, 870 bp, Oryza sativa
  Clone ID: PAT_MRT4530_95723C.1
atgccaggtcatctctctccctcctcttctctcccttcctcatctctctctctcacttctctcctctctgcatggcggctggtgggtggggacgaggtcaccagggcgaggcgggagaggagattctgtggacgtcgcgtgcgacctcggggtcggaccgtcgacacgagagaagggaggcggcggcggctgcgacggttgagaagggagaggcagacggcggcgaagcagggtcggcggctggcgaccacgcgggaagaagctgggcggcggcgtgggaagaagctatcttatacgtcgtgcccgttccgcccacaaccgcctgctccactcgccgctccttcgcgctcacacactccttcccgccacgccaccctcgctctccccattcggctccccatcgatgccatttgcctccgcctcgtcgatgagatggtcgacattgaccgtcgcctgccggtgccgcacgaccttctgcacccgcccttccacatcgccggcttcatggcctctccacagccaaaaccaaacacttcaaatggtgtcgccgcctcccgcgcacgcaccgcggcgccgacggcgtgtaccttgctgccacagcctcttcctctcccgcagcgcgcctgccagccgctcgtctgctccgcagaccaacagctccccgtactgtcgcctgctccgtcaaccgctcgcccggtcctccggcaggccaatgcggcgggcgcagctaccgccgccgctccgcccaacgcccgcccgctccgccagccggctgctccccgcgccgtcgcccgctcctccagctggccgctccaccccgcgtcgtgccctctccagcgatctgcttggaggggaggggagagaggatag

SEQ ID NO: 97752 - DNA, 165 bp, Oryza sativa
  Clone ID: PAT_MRT4530_95724C.1
tttttggtttttttcttccaatcagcataagtgcatggcaacttttcgcgctttccagttctcaacaacacttagcacatacatttctcacccccacaccaacaggtgagacattgaaacccaggctactaaacattaagtttaaaaactccctggttctcccct

SEQ ID NO: 97753 - DNA, 1503 bp, Oryza sativa
  Clone ID: PAT_MRT4530_95725C.1
atggcagggcggcagcagctggtggtggtgggcatggtggtggtgatggtgatgatgcagtggacggggggtgcggcggcgaggcatcatcatcatcatcatcatcataagaagtcgtacgaggaggtgttcgatcggcaggaggcggaccgggtgcagcgtctgccggggcagccggcggagcttgggttccggcagttcgccgggtacgtgacggtgaacgagacgcacggccgcgccctcttctactggttcttcgaggccgcctccgacgtggccaccaagcccctcgtcctctggctcaacggaggccctggttgctcctccctcggctatggcgccctcgaggagctcggcccccttctcgtcaacaacaacgacaccctcatcatcaacccggaatcatggaacaaagaggctaacctgctgttcgtggagtcccccgccggcgtcggcttctcctacaccaacaccaccaccgatctcgcccatttcggcgacaatctcaccgcccatgacgcgcacgccttcttggtgaattggctggagaggttcccgcaattcaaggggcacgacctatacatcgccggcgagagctacgccggccactacgtcccccagctcgccaccaagatcctccattttaacaagaagaagaaggaacatgatgatgatgatcgcatcatcaacctcaagggcatcatgatcggcaacgccgccatcgactccagctccgacgaccgcggtctcgtggagtacgcttgggaccacgccgtcatctccgacgaaatctacgccgccatcaagggcaactgcaccttccccgacgacggcaacgagacggacaagtgcaacaccgcatggaacggcttcttcaccgccatgggcgacatcgacatctacagcctctacactccgtcctgcaccgccgcgctcaacggcacaaccaccattactaatggcacccgcagccgcttcgccgataaggtgctccgcctccgccgcggcttgccttacaacacgtacaacccgtgcgtggactaccgcgtgatcgactacctgaaccgcggcgacgtccaggcggcgctccacgccaacgtgtcgggcggcatcccctacagctgggcgccctgcagcgacgcgctcaccaactggacggacgcgccgccctccacgctgccggacatcgccgccctcgtccgcgccggcctccgcgtctgggtcttcagcggtgacacggacgaccgcgtgccggtgacgtcgacgaggtacgcgctgcggaagctcaagctcaagacggtgaggccgtggaagcagtggttcacgagcgatcaggtgggcggctacaccgtgctctacgacggcctcaccttcgtcaccatccgcggcgccggccacatggttcccatgatcacgcctgtgcaggccagacagctcttcgcccacttcctcgccggcgacgacatgcccgccaaccccatcctcgcccccactccaccttaa

SEQ ID NO: 97754 - DNA, 394 bp, Oryza sativa
  Clone ID: PAT_MRT4530_95726C.1
ggccgcaaattttttttttttttttttctttttttttttttttttttttttttttttttttttttttttttttttttaaaacgggcacgcgggaggaggcaggactttattttaaacattggacccattatactataacaattaagtcccagaccccaccaagggggggaaggcccctgggagcaagggaggagttaggaaagatcccacatagggagggcaggttaaaggccagcaaagctggagctggagctggagtctgaccaaagaaaacaacaccgccctgctgcagttgaagttgctgaacaatcgcctgaacgctacaaagggccgggaagggaaattgtggccctaccagccggagctgtgggcaacactgtggctgcaggactgg

SEQ ID NO: 97755 - DNA, 307 bp, Oryza sativa
  Clone ID: PAT_MRT4530_95727C.1
ttgggggcgaccggaggcgtccgcccacgcgtccggcccttgggtatgtatgatgtcaaagacttcaaggtctgacagttggcagatagctactctggacaactgtcatgcatgcccccccagaagagataataagctcgcgacctcacggaggataacttttatgtatggggtgttatattagccaacccttcatggaacttgatacacatgaaggctacagtacaagaggagatgtttcgtcctacttaaattgataatctaaaaagagcaaaacaatccctgatcaaggctgctctatatgcaa

SEQ ID NO: 97756 - DNA, 514 bp, Oryza sativa
  Clone ID: PAT_MRT4530_95728C.1
ttccttctaaaatcccaacaattttttgatccttcgccgccggcaagcgccgcggagggttccccccagggagtggagaggagaggagcgggcgggttggtgttgggaagggagggattgttttttttgatttacttcctgtggttctactattctgtgctactcctatcttgatttggatattaattattcttttctatagtttttttttttatgttttcttcgcccgctactagttttcttatttttctttatggacttctttttgttgtactctttacctcttctaattctatctggttcatctgtattctattcattgtctatttgtttgacatttatttattttctctttattgtataatttcatttttgttgaactggtatgccctttttctttattataggacctcttcattaagttttattttgattggctctgtttttttttcccccctcattgtatttatttgattgttttggctcacttttgttcctgtttttctttttaatt

SEQ ID NO: 97757 - DNA, 290 bp, Oryza sativa
  unsure (1)..(290): unsure at all n locations
  Clone ID: PAT_MRT4530_95729C.1
cgcaagcaattaagataaatattaagaaaattgtttaaaaaatatgatataatatttgtagccccccgactcactagtcaacggcgaaccagttgatgtagtgaggcagaggaaaaggaaaatatcatatagaagaaaattcatgatgacttagcctttgtaactattttcccttggtgatggcagagtgtggccaatattgggaacaaaagtcgtccaatcaataacaaatgaagaccaccagcttgactgacaactaaangcctgtcgaccggtgaaaagcgaaaaag

SEQ ID NO: 97758 - DNA, 256 bp, Oryza sativa
  Clone ID: PAT_MRT4530_9572C.1
aacagaatattttacagttcattaatcattgttagcaacaagctatcacattgtttgtacatgtgtataccaggatcccaagaatcatgtatgggtgtactgtaattaaggagcaatacaacagtaacaaagaatcaatagactggatattttttttctgtatctaaatgtatttttcagttcctagaaatactcacagatgggagctagaaatactcgaagtcgccggaggaggaatcgctcgccgccggcttgg

SEQ ID NO: 97759 - DNA, 327 bp, Oryza sativa
  unsure (1)..(327): unsure at all n locations
  Clone ID: PAT_MRT4530_95730C.1
catatgtgctaggatnatgatggcgcaactatgcaaggatgcacttgggataatggcgcaggatatgcgggcagaaattttggctgcctggatacataaacaggctgaccacatgctggtgatgctgcctgcttggccctgtgggtgacctccatgtggccctgcatgcaatggtgaactgttgcacctgtgtgctgcatggatgctgtggacctggtgacctgacctgtggcaactagtcgaattcccggcacaattgtccagtagacagtatancaaatatgaaatgcatttctggnaaaaaaaaagtntataaaaaaaaaaaaa

SEQ ID NO: 97760 - DNA, 2141 bp, Oryza sativa
  Clone ID: PAT_MRT4530_95731C.1
cgcacgaggaagcggcacagctaccccctcgcgtcgtccccggctccaggtgttccgatcctgactgacgaccggaatcctcgctgaaagcaaaacccccatctcccgcggcttctcgtcggccgccgccgcggtcgctcgccgtcgccgatgagatccatccacgcctctctcgtagatccaaattgctgtagagccggcctcatcgccgtagcgccacccgcgtccatgggggactgcgtcgtcgtcgagaatggccaccccgtcccgaaggaggaggacgcgccggtggtagccgtggagcgcctcccggagggcgccgggaagccgcgggaggaggggagtagagggcagaggaaacagggcgggatccgcagggagccgtcgttctcgcggtggtgcaaggactgctccgccatgtccaatgccccccctgggggcgcctcccctgcctcggcggccagcgacgacgattccgaggagttcgagcttccgcttctgccctccgatagtggcggcggcggcggcagccacttgccgatggatattgaggcgggggcagcggcgagatctgatgacctcccgatttcgccgtggttgatcgcgaaggttattgcgctaattgcgagttggtacacgctgagcacctgcttgacgctgtataacaaggagatgctggggaagcacatgtggaagttcccagcgccattcctgatgaacacggtgcatttcacgatgcaggctgtggcatcgagggtgatcgtatggttccagcaccggggcctggagggagcggctagtgcaatgacatggagagattactttctgcgagttgtcccaacagctttggctactgctcttgacataaatttgagcaacatttcacttgttttcatcactgtaacatttgctacaatgtgtaaatctgcagctccaattttcattcttctgtttgcctttttgtttaggctagagaagcccagctttaaccttcttggaatcatactgattgtttcctttggagttctactaacaggattaagaaatccctttacgttgatgagttatgttaccccggttatggcaataacaactgcagttctttctattgcgatggatccatggcacgacgtcagggcaagccacttttttgataattcaactcacataataaggagcagcttattgatgcttcttggtggtgctttggcctttttcatggttttgacagaatatgttctggtttctgtaacaagtgctgtaacagtgaccgtagctgggattgtgaaggaagcggtcactattttggttgctgtgcttttcttcaatgatacatttacctggttaaaggggcttgggctgggaataataatatttggtgtcagtctattcaacttatacaagtatcataggttcaagaaaggccatcgtaataagaattgtgacaagaacccccaaacttctagcggtgcttcaaaatatgttatccttgatgatgacgatatggaaaaccagggtaattcaggctgatgtcatcagagagtggactatttgatggattttcatattctggaaatttagttacctatgcctcctcacaggtgactaccatctatacatcttgccttggtatcaagtgccatcgttttttatcttttctgtgcttccacgacttagggaagttgtgttgttattcatgaggatgagcatgaacatgaacatgacgcaaacaatattattgattaagaagacacatttacacaagcagcagacaatctagtcgccaagaaaggattttcatgtcacaaaagggtgcacatatctgtgtagaactgtgcatatagacgctagtgatatattttaatatctttcctccccggtgcagatttctctaacgctctgtgcataaatagtattgttatatttgataatacttttcctccacttaggaatttgctaatgctttctttaattggaagagtagagagctcagttttggccagtattggcacgtggcgcggaagaatagcatgagacacctttttcttcgataggaaaatacattgtttatatgtagcaatgttgtaatttatgattttctttacttttagctaaatttactgcaaaaaaaaaaaaaaaaa

SEQ ID NO: 97761 - DNA, 275 bp, Oryza sativa
  Clone ID: PAT_MRT4530_95732C.1
gcacacgcacgcaagcttgagttctcttttgtgtgcgggctagaggttgccttcttctttatcacgaccaagacagtgacagtagcggatggctactccaccttgagaggcatggaccttgacacgtgcatgccgtgaaagagagtacttgcagctagaggagcaccttacccataatctgctgtggactctgcctgtgataaccgctagcactgcgaggacgcttatagttgtcttaatgcaccactgagtccgatacaaagcttgaagggcaa

SEQ ID NO: 97762 - DNA, 405 bp, Oryza sativa
  Clone ID: PAT_MRT4530_95733C.1
gcacgagggagagagagagagagcactagtctcgtgttttttttttttttttttaagcaaaggccatatattattctattattaagagaaatagcggatcgaaggggttaccgtatcacgacaataaaaccgactaccaagattaacgtattactatttttaaagaaaaacttggtaggattatgggactatcattgtggtaattaaccgacggtaaaggaaaccgtaagtcgtctctggttacctcggcagctagcagtcatcaccaccacgcgagctcgctcagcaacacgacacgctcaccgctcccatcccagtagctcccatcgccgtggcgatcgaaaaccaccgcgtttcattttcctcctcttcttctaccaacgcccattaattcccctcgctcgc

SEQ ID NO: 97763 - DNA, 591 bp, Oryza sativa
  Clone ID: PAT_MRT4530_95734C.1
atggccgccaccctacctcgggcccgacccccctcgggggagggccacattgcgttggggggcagcctcctccaactagtctttgggaaggagtggccaccaccctacctcgggcctcactaccctcggggagggccacgtggaattggggggcagcctcctccgactagtctttgggaaggagtggccgccaccccacctcgggcctcactcccctcgggggagggccatatggaatttgggggcagcctcctccaactagttattgggagggagtggccgccaccccacctttgggggcagcctcctccctctaaacacgatacccccgggcccatatcaccgacagtagcccccggcgagttgggcggtgggagtttagtcacgttcatacgtcgccttaacttcccactttcctcccggtctccgaggcgctgcaggcttgggagtttagcccccagcaacctttacccacgatcaagccaggctgggcgccatagccagccggcggggccaaagatagctgctacggaagagccagcacagggggccccgggcgtcgacggcgaccagagctcgacgcagagctag

SEQ ID NO: 97764 - DNA, 560 bp, Oryza sativa
  Clone ID: PAT_MRT4530_95735C.1
gataaattaagtaacattaattttacatgattgatcttttatctttttctattaatgatgataaaaaattatagatatagttttttttatatatatttatatatgttcttgtttacgttcatccgtacaccgatatactctatccatccaaaataaatcatcttttttatatgaatctggacatatatatttttaagtatgtctagattcacacacacatatatatatatatacagagagagagaggcgcaacgcagaagaacaacaacacacctgcgcgcatgtggtatacgtgcacagatgaacttgttgtgttaatatatatatatatatatatatatatatatatatatatatatatatatatacatacatatacatatatacatatacatacatatacatatacatacatatacatatacatacatatacatatatatatacatatatatacatatacatatatatatacatatatatacatatatacatatatatatacatatacatatatatatatatatatatatatacatatatatacatatatatatata

SEQ ID NO: 97765 - DNA, 1072 bp, Oryza sativa
  Clone ID: PAT_MRT4530_95736C.1
atagctgacaagactctccatgagttcgctgctccctctgctgagaatgtggccattggaccacagatcaacatgggagacatggatttcgacttgaagtccagcctcatcactatggcgtaggctagcccgttctgcggcaagcctaacgaggatgccaatgctcatctacagcagttcctggagaactgtaacacgtacgccataaagggcgtcagtccagacaccgtcaggctaaggctgttcccggtttccctcctcaggagagcgaagcagtggttctacgctaaccgtgctgctgtcaacacctgggacaagtgttctacggtattcctctcgaagttcttcccgatggaagcatgggaacgacttcaagagtatgtggccgcctgtcctcatcatgggattgacaactggctaatcatgcagaacttctacaatggactcccatgtcccgcgatcacctggacgtggcagctggaggagctatcttctctaaattggttcgaggagccgctgatttaatagagaagatggtctccaatatgggttggagcgaggaacgactccagacccgtcagcgaggcatgcacaccgtcaaggagacggaattacttgctgccaagctggaccttctcatgaagcgattggacgaccacgacaaacggcctcaaggcaccatcaaggccttggactcacacgttacgtgtgaggtctgcggcaacatgggtcattctgggaatgattgcccagaaacctatgaggaggcgatgtacatgggcaacaacaacaacggttaccatccacaaggcggtcaagggtggaactagccacgcccgtattatctaggaggtaataacaacggtaacttttctaaccaatcctccttgaaggatctagtttttgcgcaagctaaaactaccgatgctctaagtaaaaagctcactgccaatgacaagatctgtcacaccctaaaaatcccaaattattccgacgttcccggagagtccgattttgcaggagaagattttgaagagttctaaggccagcaaggcaagtcacacacacctca

SEQ ID NO: 97766 - DNA, 4770 bp, Oryza sativa
  Clone ID: PAT_MRT4530_95737C.1
ccgggctgcaggtttttttttttttttataagaattattacgggacctattattcatttcattcatttctgcaaaatggcatcaagagtccttatagggtttatacatttagtatacaacaggtacagcttcgaggaataactggtgagctactaaaggtacaactttcttctttttatgctgtatgaagcattgaatcggtaagttgttagtaagctctagagtacagttctgtttgctttataccccaaggaaatcgatgtcgttctcagtctatctcggaggtggcagaacgtctgggcatctgtgggatacctcaatgttgactcgtgcaacttcattacagtgaaacattttaagaagtttgttgacaatttgctcctgcagcgcagctgtgccctgttggatatgttctgtatccatacctcctatgacagctctgatgattcccttgattattctgacatccatccatgggtctgccatgcccttaggtgcaacgttaaaactctcggcatactcaattattgtgatggcaagctcctttctgtagatggatatcctgtccccttcactttcttgcacttgaagagtgtataccttatctgcctgcatgtagaggagattgcaaacagaaatcttcggctcccttaataggttctcttttggacattctgatgttgactgcactattctcagtgctctttcaaacgctgcaagattgcacttgatgtcttcatctatcaacccatgaggagggtgatcaggtgcagagtcaattatgagtaaaagagtagacgacatatgaggaaattgatccgaatatctttcttccattctatttatctcaagtgttggatggttgatatgatggtcgactacgttcctcgcagctgccacagcttcatccacatccccaaccataccatccttggacacatatatgttgactataagcttctccaggcgtggcttcttcaacaaccggaggtagctaaggtaacgatgatggtcattcgacgacggatagacatgtatctcaaaaactttttgatcggaccagcttgttggcttatcgtcatcaggtgagcgcatcatcctctcatatgccctatcagttcgaaggactggacggttgggatggccgtgtgctgcatttgccaatgccacctcggcttcctgcacctccgcagcaagggcatccttacagtggatcctagcgtcgacactcttgagcgaagttcttccaaagtcattgaagcctgcaagcaggttgttaagaccagcatgcaggtctgctgcatcttttaggaaccgaacatcgacactgaattcaatgtgttcaagtcttggcatgaagctagatgctccactgctggactcgcaaccatgaagatcaaaccggacaaatgaacgaggagttttaaagaatctcaatttttggaagtagccatcatcagcaggcttcttaatgcttattagcctggtatattgggaatccaatttgaggtaacagagcattgggagccttccaagggtttccatgtcctgctctttcacaacctgtactttcacgtctagatgcgagaggcaaccaagagttgatgagttaatccacacaggtaggctaaaaaacttgatgcatggcaatgacagctgccagagccgaggacaggacacagaacctgctgcatctggtctggtgcattcccttacttcaatgctatatatattcatagtgtggaccttatgtagacagcctaaggactgtagaaaatctctctgcatgctctcatctttcagccctatataaattttggcatagagcaccctcagttctctgaggttgcccaactcctgcacaaagtgccttacagcgacctcttcgataagacttatgcatagctcttgcagcgatgtcagttttccgatcaaaccagctggcaacatctccaatctgcgaggaatacgtagacacaacaaatgtgtcaggagacccaactcctccggcagctcttctattgtaccgccacaatcacccaagtccagtatttttagaaacttgagatctcctaattctttagggagcctatgaaactctgtgtgtgaggaaagctggaggcacctcaggtgacccagccttccagcatactgcaaaatactttctatgtaataatcctccataccattacatttgtccaaggacaacacacgtaaaacttggaaccttggtggtgccacactattattgccattattgcactcagtggcaacaaatgacctcactttcttcatatccatattaccaaatcgatagctcgtgatactcgtacggtgcaggaccaacctacgagcattggtgctttcaggtttccgttgctcatcgttatccaatacagtgacaaagttttgttcacttgtcaatgaacgagctagatcgagcaccatatcatgaacacgacaaccttctatacacccaaaaaattcattctcaattggctggatcatcatgcttctatttatcagctcattgaagtaactctctccaagctcatataatcctaaatttgtgttttgtttctcagggacaaaaccttcagctatccatatccatatcaaatgatttttgtcaattttataatcttctggaaacatgcttagatagagcaaacaattctttaaatgtgaaggcagatcgtagtagctaaaagacaatatccttttagtatttgccatttcatagttgtcttctccaaaatcaatagctctgtacacctcagaccagtccagacctgatctactagccaacaagctagctatcgtaatgatagctaatggcacaccagcacatttcttcaaaatcttgtcacatgcctcagttgatgaactgtcaagagatttgccttcactaccagttcttgtatacaataattctttagagttatcatgagaaagtggtttcatattgtacacatcgctgataattgttgcaacctcagatttacgagtagttacaagtattttacttccgtaatcattatcttgtaaaccactttcgagtatttgccatgatggcttatcccatatgtcattttccactagggatggcagtcgggcacgacgggcacgggtagtgactacccatcccgtgtccgcgaggtaattcatgtccgcgggcatgcccgttactacatgatgggcaaggagcacttccaatgcccgtcccccgtaggcgccatgtgcccgcaggcatgcccgtttacccgtcacatctgggaaccagaggtgggaggcgcgtctggaggaagcggcggcgaccggaggtgggaggcgcgactggaggaaggtgtggcgggctggcggccgatggctggaggacatcgacgactggttggagaggagctcggcgcagacggggtagaaggcgacggcggtcgcagcttccttggttgccccccctcccccgtggccgctatgaaagtcgtcggctggagggtggggccgccagcgacgagcggaggtgggaggtggtggcgaattgcgcgcccctctcgtccggctgtcccgtgtcagcctggcgccttggtagcctggagtggtggctatggtctgtgaaggaagagaaggagtggcagcttggttggtcccaggcccacctttgtctgcatgtaggttactcgccttagtccttgtaagtcctacgtagacgagcgtagagaccaggcccaccactcgccacatggtgaacatgctggcacgacccagctgtctcggacagaagcccgggtgcttgggggcaatgcaagcttcaaatgtcagtgggttactcgaagactgtgtgagggaaccaacaggcattgacaagacagctgatagacaagacaaggaagtagatttgtagcattgtgagcccatccttgatctctttcccttgatgaattgcttgagttcaccgatgagctcctgtacagtcaacatctccatatttggacaattcaggtacttctccaggccaaatcgatgaagaatgttccacaagattgccttcatattaggattttgaccgattggaacaaaagcattcaaaggaaaacccactttaatcttctcatatactgctgtggcaagggtggttttgcccagaccacccattccaacgacgtatactatctttgtcttcctattggacgtattaagattgttatcacgctcatgttgggacaacatcttaataagctcatcccttggctcatcaatgccaacaagattgtttgccattttctcaatatttaggatgtgaggatcaataggcgtcggacgtgcagggataactatgttatcaactgggtatctgccatgccttgcatcaatctccaggagcttcttttccatttcttggattgcgtccgcgatggtgacgcgatgcttggtcttcttgaacagtttcttcacctgcttgccgaggcgcctgagcacatgtgggtcggctggcttggggccatcgtcgtcgacatgaaccaagaaggcgtcgatgatatcctccatgtcgtaggacgcctccctgaggtcgctcgcccagagcttcaccagctcgttctgctggtcttgtggcacctcgctgaccatgcggaggacggcttgcgctcgccggagctccgccgagagagactcgatcttcccccttatgttcttctgcagattgtacttctccttcagcagctcgcccagcttggggatcaggctactcatcgccccagtgacgaactccat

SEQ ID NO: 97767 - DNA, 619 bp, Oryza sativa
  unsure (1)..(619): unsure at all n locations
  Clone ID: PAT_MRT4530_95738C.1
gcgtccggngtttttgtgtgtnctgtgactgggggggggggnggtgcnnngggctgcttgcngctggggttgctgtttggagcacagctctacagctgcntgtcgttcatcaccttcaaaagaagtnctcgcttggctcattcaacctattgggtcatactgctccagctcaggcagcatccctgttgttctggggccttttgtggccttctggctgccctntngaagagttgatgctttcaattgcgcagcagttgttacgttcttcattgtnttgtcgtgccccgttgctgttgggacctatctttgccagttcttatgcgttggaagattcacagctgtctcgtttcgtgttctgggccatttgaagacgattcttgtcttgnccttgggttttcttttctttggtatcgtgggcctttgttttcacgtagtccttggcctgttgcttgctgtgattggcctgttttggtgcgggaatgcttcgttttgtccggtggtgcttggggggtctgttttctcggtgccctgcgtgctttctccgttttctttccgttcttatctttgcccgaaggttttgcgcctttgttgtcttccttttttttctggttcctttgct

SEQ ID NO: 97768 - DNA, 1532 bp, Oryza sativa
  Clone ID: PAT_MRT4530_95739C.1
atgccgccgccgctcccgtggcggcgcctcgtcgtcccgctcctcgccgtcgtctccgtgcctttcgttctcccgctcgcactcccgttcctcctccgctcctcctcctctcgccagccgctctccgtccaccgcctcgactggctccctcctctgtccccgctgcctcgcaccccggatccatcaactccgccgccgccgccattgacgctcccgttggcgccactgaccactccgccgccgccgccgccatcgactctcccgatggcaccaccaacgaggtcgtcgccggccgcttccccgccgcctcccgagaagggcgagggtggaggaacgacatgcgacttgtacgatggggagtgggctcgcgacgaggcggcacggccgctgtacgcgccggggacgtgcccctacgtcgacgaggcgtacgcctgcgcgtcgaacggccggccggacgccgcgtacacgcggtggcgatgggcgccgcggcggtgccgcctccccaggttcaacgcgacggatttcctggcgacgctgcggggcaagcggctgatgctcgtcggcgactccatgaaccggaaccagttcgagtccctgctctgcatcctccgcgaggccatcccggacaagacgaggatgttcgagacccacggctacaggatcagcaagggccgcggctacttcgtcttcaagttcgtggattacgactgcactgttgagttcgtgcgatcgcatttccttgtccgggaaggcgtgcgctacaatcggcagaagaactccaacccgatcctccagattgaccggatcgacaagtcggcgagccggtggaggaaggtcgatgtcctcgtcttcaacaccggccactggtggacgcacggcaagacggcgagaggcatcaactactacaaggaaggcgacacgctgtacccacaattcgactcgactgaagcttacaggagagctctcaagacctgggctcgctggatcgacaagaacatggacccggccaagagtgtcgtcttctaccgaggctactccactgcacatttcaggggaggggagtgggattcgggtgggtcgtgcagcggggagagggagccgacgctcagaggggcggtgatcggcagctacccgcggaagatgaggatcgtggaggaggtgatcgggaggatgcggttcccggtgcggctgctcaacgtgacgaagctgaccaacttccgcagggacggccacccgtcggtgtacggcaaggcggcggcggggaagaaggtgtcgaggaggaagcaggattgcagccactggtgcctccccggcgtgccggacgcgtggaacgagctgatctacgcgtccctcgtgttggaacccaagcccagatcatggaaacaccactagtacactacttcagtttctttttgtgtttgtttcggtttgagcagttgagctgatgcgcaaactgaaaatgtgcttgatgtttgctcaattgaggacaggagggtttgccgggctttctgagatgcaaaagtcttccacct

SEQ ID NO: 97769 - DNA, 400 bp, Oryza sativa
  Clone ID: PAT_MRT4530_9573C.1
cccacgcgttcggacgcctcaccacctaacgctgctcctgcttgtaataaccacatcgatgcgatgagagcctaaccctttccctatgctccatgatcacctgctgcatcaaagacagactacgttaccaagggttcgatggactatggattccatgctcctactatgtcatggcctgttccagacacacttatgatcgagcccactgaaagtgacagcaacgccctactctactggtactgcgaagcactactctgaatgacggaataaattacacacatcgaacgtggcccagcagatgtcaacaacaatgtgctcaagagtgctcctcatgcgctccaacttctgatgatcgactaatggactaagccgtactgcagggagtacactgcgatccctg

SEQ ID NO: 97770 - DNA, 390 bp, Oryza sativa
  Clone ID: PAT_MRT4530_95740C.1
atggaagatgctaccgggcgtttgcatgttgttgaagcacataaggcaactggttttactctgaatcgtgagagcagcgtctttgaggagaacaaacaattatgcagtaggtgccaagtctgtggacaagaaggttcggtagttggattggagcgaactgagcgggttcttccaaccggcacaacatttactgttgttggtgaggcttacaaagatcgcggaacagttctgattaaacggccaagagaacttggacggttttacgtttcacggagaggcatcgatcagattatctcagaccttaaggaggcttccacgggtaaagacgcaacggcagcgatttttgcattctgcggcggtgttcttcttgcgttccatgcactgctgtaa

SEQ ID NO: 97771 - DNA, 514 bp, Oryza sativa
  Clone ID: PAT_MRT4530_95741C.1
agtaataagctgggccgccaccgtgacggcggtgcagccagcggcgtcgagctgtggcaagcgcgacggcgacaatgcgtgcgtcgtcgacatgcccaggaaggcgaagaaggggaggtcgccgccggaggaggaggtggaggccttcctcgccgcggcggagagcagcgtggcgcggcgcttcgcggccaagtacaactatgacatcgtcaaggacgctccgatggatggccggtacgagtgggtccgggtacgcccgtaaagaggatatgtggcaacagccagtcaaaatgtcaggaggatgcacagaccaatcctgtcctaatgaatcttttctttacccatgtatatgtagttactcggttactccatgtcatgtgtttagctgtaatttatttaagctcacgagatgactaatcatgtaaaagctcaccttgtacgttagcagtagatgcttcgcctgtaacgcatatgcttaacttgtccctcgtgccgattctgtcgaggccaattc

SEQ ID NO: 97772 - DNA, 213 bp, Oryza sativa
  Clone ID: PAT_MRT4530_95742C.1
atgccccctcttctccttgcccttgtctttgatgtcatgggccacactgtcctcggcctcggcctccccatgccgaacctcgacctcgctggccacatcgtcctcagcctcagcctattgccaaagcttggacggatagaaagatgggccatatttcctgcaccaaagctgattcataccccatgtttgactcctttggaaagtgcaatctga

SEQ ID NO: 97773 - DNA, 450 bp, Oryza sativa
  Clone ID: PAT_MRT4530_95743C.1
atggcatggcggatggagaggaggcaaagccatgataaaggaagaggaacatccctgctttcatatggctggagcagcagatgtgagctgcttctggctcccggcatcgacgtctcccacagctcgttcttcaaccgcgccgacgccccaggcgcccacggtgcccctgccggcttcctcgacactttcgacgtcgccatcaacggcgcgctccgcgccgctcctgccgcggcttcaccggctttcctcctgccgaacctcaacgatgacgcgactgcgactctccacgcccaagccgtcgccgttctgaaccacgaccgcagattcgggtggcgctgccatggaaggtggagaagaaccgggggtggagccgtcggcatcggcgactacagaggaaccgacagcgaggtggagcagaagtcagcgaggacggagggagtgggtggttaa

SEQ ID NO: 97774 - DNA, 365 bp, Oryza sativa
  Clone ID: PAT_MRT4530_95744C.1
atcccggtcgaccacgcgtccgccacgcgtccgcccactcatccgtatatccagcaaactgaatagcgtctactcctgacagcacaccaaactcatcagggggcggggcgattatgtgggaggcggggtggacaacttttattatgtacttcctcataattaacgttccgtacgctgatgcaagtatcatgggaggctccacccattacacgcagaacattcacatagttatcttcaccctgtttaacattattttcaacccaaccatacgacatttccccgggatgtacaacaagatgtacaacccctttgtccccatcatcgttaccattaaccacttcttcacgctgaacactcttctcatt

SEQ ID NO: 97775 - DNA, 676 bp, Oryza sativa
  Clone ID: PAT_MRT4530_95745C.1
ctaataagtagtggccgcaggccgccggtcatctcttccgccgtcgcgtgaaggctcggtgtcggggaaggccacaccagcctccatctccgccatgctgcttcttgtcgccgccggcttctggcatgtaacttcctctgtgccgccccagatctgagggttgaggccgttctgctccacctcgctgtcggttcctctgtagtcgccgatgccgacggctccacccccggttcttctccaccttccatggcagcgccacccgaatctgcggtcgtggttcagaacggcgacggcttgggcgtggagagtcgcagtcgcgtcatcgttgaggttcggcaggaggaaagccggtgaagccgcggcaggagcggcgcggagcgcgccgttgatggcgacgtcgaaagtgtcgaggaagccggcaggggcaccgtgggcgcctggggcgtcggcgcggttgaagaacgagctgtgggagacgtcgatgccgggagccagaagcagctcactgttgttgcaggcaccaggtctgacgaagagggtggtaagctccggcgggatggcatcggcctcagaccctcaccatctgctgctccagccatatgaaagcagggatgttcctcttcctttatcatggctttgcctcctctccatccgccatgccatctcaggagattga

SEQ ID NO: 97776 - DNA, 225 bp, Oryza sativa
  unsure (1)..(225): unsure at all n locations
  Clone ID: PAT_MRT4530_95746C.1
acgacttcttccaactgttaaatgccacatngnaaaaggggccaagagagaagggtataacattcaatatgtgatgacaagtactacaacaccgaattttgagatgaaccgatgaagcaacatggtatcatattgagcagaacgctacataggcagcaagagtccacaagaggtaggagcaaaagactgaaggggaatgagctacgcactaaaaagtttggaggt

SEQ ID NO: 97777 - DNA, 681 bp, Oryza sativa
  Clone ID: PAT_MRT4530_95747C.1
atggcgaacgaggagatcgagaccgacctcaggaggccaacgtctgacgcggtgtcgggggctactgtcggagaagtgggcccgggggtatgcggagtaagggaaaactaccttcccatcctggcgcatgacctacagcatggctctacccccgtaccccccgggtcgaacgagcagtcggggggcctcggggtgccacgtcatacccctcgggccctcgcgccgtcttaccccgagggctcggggtgccacgtcatatccctcgggccctcgggccgtcttgccccgaggcccccgcctgggcagacgcgcggcgtacgcgactggtgcatggcaaacaggaatgaccggtctatgaccggcctgtcaccagtcgcgtctgactggacggacagctgcacccccatgtcacatctgcctccggcggagtggaggcaggcatgggacggcgctgggccccactccaaagacaaaccatggcttagcttccaagccaaggcacaagacataacgacgacgacgaacgggcacggcggacacaactcggggacaacgaagacgaacggcgaggggacgacttcggcggcgatccttggacggaggcgagacgaggccggcgcaatgcttgacgatgcggagccgaggacgaagacgatgacggggctgcagcggctcgcttga

SEQ ID NO: 97778 - DNA, 1515 bp, Oryza sativa
  Clone ID: PAT_MRT4530_95748C.1
atggcgcatgtccttgtcgtgccgtatcctagccaggggcacatgaacccgatggtgcagttcgcgaggaagctggcgtccaagggcgtggcggtgaccgtggtcaccacccgcttcatcgagcggacgacgtcgtcgtccgccggcggcgggggcctcgacgcctgcccgggggtgcgggtggaggtcatctccgacggccacgacgagggcggcgtcgcgtcggcggcgagcctggaggagtacctcgccacgctcgacgccgccggggccgcgtcgctcgccgggctcgtcgccgccgaggcgcgcggcgccggcgcggaccgcctccccttcacgtgcgtggtgtacgacacgttcgcsccgtgggcggggcgcgtggcgcgcggcctcggcctgccggccgtggcgttctccacgcagtcgtgcgccgtcagcgctgtgtaccactacgtccacgaggggaagctcgccgtgccggcgccggagcaggagccggcgaccagcaggagcgccgcgttcgccgggctgccggagatggagaggcgcgagctcccgtcgttcgtgctcggcgacgggccgtacccgacgctcgccgtgttcgcgctcagccagttcgccgacgcggggaaggacgactgggtgctcttcaactcgttcgacgagctggagagcgaggttttggctgggttgtcgacccagtggaaggcccgcgccatcgggccatgcgtgccacttcccgccggcgacggcgccaccggccgcttcacctacggcgcgaacctgctcgacccggaggacacctgcatgcagtggctggacaccaagccgccgagctccgtcgcctacgtctccttcggcagcttcgcgtccctcggcgccgcccagacggaggagctcgcccgcggcctcctcgccgccggcaggccgttcctgtgggtggtcagggccaccgaggaggcgcagctgccccgccacctcctggacgccgcgacggcgtcgggcgacgcgctcgtcgtgcggtggagcccccagctcgacgtgctggcgcaccgcgccaccgggtgcttcgtcacgcactgcggctggaactccaccctggaggcgctcggcttcggggtgcccatggtggcgatgccgctgtggaccgaccagcccaccaacgccctgctcgtcgagcgcgcctggggcgccggcgtgcgcgcccgccgcggcgacgccgacgccgacgacgccgcgggggggacggcggcgatgttcctccgcggcgacatcgagcggtgcgtgcgcgccgtcatggacggggaggagcaggaggccgcccgtgcccgcgcgcgcggcgaggcgcggcggtggagcgacgccgcgcgcgcggcggtgtcccccggcggcagctccgaccggagcctggacgagttcgtggagttcttgcgcggcggctccggcgccgacgccggcgagaagtggaagacgctggtttgggagggcagcgaggctgcagcgtcggagatgtga

SEQ ID NO: 97779 - DNA, 200 bp, Oryza sativa
  unsure (1)..(200): unsure at all n locations
  Clone ID: PAT_MRT4530_95749C.1
aantgcattgntntgntgactcactctctntctctntctcgcggagnggtgtggacaaaaaaggaaggaaagatggagggcnggcgtntggggggaggtggaccacctcgccggcgagagggccaccgcncanttcnacgttgaacacatgaangatgcctgngctgnctcccnncacgccgncnatgtcaacgaccgcn

SEQ ID NO: 97780 - DNA, 607 bp, Oryza sativa
  Clone ID: PAT_MRT4530_9574C.1
ctaggaagaggcagcgccggccgagtagtggagaagcaacccatcgcaccgtcgccggcggcggtgcggcggcgagcacccatggaggtgaccctccgccggttcgagctctccgacgtggacgccatgatggcgtgggcgtcggacccggcggtggccgccttctgccgctgggagccgtaccagtcgacggagcccctgctcgcctacctccgcgacaccgtgctcccgcacccgtggttccgcgccatctgcctcgccaccggcgctggcgccggcgacggcgacggccgccccgtcggcgcggtgtcgctggcgccgacggcggacgcgtgccgcggggagctcgggtacgtggtggcgcgcgcgcactggggcaagggcgtggcgacggcggcggtgaggcgcgccgtcgccgcggtgctcggcggcgaggtgtccgggctggcgcgcgtggaggcgctcgtcgacgtggacaaccgggcgtcgcagcgcgtggtggagaaggccggattccggcgggagggcgtgctccggcgacactactggcacaagggccgcgtcagggacttggtcatgtacagcttcgtctcctccgatcaactcg

SEQ ID NO: 97781 - DNA, 160 bp, Oryza sativa
  Clone ID: PAT_MRT4530_95750C.1
cctaaaccttggcaatatataaaatgttttctattttaacaactcaggggcttcgggccttcaaaaaattctttttcatttcccaaaatttcatataatccaaaccgcccgccttttccaacctaatttacccccccccttctttattttgaaaaatttt

SEQ ID NO: 97782 - DNA, 308 bp, Oryza sativa
  Clone ID: PAT_MRT4530_95751C.1
ggaaaaatgggcttttattcaggaaattttaccaccggtccaaactccaggattgcgggaatccaaacgagaagatgaaaaaaacccgggacaggtttttaaacgcccccaaaaaaaatttgcggtatttggggaccagggtaatttttcccggggggcccgtgcaaggggccctggggcaggtttttttaaggggggctccgggccttttacaaaagtttccgggacctgcttcggggaccctttttttttttcctggggtggctcctccggttcggggtttttcttttgggggcttcgggacgggg

SEQ ID NO: 97783 - DNA, 276 bp, Oryza sativa
  Clone ID: PAT_MRT4530_95752C.1
atgggcccggggtatcatgtcgtggccctcccccaaggggagtcaggcccgaggtggggtggcggccactccttcccaaagattagtcagaggaggctgcccctcaatgccacgtggccctcccccaaggggagtcaggcccgagaggaggccgccccccaatgccacgtggccctcccccaaggggagtcaggcctgaggtggggtggcggccactccctggccgagactagagggagaaggctgccccaggcgccatgtggccctcccccgtag

SEQ ID NO: 97784 - DNA, 2580 bp, Oryza sativa
  Clone ID: PAT_MRT4530_95753C.1
atggcagtagcatccttgccaccttcctccaatggaagaatggtagagccggccgggacgatggtgcagtggtgggaagaatggcagctgcgcgtgctcgttctcaccagcctcttcctccagtgcttcctcttcttctcggccaccttccgcaagcaccggatcccggcgatcctcagggcatccatctggctggcctacctcggcagcgacgccgtggcgatctacggcctcgccgccatcttcagccgacacgggaagaacgccggcgacgacggcggccgcggggaatcttccatgctggaggtgctgtgggcgcccgtcttcctgatccacctcgccggggcgcaggacagcataaccgcgtacgacgccgccgaggacaacgcgctgtgggcgcggcgcgcggtggccatgtcgtcccaggccgcggtggccgtctacgtgttctgcaggtcatggtccggcgggaaggtgccggcgcgctgcccggtggcgctgttcgtcaccgggttcctcaagatgggtctcatgctctgggctctgcggcgagccagcgctacgaggatagcaaccgtcggccggaaggcggcggcggtagaggccaactggtcgttagagagatacctgcagtgggcgagtaaatccgccatcgaagccaccaggaacattcagacgaacgacgacggcgacggcggcggcggcgagaatcgttcggcggctcgccgccatcgtagcgccaccagtgagctgcagctggacctcatagatctcgagtatcagaacgacctcatggagctcttcattgatttcccaaatacctacactagccggcttagctacctctcgttgttcttgaagctcgaaccctacgatgcatactgccggctttgcgacctcgtggattatgcgttccagatcttctacaccagcagaaacgccgcctaccccttcgccatctggttcgtattcctgcggttcatctttttcatgctggcctccacggccatcggaggctttgacgggcttgacagcaacatagacgggctcgacgccaacgatgtcaagcactactggtatcatgttgagcatagttcgtcgactgaaaaagccgtagatctcatccgcgaggacctgagatctgggtgggtggaggatgatctgcgcagcgccgccgcctaccggagattcaatgaccggcgaggccagtggactctccggcgggagcagtgctacggagagatgggatggagcgtggccaagctaccgttcgacgaggctgtcctcatctggcacatcgccacggacatatgcctccattgcacggaagacatcgacatctcatcgtcaccggctgccagcgccgacgaggtcaccgccgtgatggagatatccaactacatgatgtacctgctggcgtaccagccagacatgctgatgctcggcaccagacaaagcctgttcatggcggcccaccatgagatcgtgcacgccttgagacaccaggggcggcatcagcaacagcccagcgagagagaccttgcgcgatgcctcgccggcggcgacgacgacgagtactccaccccggccacggaggagcaagccggagctggcagcaggcttctcgagaggagaggaggaggaggccgccatctagcgcacgcacggcggctcgccggcgcgatgatgaagctggatgccggcaagaggctgagggtgatcggcggggtgtgggtggagatgatatgctactccgcgagcagatgcagcgggtctctacacttgaagagcttgggtgtcagcggccaggagttcctcaccgtcgtttggctcctgcttcaccggatgggcatggaggtgttggccgacaagctccacagaccagagctcgccggagacgatccggatgctgttgtggtgccggggtgcgaggacgggcgcgatgttggcatgtgcggcgtcgacggcgcccccttcctcccgtgtggacctgcaagggtgaagactatgggcaagaggcgagacggcagcgaccattgcggcggggtggcggcgaccgcaggcggatccgacagcggcggctctacccgcggacgccgtcgatgccgccgctccccgccatcgccaccgcacctcgccgtcgcccgcgccgtgccggtgagacgggagggagagggggagagggagcagtccgccgtcaccgccgcacccgtcgtcgccgtcgacgctgccgtaaggacggccgtcgccgagggagcgtggacgccgatgatgccaccgcaccccgccgtcacccgcgtcgtgccagtgagacgggagggagagggggagagggagcagtccgccgtcgccgccgtcacccgtgccgtgccggtgagacggaagggagagggggagagggagcggcgccgccggaggggagaggagtggaagcggcgccggtggggagagggggaggggaagaggcgacgtagggagcgggggaggcggccgccggaggggagcgggaaaggcggcgtcgggggcgggggaggcggccggctcggctgtgggggaggggaagcggcggctgtggggtga

SEQ ID NO: 97785 - DNA, 331 bp, Oryza sativa
  unsure (1)..(331): unsure at all n locations
  Clone ID: PAT_MRT4530_95754C.1
ggactgaaaatagactagaggcaggttatttttaaagtataaaggatattgacttttatttattttttgttatacacattttttggcaaaaccaaaaaaagattcatcaccgtgacaaatttgcccctggctatattttacaataacacgcctggttaaccacaaatttttaattctatgtcccagactgcccgacccacaattgtgagaccagaattgattcactgacttcaacacaacgggagtgaacgcctagaaaaaacaaacatcaacctttaacccggtctccccaaaaaaaacaactgaaanaccgacccccggcccctggaca

SEQ ID NO: 97786 - DNA, 2463 bp, Oryza sativa
  Clone ID: PAT_MRT4530_95755C.1
atggtgcagtggtgggaagaatggcagctgcgcgtgctcgttctcaccagcctcttcctccagtgcttcctcttcttctcggccaccttccgcaagcaccggatcccggcgatcctcagggcatccatctggctggcctacctcggcagcgacgccgtggcgatctacggcctcgccgccatcttcagccgacacgggaagaacgccggcgacgacggcggccgcggggaatcttccatgctggaggtgctgtgggcgcccgtcttcctgatccacctcgccggggcgcaggacagcataaccgcgtacgacgccgccgaggacaacgcgctgtgggcgcggcgcgcggtggccatgtcgtcccaggccgcggtggccgtctacgtgttctgcaggtcatggtccggcgggaaggtgccggcgcgctgcccggtggcgctgttcgtcaccgggttcctcaagatgggtctcatgctctgggctctgcggcgagccagcgctacgaggatagcaaccgtcggccggaaggcggcggcggtagaggccaactggtcgttagagagatacctgcagtgggcgagtaaatccgccatcgaagccaccaggaacattcagacgaacgacgacggcgacggcggcggcggcgagaatcgttcggcggctcgccgccatcgtagcgccaccagtgagctgcagctggacctcatagatctcgagtatcagaacgacctcatggagctcttcattgatttcccaaatacctacactagccggcttagctacctctcgttgttcttgaagctcgaaccctacgatgcatactgccggctttgcgacctcgtggattatgcgttccagatcttctacaccagcagaaacgccgcctaccccttcgccatctggttcgtattcctgcggttcatctttttcatgctggcctccacggccatcggaggctttgacgggcttgacagcaacatagacgggctcgacgccaacgatgtcaaggtaacctacatccttctatactctgaattcgtagtggaattcagtaacatgatttcgctgcgctaccataagtggccggtgtgcaagctagaaccacaaataaagcacactatcgcgcagttcagcctcatcggctgcgcttcccacagccgatggccaagggaaatggattctaatctctcgagaagatatcctctcattcatacgtgtcaaacagtgttgagtagagtagccatgtttttgagatgcaacaaccagcactactggtatcatgttgagcatagttcgtcgactgaaaaagccgtagatctcatccgcgaggacctgagatctgggtgggtggaggatgatctgcgcagcgccgccgcctaccggagattcaatgaccggcgaggccagtggactctccggcgggagcagtgctacggagagatgggatggagcgtggccaagctaccgttcgacgaggctgtcctcatctggcacatcgccacggacatatgcctccattgcacggaagacatcgacatctcatcgtcaccggctgccagcgccgacgaggtcaccgccgtgatggagatatccaactacatgatgtacctgctggcgtaccagccagacatgctgatgctcggcaccagacaaagcctgttcatggcggcccaccatgagatcgtgcacgccttgagacaccaggggcggcatcagcaacagcccagcgagagagaccttgcgcgatgcctcgccggcggcgacgacgacgagtactccaccccggccacggaggagcaagccggagctggcagcaggcttctcgagaggagaggaggaggaggccgccatctagcgcacgcacggcggctcgccggcgcgatgatgaagctggatgccggcaagaggctgagggtgatcggcggggtgtgggtggagatgatatgctactccgcgagcagatgcagcgggtctctacacttgaagagcttgggtgtcagcggccaggagttcctcaccgtcgtttggctcctgcttcaccggatgggcatggaggtgttggccgacaagctccacagaccagagctcgccggagacgatccggatgctgttggaacagcttttctcagtacggatgatgcaacaattgctgacactatcaaaacaagaaacttagatttggagccaggccattggagtgtgaagcctacatggagccaaatttgcacaagagttccagaaagtcttttgcaggtcaattggatatttggattccgagaggagataaataaattagcagacagactagcagaagaagcaaaatctaatcgaccctcttccactgtttatgtctgtcaaagcatttctcacctggcttatcccaatacaggatgtcatgcaaataacattagagacaatttcaacctcacgaactttgtaattcagcatgttctatgcttttga

SEQ ID NO: 97787 - DNA, 429 bp, Oryza sativa
  Clone ID: PAT_MRT4530_95756C.1
atggagcagtggcgggcatccatggagacggaggcaccgagcatgcctctctccgagttttccattttcatcttcttcaccgcggtggcggcgaccgcaggcggatccgacagcggcggctctacccgcggacgccgtcgatgccgccgctccccgccatcgccaccgcacctcgccgtcgcccgcgccgtgccggtgagacgggagggagagggggagagggagcagtccgccgtcaccgccgcacccgtcgtcgccgtcgacgctgccgtaaggacggccgtcgccgagggagcgtggacgccgatgatgccaccgcaccccgccgtcacccgcgtcgtgccagtgagacgggagggagagggggagagggagcagtccgccgtcgccgccgtcacccgtgccgtgccgggggagaggcggcgttag

SEQ ID NO: 97788 - DNA, 215 bp, Oryza sativa
  Clone ID: PAT_MRT4530_95757C.1
gggggagagtgcgcccaaaccgacctaatgtacaaactctgcagagtaaaaactaatcaattagccgtgctcacggtcatgagcggcgtgtggatatgtattgagtataggcttgtgtttattcttctaaatgctaaaatttacctcaaattatgatgagatttgagaatgatctcctggctgccatggaagccaatgaggtgcctatttataca

SEQ ID NO: 97789 - DNA, 278 bp, Oryza sativa
  Clone ID: PAT_MRT4530_95758C.1
ccatcgctcatggatctctgctactgccagcacacacgcaagcatcgaaggctcggagcggcgtcctgcgaacacactgttgtaagggagcacgtgatgtggaggagtggaggaggaaggttggatatgtggttagtggcctaccgcaccggtgctagatgggggcaacgaggtggtgcggctcacatgggctacacatgcctcatcctgattgggccaggatgtcccaaggtgcttaatggaggcagcaaggtgatgcgggatgggggacagctcgg

SEQ ID NO: 97790 - DNA, 526 bp, Oryza sativa
  Clone ID: PAT_MRT4530_95759C.1
gttcttggtagtaggagattcttctccaatccgtgggagaagagctaggaggagcggaggaatccgtgtcccctcccgcggacctgcttctccggctgcccgaaacatgctttctccctatcagcctttgtgatgcattgaacaggggttgagaagtactgtaatttttgtaatggctgggtgttccttggcaacactgagaggacaacatcgagggagatggatccaatctcacagcaagctccccacaaggattatgtctattaatctgccaaagagtaatcacagtcacaagattcagcttccatgccagtccaatttaggaagaaaacagaaaactggtgcatttgctcctttgggttttcatggaaggtgttgccggatcgaaacatcagttaaatgttatttcttgcagtcgcttgtggattctgagagtatgatctcaccaaatttgttattgctttctgatgaagctctactaactatcagtatagtttttgcatatttggctggagttgtaccctct

SEQ ID NO: 97791 - DNA, 399 bp, Oryza sativa
  Clone ID: PAT_MRT4530_9575C.1
cccacgcgtgcgattacgcttgggcgttttctgcgccggcgtcatgagggaatgcattttgatctacatcgtgtaggccggtttccacctctgcaacgcatgctggaagctctattgcttctagtatggtatctagcctgatgaacagatgcacacctacaaaaccggtggaggaggtgatgatactgttaacaccttcttgagggagactgttgctctgaagcttgtactgcagtactgtcttcgacgatcttgagcctacatatattgatgacgtaatgactgtcgactaccggcagctattgcaccatgagcaggttatcagtggccacgatgatgcagatcagacaactatgtccatggtcactacaccattggcatcgagattgcagatctgtg

SEQ ID NO: 97792 - DNA, 3738 bp, Oryza sativa
  Clone ID: PAT_MRT4530_95760C.1
atggcatcttcgtccagctccattccatttgctctccatgggcaatcagtctctgagaagctgacgaagagcaacttcgtgctctggaaggcgcaggtcctagcgacgttgcgcggcgctcagatggcgggcttccttgacgggagcaacaaggcgcctgaagccaccatcgtcatcaccaaggacgatgggaagaccactgagaaggtggcaaatcctgctcttgcgcaatgggttgcgcaggaacaacaagtcctgagttacttgctgtcgtcgctctctcgcgacgtcctcacccaggtggccacgctcggcaaggccacagaagtctgggaggcattgaaagcctctttgcgtcgcagtctcgagctcgcgtcatcaacacccgcatggcgctctccaccaccaagaaagggaacaaaactgtcgctgaatatgaatccactggacgaggaggatctcgtctcctacatcctcgtcggcctcgacttcgactacaactcggttgtctcctccgttgctgggcgtgcagattcaatctcagtcagcgagctatatgctttgctcgttggctttgagacacgcctggatctgcttcagaacaactcctccccttctgccaacaccgtgtcgcgaggagggcgcggcggtggtggcggtggcaggggacaaggcggcaacaacggcggacgcggcggcggtttcaggcgcggccgtggtgacggcaaacccaagcccacttgccagctttgcggcaaaattggtcacgtggtggccaagtgttggaagaggtttgatccctctttcacaggagaagagaaggttgcgagcactgctgcaaccaacaactcctatagcatcgacacaaactggtatattgacagtgccgccactgatcacattaccagcgagatggagaagctggcgataaaggacaagtaccatggcaacgaccaggtccacgctgccagcggctcaggtatggacattgattatgttggtcatactgctatttgcactcccactcgtgatctctggctcaagaacattcttcatgtccttgaagcttataaaagtcttgtgtctgcccattgttttgctagagataatagagcctttgttgaacttcacccctgtttctttttggtaaaggatcaggtcacgaggaggccacttcttcgaggcaggtgtgaaagcggcctctaccccttgccaactgataagcaggcccatggcgccatcaagccgtctttgtctcggtggcatagccgtctagggcatccttctttttcaattgtcgatcgagttgttagcacaaataatctccatgtcactagggattctagtcgaagattaaaaccatgcaaacagattgggggaggggaatttcagcgcctcaatagtttctttaacaatgttggcattgaacatcatgtcgcctgcccctatgcttaccagcagaacggatcagttgagcgcaaccatcaccatatcgtcgaagttggcctttccttgctagctcatgcgtcaatgccactcaaattctgggatgaggcgtttaccaccgctgcatacctcataaatcgaacccctaccagagttctgtcttatgagactcctctccagcgcctattcaatcttcctcccgactacttcctgcttcgtaccttcggctgtgcctgttggccgaatcttagaccctacaacacacgcaaacttgccttccgatctaaacagtgtgctttcctagggtatagcacgatgcacaaagggtttaagtgcttggacattgctgccggtcgggtatatatctctcgtgatgttgtgtttgatgtacaagttttcccctttgctcagttgcattccaatgctggtgctcgtcttcagtctgaaatccagcttcttactcccaatctccttccttcaattatgcttgatcacgggggtgcagtagtacatgatcaacctctaattaataatcctaatcctactgattccagtggtgagagtgcaggacaaaattctggagcaaacggagaaaacagcgcagctaatgatagcgaatccacatcaattaaccatgattttatgcagaactgcgatctggctagttccggcgaacattataccgctgatgacgatcctaatgctgattcagctgactcggtgtcgcgtcaggtggatcccgaggcggatgcggcggctcatggctcggcggcgtcatctccaccaaccacgccgagccacgtcgactcagatgcgttcgggccaaccatgtctctgcaagatgcgggcccgacaccgacgccagctaccggatcgcctactccaaccatctctgcagtcgagtccgaggcaacgccagaagcacagccaattccaggtccaatcacacgagcgcaccatggaattcacaaacccaagaaatatacagatgggacggtaagatatgcttgcttaactgatactgaagaaccatctagtttacaagaagcactgcatgataaaaattggaagatagctatggataaagaatttgctgctcttgttcataataaaacttggcatctagttccaccacagaagggaacaaatgttattgactgtaagtgggtttataagataaaaaggaaggcagatggtataatagatagatataaggctaggttggtagctaaggggtttaaacagagatatgggattgactatgaggataccttcagtcctgtagttaaggcaacaactattagacttgttttgtctttagctgtttcacagggctggagcctgcaacagttggatgtccagaatgcctttttacatggatatcttgaggaggatgtgtatatgcgacaacctcctggatatgaggaatctaaggtgcctcactatctttgcaagcttgataaggcattgtatggtcttaaacaagctcctagagcttggtactccagattaagtaagaggctgcaggagttaggattcacctcatcaaaggcagatacttcgttgttcttctttaacaagaaaggtcttgtgatgtttctacttgtttatgctgatgatattattgttgccagttcttgttctcaggcagtcacagttctacttgaaaatctagagaaggactttgctcttaaggatcttggtgagttacattattttctaggtatagaagtaaagaaagatggagatggcttgctgctaagtcaggaaaggtatgcaaatgagatccttaagcaagtcagtatgactggatgcaaacctgtaagtactccactctccactgtagagaagctgtcggctcatgaaggagaaaagttaggagtaaatgattcaagtcagtatcgtagtattgttgtagctttacaatacttgacacttacaagaccagatatatcattctcaatcaataaggtctgtcagttcctacagaatccttttgttgttcattgggcagcagttaaaagaatactaagatatttgcagggaacagttaaacttggtctcaaaattgagaaatcaccttctagtgttgtaagtgccttctctgatgctgactgggcaggatatttagatgacagaaggtctacagggggttttgcagtcttcctaggttctaatttgatctcatggaatgctagaaaacaggctacagtatccaggtctagtactgaagcagaatataaagctttggcaaatgcaacagctgaagtaatgtggaattcctcatcctaa

SEQ ID NO: 97793 - DNA, 234 bp, Oryza sativa
  Clone ID: PAT_MRT4530_95761C.1
atggcgccggcgggatcgggagaagcagcggcggccggggcggcgagcaacgggctcgggagcggctgcgtagggttcgaggaaagcgcgaccgccccccacccatatccggcggaggcggctgccccctgcccggatgtagcagcggcggtggctgtcccctgctcggatccggtggcggttatggccggtttggcagaggaggcgggcgacgacggtggcagcaacttctag

SEQ ID NO: 97794 - DNA, 4083 bp, Oryza sativa
  Clone ID: PAT_MRT4530_95762C.1
atggccgccggcgaccacctgcggccgggctcctacctcggcgacgtctccgcgctctccttcctcccctcctccccccgccctcttctcctcgccggcaccggatcggagctgctcgtctacgacgtcgacgccgccaggcttgtcgcctccttccaagtgttcgacggcgtccgcgtccacggcatccagccccgctgcccggacggcccgtctcctggcgatgtcaccgtgttggtgttcggtgagaggagggtgaagattttcaggattcgcgccgacttcgaggatggcgaagcgtgcggcgtgcggttggagttggagcagaggctccccggatttgatcactgggtgctggacgcctgcttcctggaggctgatgggctgctcgcgatcggtttgagtgacaattcagtggcattatgggatttgagccagcgtgtgttgcatgcccgagtgaaatcgccagagaagtgcctactgtattcgatgagaatgtggggaaactctcttgaatctcttctcgtggcttctggaacaattttaaatgagattcttatttggaaaattgtaccccgagctctggaaaaatccttgttatgctcatataagagcaacactctcggtgtagaggactatgagaatatgcatattagtgataagcaatatataacaattcatcttggaaggttaaaggaacatgaaggttcaatatttagaatagcttggtcctctgatggatcaaagttcatgtctgtttccgatgaccgtagtgctcgcatctggatgttgagttctcagtcacagaactttgtcaataaggcagatggacaaaatgatgttcagattataccgaaactcacactttttgggcatagtgctagaatatgggattgctatgtatctaattctttagttattacagtcggcgaggattgttcttgttgcatctgggctatggacggaaagctaatcaagaagttcagggaacacatcggccgaggaatatggcggtgtttatatgatccaagcacactactgcttgccactgctgggtttgattcagccatcaaagtgcaccatctttataactcatcttgtcatgacaaaatggaagacaaggtggtctcagacgatgtcaattatgattctgaggtcttttcaatatcatcccctacagtgtcaggacagtatgggcccatggacagcgtgccagtgaaagtaattatttgtttggttcatcacagcaaaagtgagtatgtacgatacctacactttgtaaaagaaaatgatctctatgttgccacaaacaatggatatctgcatcatgctgagctctctaattccaacaatgtaagatggaccaaggttactcaagttgctgaggtggcaccgattatttgcatggatgttatggtaatgcactcagatatttcactgaatagggatgatatcattgcccttggagatggacgtggaaatgttactgttgtccatttaactgcctgtgatcttggacctaaagtgaattcatcttttacctggccagcagaaaaagataggcagctactaggagtatactggtgcaaatctcttgaatgtagacacattttcacagctgatcctagaggtgtgcttaagttatgggacataaggaatgcccttttttcaaatacccttgatatcactacatctcagaaggttcctcttattgctgtgtttgaatcttcctttggggcaagaatcatgtgcttagatgcgtttcctcaggacgaggtccttgtagctggtgataagaagggtaacataactgcctttcatttccctaaagtactggtagaacatgagagctgtgggacgcaacagaatatgccttcatgtgatcgttttaaaggagctcatggaatttctagtgtcacaagtgttcgtataattacctcaacttctgatcatcttcaaattcacaccacagggggagacggttgcatttgctttttcaagtatgacagaaatgtgcaaaagattgaattttttggaatgagacaagtaaaagagttgggcaccgttcaatccatctttcctcctcatgcctcagaaaagcaattgcttagcacctatgcaataggtttcacttctgccgattttatcatttgggaccttgaaaatgaaacaaagctgcttcaaatatcctgtggagggtggcgccgtccttattcatattatcttggcatggtccctgagtatcagaattgttttgcctttgttaaggatcataacattcacattcataggcactgggcaccatgtcaagacaagaaattgcttcctcaagttttccatatgcagttccatggaagagaagtgcactctttgtgcttcatagatccagcaggctattcaaatcctgagaagagctcaaatctgtatattgcaacaggatgtgaagatggaaccatgcgacttacagggaactcaattaatagtgctggaaaatggtgttcctccaagctgctgggggagcatgttggtggatcagctgtgagagcgacatgcttcgtgcagaagggctacacatcgttagataaatcatgtaacatcatccccaatggcaactctgatgacactttagtcaaaaacaaggataacatttccttattaatatccgttggatcaaagcaagtcctgactacttgggttttacagcctaaggttgcagaaaatagacatatctgttctagtggcttagatgtagactccaagcaaagcttgaaaggtgattcagccatgacatttcaatggctttctacccacatgcctccaaagcttaccaataggttgaaaactggcaatgtaaaaaataataatgaggaaggggattcctctatgatgcaacccaaccagtttattgtggatcagctggaaaatgactggcgttatctttcggttacagcatttcttttggaacatccttccaccaagtttgatgttgccttgttggctccacagggatcaccagttctggtgctcaagcatattattgctgcagctaacaccgcagaccatggagatacatacattgttgtgagtggatctacagatggtagcattactttctgggaccttacagatactattcatggatttatgcaactagtatcagagactcaaccacacatggttattgattgccaaaagcggcccagaacaggaagaggaagtcaaggcggtcggcgcaggtggagaacactgccgggccgttctttgaaaaagataaataaagagacatcgatccctgatgggagcatcccgaatactccaaatgccactgaaaatacatctgaaacttctaatgtggaagaaactgatgccacaaaccagaactatgcattctcaaatttgcaatcgtgtaatatacctgaagtgacaccaatgcacagattctccggtgttcaccagtcaggcgtcaactgcctccatgtctcagagatgagggcttgctcgtactcgacacctggcatgtcttactgtgtcataagcggtggggatgatcaagctgttcactgtttcagttttacattaggatctcttcaggattgcgcaataaatacaagcctagactcacctgacaatggtgcagttaaaattatttgtcaacatagggttccttctgcccacagttcagcagttaaaggcatctggacggatggcatatgggctttctctactggccttgatcaaagagtaagatgttggaagatggagtcatctggcaaattcactgagtattcccatgctatcatcagcgtacctgagccagaaactttggatgttgtacatgaccggatgcccaccagagaactggaattttatgtggacttctgcaacttgatcaaaactttgaaatatgtcaggcagaacgtacacagcatgccgaccaggttggtgcgggtctgcttgaacaacctcatcgcgctgatcgagcagtggattgtgcgaagtttaagctgtagtgctgtactgatttcactcatggtggacggtgacaatggcaagtggaactgtccgtctgtccgtccaagttga

SEQ ID NO: 97795 - DNA, 2922 bp, Oryza sativa
  Clone ID: PAT_MRT4530_95763C.1
atggtgatgatgatgatcaaatccgtggtttattacgggagcacctccattgggcatgtggaggtgtggcccaagggcgggacggacctggcggtggcggcgtgggcgcgggagatccgggtggaccacctgtcgccgcccagcgagcggtgcccgccgctcgccgtgctgcacgccgttgccgcgggcggtcgctgcctcgtgatggagtccaggcccacggccaccgcggatgagcccccgccgccgctcgtcgccatgcacgccgcttgcctcagggacggaaagactgctgtttttcctctaggagcagaagagatccatttagtggcaatgacttccaagagaaacttgccgaatcttgcttgtttttggggctataaggtgccatcgggcttgtataattcttgcttgagcatgttgaatcttcgttgccttggtattgtgtttgaccttgatgaaacattgcttgtcgccaataccacacggtcctttgaagacagaattgatgcacttcagagaaagttgagtaacgagattgatcctcaacatattagtggtatgtcggcagagatcaagaggtaccaagaagacaagtctatcctaaagcagtatatagaaaatgatcaggttattgatggtggcaaggtttataaagtacagactgaggttatcccacctttacctgataatcatcagcctatgacacgtccaatcataagattacaagagaaaaatattatcctgacgcgtataaatccattgataagagataccagtgttctggtacggttgaggcctgcatgggaggatcttcggagctacttaattgcaagaggtcgcaaacgttttgaggtatatgtgtgcacaatggctgagagggactatgctttggaaatgtggaggttgctcgatccagattcaagattgataaactctgttcaacttactgacagacttgtctgtgttaaatctggctctcgaaagtctctgctgaatgtattccatgatgggtcttgccacccagaaatggccctagtgattgatgatcgcttgaaagtttgggatgagaaagaccagtgtagggttcacgttgttcctgccttttctccatattactctccccaggcagaggcaaacttctctgttccagttctctgctttgctagaaatgttgcatgcaatgtcaggggtggttttttcaaagaatttgatgaggtccttctgccacggataagcgagattcactacgaggacgaaataaatgattttccgtccgctcctgatgttggcaattatttgattaccgaggacgagaatgctgccattttgaatgtaaacaaagatcctcttgcttttgatggtatggcagatgcagaagttgagaggagattgaaggaagtgtcttgcagtgttcaagctgtgaatccaataccaactaatgctgatgtgatgcctgtggcccctaaccagcaacttattacatcatctgttccagaagcaccatcattgggcatgattcctttgaataatgatcaaggtcctcagcctccttcaagctggccggttgctcaatctgctcctgtggatccatcgcaaagttctccagctagagaagagggtgaggttcctgaatctgagttggatccggacacaaggagaaggcttctcatattacagcatggtcaagacacgagagatcctgcaccaccctgtcctgcaggatcacccgtacagacctcagtattgccagtgcaatctcatgggaattggtcacatgtagaggatgagatgaatccaagaagcctaaataggacctcaacagggttccatttagaatctgatgatataaattatgataaaaagcaaccacataatccaccgtattttcctgatgaggataatcttataacttctgatagatataaccgtcggatccatagatacccctcacagctgcctcacagtgaggatcatcatatgctgaatcgttcatctatagcctacagatcttttcctggagaggacatgggaaaccgatttggtccttcgaatcatagaagcagtaaaatagaaccaggacaccagtttgtacaaaacgcagagacctcagctggtgtgttggaggaaattgcagtggaatgtgggtttaaggtggagtaccaatcaactttgtgtagtactgcagagttgcaattctccattgaggttaggattttaggagaaaaggtaggtgaaggaattggaaaaacaagaaaagcagcaaaacgccaagctgttaatatgtccttaagaaatctggcagaaaaatttctaacgtctgatccggataagatgatgattctgaaggagaatggttttagtagtaattcaaactcattcagatattcgggaggtagtagagatgacacatcaccagttgcaagcacttcaaacgagtctagatacatgggcgagagagttgatactttaagaaaacctgctggttctgttgctgctctcaaagagctttgtacggttgagggttacaacttagttttccaagagcagccatcacgtcctcgtggttcatcaggtaaagaagcttatgctcaggtcgaaataggtggtcaaatcctgggaaaaggagttggagcaacatgggaacaagctaagctgcaggctgctgatgaggctctaggaaatttgaaatccatgcttggtatctttgcacataaatcatctggatttcaaagttttacactgcttcctgctgctcttcatggccatgtttggttcatacagcaaccgggttcggctggtgttggtccaaggcttaaggagagtatatacctgcattggttgaagatctttatgagaagctcgaatcttggtggctacgtgcacaatgttgtccctctttctgtttatctgtatgcttga

SEQ ID NO: 97796 - DNA, 485 bp, Oryza sativa
  Clone ID: PAT_MRT4530_95764C.1
aaaaaaaacaaaaaccccggggggggggcttttttttattccccccaatatgggggggattagggaagcgtttttttgaaactggttaccccttccgggggcccttacgggaaaagttttaagaacaaaagcccgggctttaagaaagaaaaccctttttaaacccgccctttaaagagaggggaaaagggttcccgggggtttcccccccccccccccagttttttgaaggaaaaggaacccctggaatggccggtttaaaaactagggttcttccttgggggggggaaagcccccctccccccaaaggggggggacctttttttttggggggggggggggccccccccaccggccatttgaaaaattctggcggggggggcgccaaatgatcaaaagcccctgaaaatcttttggttttaaaaaatcccaaaccgggggggggccttttacaggaacagaaaatgggtttttttgaaaagggg

SEQ ID NO: 97797 - DNA, 204 bp, Oryza sativa
  Clone ID: PAT_MRT4530_95765C.1
atgcttgagcagctggagcaaatgactcggtacgtaagtgcaggtgatacagctgaacgtgacagtgactgggttgatgatcaggcgactcgtgtctgtatctatggtgcgtcacaactcacaacgcacatctacagtagaaaccgctcaatgacagcgatcgagttcattctaaatggcactgcaatagcctggcttaaattc

SEQ ID NO: 97798 - DNA, 141 bp, Oryza sativa
  Clone ID: PAT_MRT4530_95766C.1
atggacggactggcggaggacgacatctctgcgggcggaagatttggccggaggggaagtcgccttgagatcgcctggtgcgccgaggggattgccggagagagaagacaaagttggcttaagcgagcaaggatcggctaa

SEQ ID NO: 97799 - DNA, 521 bp, Oryza sativa
  Clone ID: PAT_MRT4530_95767C.1
ttctccttggaggagaagatcaaggcacttcgagcgccacgtccggccaaatttcagcttttacttggaatattcaaaagcactggaacgaggccgcgaggagcgatcaaaacgaccaaactacagagctgttctggagtatgatggtattatatcacgccgagtagatagccaggaatttggtagagtcaagactagagaggagcttttagctgaagagcgagattacaagcgaagaagaacgtcgtaccgtggcaagaaagcgaagagaaatccaaaagagattttaagagacataattgatgagcatatggaagagatcaaacaggcaggagggattggttgccatttggatgtgcctggtgatattgcacagagtgtgcttaagaatagtcctcatgatggcacataccaaggaagttttaatcctacaagcagttcttatggtaaggacagttttggtattccatcagtcagttgtgaaaaattaccatgtgctaattcttttggaatagtttcat

SEQ ID NO: 97800 - DNA, 367 bp, Oryza sativa
  unsure (1)..(367): unsure at all n locations
  Clone ID: PAT_MRT4530_95768C.1
ggccgcaaggtggtgggtttgcgacggggaggatctgcgtgggggagctggagctcgcggcggtcaccgcgttcgagaagatctgcgccctgtcggcgacgaagggcggcggcggcggcgtcacgttctacaggccggccggcgtgccgggggggttctccgtgctcggccattactgccagtccaacacacgcccgctccacggccacctgctcgtcgccaaggcggtggcgggcaagccggagtcggagtcgctgccgcctctccggccggcgcacgactacgagctcgtgtgcgcgttncnggcggatggcgtcggggaggacaggaagtcttgccgtgggtacggccgaaccggggcctactt

SEQ ID NO: 97801 - DNA, 2418 bp, Oryza sativa
  Clone ID: PAT_MRT4530_95769C.1
atggcaccggccgccggtgagcccagtgcagccgcgggcggcggggagggagacaccgaggcgcatgcggtgatcgacgtcagcagcagcgaaaccgactccgaccccgaccccggcttcggcggcgccgggaagaggccgcggcgtgtggtggcaacggctggcagtggccgggaggcggagaagagggctaggattctggccgccgccgttccaccgggattcctcgatccgctaccgcggccttctgcccctcctcctcctcctcctcctccgcgcgggaggaggagggtgacgaggcagttctggaatggcggggactacgacggcaagccggacctgctcagcggagacccatcgctgcgttccgatgatggtggtgggatggacccagataaaatgtggcattgtatgtctttgggttattcagcaaagagcaaggtgaaagataccattggacaatatggaaatggtttcaagacaagtacaatgcgactcggtgctgatgtattagtcttatcacgtagttgtggtaatggcggaagaaggcgcacacaaagtattggcatgctatcttacacattcctgagagagaccaggaaagatgatattattgttccaatgattgattatgaaaagggacaacaatattggaaaaggatgatgaggacaacatcgattgactggcagacaagcttagcaacgataatagaatggtccccttattccagtgaagcagaacttcttcaagagtttagctcaatcaaggaacaagggactcggattattatatacaatctatgggagaatgaacagggagagttggagcttgattttgatactgatgtaaatgatattcaaattagaggtggtaaccgagatcagaaaaatatccagctggcaaagcagtttccaaactccagacatttttttacatatagacattcactgcagagctatgcatcgattttgtatcttcgagttccatctgtattccaaatgattttacgaggcaaagagattgaacatcataatattattggtgacatgatgatgaagaatcatgttatttacaaaccagtgatgactgatggatttccgagggatatcgatatgatgactgatgttacaattggttttgttaaagatgcaaaacatcatattcccattcaaggatttaatgtttaccacaagaaccgcttgataaagcctttctggagagtgtgggctctacctggaattcaagggcgtggtgttataggtaagaaatccttctataagcccctttggcacaacttcttcatgtgtggaaagctgatactggaagaagctggtgacagacagcttctccttcatagccgtgtacttgaagtcaactttgtagaaccagctcatgataagcaggactttgaacgcacaaatagccttgcaagactcgaagcacgattaaatttaatgcagaagaaatactggtctgataattgccatcgaataggttatggtggcaattctgctaacagaaaatctgggagagaatataaagagacacctgaaaatactccacacacaggaccaacatcagatcaatctcctgaaggctgtagaagttcgaattatttgcaaagaaaaagaagttttggaagtccatattctggatcaagtaataacaatagcaaaactggaataacatccttgaacacaagtaaaataagtcttcctgagagcagattctctttaagaacaacagctcagcagacagttgagaagaccaaaaggaccttaagatatacgagaccactactgcacggtctatcacatacaagtaatgatagtgatgctcagacttcaggcaccccatcaagatcaacttctcatattctaaagacacctgaaaaatcatgccacaatgagaatactttgcctttaattccatctagtgaagcaataagaagtgaagggacaacaagatatcagtcagagatgactgtttcagtagagatgacctctcaccttaggaagacagtaacattcctcccattaaaagttaacaaagaaagaaatgtaacaaataatggagatggacaaactgttgataaccctgagacagttatcaaattgttgaccgatgaaaattcgtcattaaaagaaagtatcatgaagatggaggaatctttgtcaagagaattacatatcgaacgggacaagaataagtctctcattgaaaggttggagaatgttcagaagcaacttggaactgcaaacaaggagcaagaagcattggtagatatctttacagaagaaagagcgcgtcgagaccaagaggtggagaaccagcggacgaaactaaaggaggcgtcgtccaccatacagaacctgctggatcagctgaatgctgccaggagctgccgcaagaactag

SEQ ID NO: 97802 - DNA, 204 bp, Oryza sativa
  Clone ID: PAT_MRT4530_9576C.1
atggcggccctcctcgctgtcgtctgcctcctgcgtagctccatctcatgcgtcgccaccgtggacgcggccaccgacaaccgtcactcatgtgtcgtgtccgctgtcgccgcccgtcctccgatccccgccctgcctgccagcagtagagagaaaacagagagaggggtgagtgacttgtgtgagtcattagatcaagcttga

SEQ ID NO: 97803 - DNA, 225 bp, Oryza sativa
  Clone ID: PAT_MRT4530_95770C.1
tttgttggattgcctagctttgctgctttgcttgcttgctgtggtgtggtgtggtgtgaattttgttgattggtcggagcttgcagttgtgtatggtggtggtggtgctggagctacattatgctagctgatagattgtcagatcggcgacgacataaatggtaagagcagcgcacggtatctggccgaaaaaattaatcaccagggattttatacgtggctgca

SEQ ID NO: 97804 - DNA, 525 bp, Oryza sativa
  Clone ID: PAT_MRT4530_95771C.1
ttcttttttttttttttttttttttttttttttttttttttttttttttttttttttggacagcacaaaaccttttttggaataacataaattagcccggggttccttatctgttaatcctaaaacacacctacctttgccacgattttggaacactttggatgtttcactggtcctccagaactaaaataacaatgggggccaaataatttgaaccaaaatttaggcagcacaaatggttaaacacgggccctggctccagttaagggtttggcatgacacaccatccattattgtttacaaccccgtaaaaagaccaaacattttgcattgccttgaaaaaccatttattgttttttttttcgaaagcccctttagtcccaataaagcctaacgacagagccggcccccgcagtgaccaaccaaggctgtcttggggggaatttgcaaaccaaaaccccctttccatttgaacttgaaggaccccgaaaaatttccaaggggccaaaaagggggctttggtta

SEQ ID NO: 97805 - DNA, 676 bp, Oryza sativa
  unsure (1)..(676): unsure at all n locations
  Clone ID: PAT_MRT4530_95772C.1
aagggtttaattggtgttaattacctggttgggcttaacgccaacctgggggtccaagttcatctacgtttgtcaaagttcttaaatggtggctgcttagggacaattggcctgatcaagggcgaggataagaatcatggatttgttggttaaaaggtactgtggcaattccaagccgctttggcaaagtgggatggaagatgggaatgctgccaactgaacaactgtggagtgcaacaagcaatttcggaagccagtgagagatgatntgatgggagacccctggatgatgtgtgtgcgagatgtgtgacgtgggagactagatgtggataggctgtgctgtggaatttttgctaatgctacttcgggatatacaatgtgttgtgagtggaggttagatggaacggttgcccggtggttgtgtgtgcaatggtgtcaatgcctgtgtgttgntgtgtgtgcctgtctggtgaattgggtttgaatgaaatagggatgatttatggtggacaaggcaatagtgcgaatcttggttttattgaggaagggttcaggtcttaaacaactttggattatttagcctcatgtgacatagctcatttncctcttgttcatgttttcgtgtaccnttttctgatttcgttgcaaatcttcttctctcaaaaaaaaaaaaaaa

SEQ ID NO: 97806 - DNA, 2966 bp, Oryza sativa
  Clone ID: PAT_MRT4530_95773C.1
atagcaaatgtaattcacccttaaataacatcacgaaaattgctcaagaaatatgcaagcccattcatgacagtaactaaataagttaattatacatacacaacacacactgcacacgaagagcacaccatatatattagttcttctttctgctaaagacttaaccatcacccattttacttaacctgcttcttggccgagttcttccgtttcggcctggcctcctgcagcatggacagcacctccctcatcgacggccgctcctgcgggcaccggctggtgcacagcagcgccaccctaagcgccagcgccatctcgtcccgcgtgccaccgacatcattgtcggcccacgccgcagcgtcgatcacgtcgcccaccccgcctccggccaccttccgccgcacccagtccacgatgttgttcccctccccgtactccgcctccaccgaccgccgtcccgtcaggatctccaatagtaccacaccgaagctgtacacatcgctcttctcgttcacttttagagtgtacgtgtactctggtgcaatgtagccgcatgagccggcgacgacggacatgggggcggcgctctggagcgccttggcgacgccgaagtcggcgacgcgtgcctccatgtcgtcgtcgaggaggatgttgctgggcttgatgtcgcggtgcgcgatggcggggaggcagtcgtggtggaggtagctgacgccctgcgcgacgccgacggcgatcttgtaccgggcgtcccagcccggccgcgccttggcggcggcgccgtggaggagctcgtcgaggagcttcttcacggcgatgacctcgccattgggcatcttggcgcggtacaccgtccccgacgacccggcgccgacgatgccgtcgctcccctcgacgcacctcgccacgtcgtcggcggtgaagctcagcctctggaacgcggtcatccgccacggcccgacgacgaggtcggggtggcgcgcgccgccgggaccgagcgcgtctgccgccgccgtgtcgtcgccgccacgccactgcagccagcgcgcggtgcccgcgagcaccaccatgccggcgaacgccaccgccacggcgggcacccacatcgccgccgtgtgccgcgcggggctgccgcgttcgccggcgtccgacgacggctcggccggcgccaggtggttgaacgacacgtcgaacgtctccagcgtcgtgcagttggtgaaccccggcgggacggtgccggtgagcgcgttccaggacaggtcgacctcggtgatcgacggcagcgcggcgatcgccgccggtatctctccggtgagctcgttgtgctgcagcctcaagctcaccagccgcttgcagctgccaatgtcgccggggatcccgccgcccagcgcgttcccggccaactctagccggtacaggttcgcgcacccggtggcgccgaacgccgggagctcgccgaccagaccgcatctgctcgccgcgaacacctgcagcttcggcccccgccacgccatgtccggcagcgcgccgccgaccaggttgccggagacgttgaagtactcaaggctgggagaagcgaccaggtcggccggaatgccgccgccggtgagcgagttggagctcaagtccatgtacgtcagattccgtatcgcgccgaaccccgctggaatctcgccggagagccggttcgcctcgagccggacgcgccacagcgacgagcagtcggcgaggctcgccggaatcgcggagtcgaaccggttgtcgaagaggatgaggcgggcgaggcggttgccggcgcagacaccgggaggaatcgggccggagagggagttcgtcgacacgtcgagccggacaagccgccggctcgcgccgagcgactccggcagcctcccggcgagcgagttgttccatagctggagcacctcgaggctcggcagcgcgccgatcgccgccgggatcgtgccggagagggagttgctcatgagattcagcgtcgtgaggttggtgagctcgccgaggccggccgggatcgcgccggcgaggtggttgtccgagacgtcgagaacctggagcgctcggaggcgagaccaccgcggcgggatcgcgccggcgatcctgttcttgaacaggaacagagattcaagccgcgtgagctcgccgagctccggcggcagcggcccggacacgttggcggcggcgatatcgaggtaccggagctgtgccatcttcccgaactccggcggtatcccgccgtcgtacgcattgtacccaatctcaaggtgttcgaccgacgtgagctcgccgagctccctcggcagccgcccggagagagcgttccccgcgaggtgcagaaaccgcagccgccgcagctgcccgacctcgccggggatgctcccgttgaagaagctgccaccgaggttgaggtgctcgagcctccggagctcgccgatgccacgggggagctccccgacgaagcagttgctgaaggcgtcaaggaaggcgagcgagccgagcttggcgatgccgtcggggaacgtggagttgaagaagttatggctaacatcaagcgccacgagccgccggagcaggagcaccgccggcgggagctcgccggcgaacgcgttcccgctgaggttcagcgacgtcagcgtcggggacagcagcctcgcggcggtgggcgacacggtgccggacaggttccgccgcgacaggtcgaccccgacgacctccccggttgccccgtcgcacgccaccccgggccacgcgcaccacggcggcgccagcgacctggtggcgcccgcggacgccgccgcggcgtacgtccacgaccgcagcgcgccggcggggtcgcccagcgacgacctcagcgacagcagcgcgagcagcgggagcggcgccgacgacgcggatgtgatggtagcgagaggcagcagcaaaagcaggacatggacggcggcggcggccat

SEQ ID NO: 97807 - DNA, 292 bp, Oryza sativa
  unsure (1)..(292): unsure at all n locations
  Clone ID: PAT_MRT4530_95774C.1
gccaaagcctgagctctcacaagtctcaagtaggagtagaaaacncctcggccgtatcgcctaactacaccaccccatcttctactgctcgctccccgccatgatgctgctcgcccgcgccgtcctccgctcccgcctccgctgcccgccgctgtctgctgcggcggcgtcgacggcggcgttctcgtcggccccgtcgccggcggggncggaaggcngacgcgcngtacggggacnnggccccaggaacgacttggagcnggccgaagatcaggcngtctaagaattccct

SEQ ID NO: 97808 - DNA, 594 bp, Oryza sativa
  Clone ID: PAT_MRT4530_95775C.1
atgccgctcagaaccttctcagccaaagaaactggccccgccgccactctcctccgcgtgcttgagcacccgctcgccttctccagctcagaggggaggacggacgccaactccagcatcggtggaaggcgacggcgctggagagaccgcagcgtgggctgggtaagggcaggaaggcaacgacggggtgaagaaaggagaaggagacggtgggggagggaggatggcggtgatgggggagggcagactatggcggcggctaacccgcgccgacgccggagtcggtgggaggcggcagcatcggggcagggaggcgacggtggggggagcaacgctggggacggcggttgcagcggcgccggggacgacagtgatggggacggaagcgctaggacaccggcagtggaggggcggtgggcggttggacgaggcggcggtgctgcgggcaacgaagccaggatgctagcggtggaggtgtggttggcggagcatggggagagcggcggcgctgcgggcgacagcgccagtacgccgacggtgaaggcgtggtgggcagaggacggggagggcgccggcgctgcgggcgacgggtag

SEQ ID NO: 97809 - DNA, 310 bp, Oryza sativa
  Clone ID: PAT_MRT4530_95776C.1
acactatagaagagcttgaggtgagcacctcgaagctgatccttaggcgctttttgtttgttggaattaaaagacaataaaaatatatgtgtaaggaatgacaaatgtaaaaaagtattaggtacaaagtattggaaaaatttaatgcacgataaactggaggatgccaaaatgtaatccggaacaaacaggtactgggtatgcttggtgcccgacatgtggcaatcggagagtacacttgaatctaacgaacgatataccattgtgatgagaacaatgaaaactcaggtaatgaagatgaggtgcatgt

SEQ ID NO: 97810 - DNA, 2064 bp, Oryza sativa
  Clone ID: PAT_MRT4530_95777C.1
atggcggccgcccgagcttgccctatgggagtatcggtcgaccagcggcgcgcggccgttgccgtgctccgcgccgccgccgccgccggcgagctttcgttagggaaggcggttcacgcgagggttgtcagggccgcgcgcttcgacgtcgtccagtacaacaacctcattgccctgtacgtcaagtgcggccgcctaggcctcgcccgccaggtgttcgacgcaatgccctcccggaaccccgtgtctgggaacctgctcatgtccgggtacgcttcttccgggcgccacagggacgccctcgcgctcctcagggtggctgactttggtctgaatgagtacgtgctgtcgtcggctgtggccgcgactgcccatgtccggagctatgatatggggaggcagtgccatggatatgctatcaaggctggactagcagagcacccttacgtttgtagtgcggtgctgcatatgtattgccaatgtgcacacatggacgaagcggtgaaggtatttgataatgtttccagttttaatgtattcgcgttcaactcaatgataaatgggtttcttgatcggggccagatggatggttccaccagtatagtaagaagcatggtgagaaatgtcgggcaatgggatcatgtgtcatatgtcgcagttcttgggcattgtgctagcacgaaagaggtggtgcttgggagtcaggtgcatacccaagcgttgaagaggaggcttgagctgaatgtgtatgtggggagtgcactcgttgatatgtatgggaaatgtgactttccccatgaagctaatcgcgtgtttgaggttttgccagaaaagaatattgtttcctggacagccattatgactgcttatacacaaaatgagctgtttgaagatgcattgcagttgttcttggatatggaaatggaaggagttcggcctaatgagttcacttatgctgttgctctcaacagttgcgctggtcttgccaccttgaaaaatggtaatgcccttggtgcatgtactatgaaaactgggcattggggccttttgcctgtctgtaatgccctcatgaacatgtactcaaagagtggcagtgttgaggatgcacggagagtcttcctttctatgccatgtcgtgatgtggtttcttggaattcaatcatcattggctacgctcatcatggccgtgcaagagaagccatggaagcatttcatgatatgttgtttgcagaagaagtcccatcttatgtaactttcattggggtgctgtcagcctgtgctcagttgggtcttgtagatgaagggttctactacctgaatattatgatgaaggaagtgggagtaaaacctggtaaggaacattacacttgcatggtcggtttgctgtgcagagttggacggcttgacgaggcagaacgattcatagaaagtaactgcattggtaccgatgttgttgcatggagatcacttctaagttcttgccaagtatatagaaattatggtcttggtcatcgagtagctgaacagatttttcagttaaagcccaaagatgttggaacctatgttttgctttctaatatgtatgcgaaagcaaaccggtgggatggtgtcgtgaaggttcggaggctgatgagagagttgggcgttaggaaggagcctggtgttagttggattcaagtgggtagtgaggtccatgttttcacatctgaggacaaaaaacacccatatatggagcagatcaccaaaaaactccaagagctgatagacaagataaaagtgattggatatgttccaaacattgcagtggccctacatgatgttgaggatgaacaaaaggaagaacatcttatgtatcacagtgagaaattagctcttgcatttggccttattcgcacccccaagggagaagctattcgtataatgaaaaacgtcaggatatgtgatgattgccatgttgccatcaaactcatttcacttgccacaggcagaagaatagttgtaagggacactgttcggtttcattgtatagaagatggagtctgctcatgtgatgactattggtga

SEQ ID NO: 97811 - DNA, 159 bp, Oryza sativa
  Clone ID: PAT_MRT4530_95778C.1
atggcgaaggctagaaagccgcgtcggtactccgaaagtaaaggcatctcaggcgaaggcatctcgggcgaactacaaagacctcgctatgacgagttcggcatcaagaaggcccaacaggcctcccccagacttttaggcccgtttgccatagactag

SEQ ID NO: 97812 - DNA, 344 bp, Oryza sativa
  Clone ID: PAT_MRT4530_95779C.1
atgtaaacaaggaaattggggataaggaataaacaccaaaatccaaaattaaggggagaaggggaacaaaatgcaagcccgggggtccaggggttaaaaacaaaaccacacgggaaaacgggggaccacagggcatcaaaacaaaaggaaggcgggaagggaatccaaaagaaaaggggaaaacccaaaccggcggttcggagaaaaacccaaagtgggggaaaaggagccaacaagggcgccggggccctagaccaggagagcgggggggccccagagcccggggagggggacggggcaaatcccaaacccagaagccccacggaaccaagaagcaacggggg

SEQ ID NO: 97813 - DNA, 352 bp, Oryza sativa
  unsure (1)..(352): unsure at all n locations
  Clone ID: PAT_MRT4530_9577C.1
gctcctcttgctgctttgatggattcgaggatggaaattccaatggaaaataccttttatacgcggttggatacacttatcgagagcattattcagggcaatcctcatggcactgcaacccagactgcaacctatatgatcaaatctatcatcactactacagcacatactactgctgatgccactgctgttctcaatggcactcactgtggcactctctgtggcaagacaactggtgagacttaccctgaaccttacccacaaaccattgtccagaccatgctccanacctagctatacgcggaccattccgttgaccataacgccattaccaaatccattaccatttcca

SEQ ID NO: 97814 - DNA, 1326 bp, Oryza sativa
  Clone ID: PAT_MRT4530_95780C.1
ctctcctcgactcctctcttctcttctcctctcctctcctctcaaccgatggctctcgtccgccagcgacgccacctgccgcacctcaccctcccgctcgatcacttcgccctccgcccgccgccggcgccgcagcagcagcagcagcccgcagtcgcgccgtccacctcctctgacgtccgcctctcggacttcgagaggatctccgtcctcggccacggcaacggcgggacggtgtacaaggcgcgccaccgacggggttgccccgcgcagcagccgctcgcgctcaagctcttcgccgccggggacctctccgcggcgcgggaggccgagatactcaggctcgcggcggatgccccgcacgtcgtgaggctccacgcggtggtcccgtcggccgccggtggggtggaggagcccgccgcgctggcgctcgagctcatgcccgggggttccctggctgggttgcttcgccgtctcgggcgcccgatgggggagcgccccatcgccgccgtggcgaggcaggcgctactcgggctcgaggcccttcacgcgctccgcatcgtgcaccgcgacctcaagccgtcgaacctgctcctcggcgccgacggcgaggtcaagatcgccgacttcggcgcgggcaaggtcctgcggcggcggctcgacccctgcgcgtcctacgtcgggacggcggcctacatgtccccggagaggttcgacccggaggcctactccggcgactacgacccgtacgccgccgacgtgtggagcctcggggtagcgatccttgagctgtacctcggccacttcccgcttctccccgtggggcagcgccccgactgggcggcgctcatgtgcgccatatgcttcggcgaggcgccggagatgccggccgccgcgtcggaggagttccgggacttcgtgtcgcggtgcctcgagaagaaggccgggcggcgcgcgtcggtcggcgagctgctcgagcacccgttcatcgccgagcgggacgccgccgatgcgcagcgctcgctcgccgcgctcgtcgccgaggcggagcagagcggcgatctatagccaatcgagccgccggttaaattaactctgcagatttaggaaccaatcagagatgacgtgtacataatctctgccacgtggacgaacagctttgtcccgtgtgtttttttcttcctctcttttcacttcttgccatccaaggatttgtttgttttttaagttcgttcttggccaaattcaattgtaagacacaattttgtgcaatcgtaatgagagactaaagagtctagttcaattgtctgaaaaaaaaaaaaaaaa

SEQ ID NO: 97815 - DNA, 204 bp, Oryza sativa
  Clone ID: PAT_MRT4530_95781C.1
catctcccaatcatcggtaccaaaatttccaccaaagaggaagaaaggaggaggaaaaaaggggggcgaaaagaacaaatctttcgatcgctttcgacggcctggatctcctcccacgcgggatcgtacggggcgcacggcgttgtcgctttcctccacgtatggtgttttttctcctcctcctcttcttcttcttccccccat

SEQ ID NO: 97816 - DNA, 101 bp, Oryza sativa
  Clone ID: PAT_MRT4530_95782C.1
aatccccaaacatggccagaggctttgcttatgttcagaggttgacttgagaaaacacccaggattcccaaactacaggggcaaattcatctaatttaaac

SEQ ID NO: 97817 - DNA, 234 bp, Oryza sativa
  Clone ID: PAT_MRT4530_95783C.1
atggaattgaatctccatcagctagaagtagcacaaggcggtggcggccagccggacgcggcagagagatccattgcgtgccctcaacttcatcagctcgggctaatcatgtcggacttggagacatgtccatcgttcgccgtcatcactgttgggtgcgccgtctcagaaaaagccctgttggagccgagggaggtggtggcgcggagcggcgacgaccgaggcggcagctag

SEQ ID NO: 97818 - DNA, 546 bp, Oryza sativa
  Clone ID: PAT_MRT4530_95784C.1
gggaaaaaccgacccaaatggtggggggcatgacccaagaccccggaatacatcatacaaaagagtttacccaaccccaacaaggggagaaggggatacactcggaaaaaaaaaattccctgggggaaaaacgggactttcccaaaaccaaagcttttggggcccctattttttttatggccaggcccaaaaatgggtggggggaagggaaaaacaaggggccaccaacctttgaaaaggaccgacctggttggccgcctaatataccccatccccaatggggccaacaaaaaggggaaaaggggcccaacaagaggaaagccccccgggatgggttacttttgggggcccactttaccatggggagcttttttttcatcggccgccctcaaacccaacgggtttccgttcttgggggccccccatgggggcccccttatttttttttggaaggggggcggccctttcggaggattcgcgcttctgagggctgggctttttgcacccctgggggggggctcccttggggtggggggcccccccttt

SEQ ID NO: 97819 - DNA, 355 bp, Oryza sativa
  Clone ID: PAT_MRT4530_95785C.1
gtcactttgcactttatcttgatggagacctgtaatgtctatccttccctgccacctttgcacacaaaacttccagttttagcatatatctttcattccatgtttgcatgcagtgctaactgccacctaagcctgtgtgtaaccacacacatttacctttgcagtctgaatggttcaagttccacttcagagacatttaacaacccgtgcttatcacgttcccgggagtttgaagtcaaagatgtcgagctatggggcttcgtcaatgcttccaagtatgatgagatgctcactatctgccgtactgagaagcaagggatctggaatctgtgactgtcttgttacaattgatctg

SEQ ID NO: 97820 - DNA, 348 bp, Oryza sativa
  Clone ID: PAT_MRT4530_95786C.1
atgaccggcaaggaggcgggagaggacagcagcgccgacgccgacgccgatgacatcgagcggggggacgcacggcaccctcaccggggaacaagctccctgctccctctgccacctcccgccgtccgtgataacaagatccggcactctggcctctccgccgattgcaacaacaagatccgggcatctggcatatgcgacaagctgacgacacggccgacatcgagcctgtcaagctggtcgctggtgaagcagtcggcctgcagggcaagcgccatctgccgccgctcccaccgccgccgccgcttcagcttccgccgctctggcccccacccgccaccgctctag

SEQ ID NO: 97821 - DNA, 253 bp, Oryza sativa
  Clone ID: PAT_MRT4530_95787C.1
gggaaaactggttccatttttaatccgggggggttctggaatacaaatttcccattcccggtccaggaagccaagcaatgggcaaaaatcaagggcccactttttggcccccacaaatggagttggaaactaagtttccgaaacccttttcaaggttccccttcctttagcatcaagggggagggggggaccaaattgttgaacaaaaaccattaattcccccctttatttttaaaagaaggcggttgggggc

SEQ ID NO: 97822 - DNA, 315 bp, Oryza sativa
  Clone ID: PAT_MRT4530_95788C.1
atgaagggaaggagcggcggcggcgggaagcggaggaaaggggcggcggcggctcatggaggaagggagcggcggcggcgggaagcgcaggaagggggcgacgacgacgccttcctcgacctgctgcggcggaagagcatccgcctgacgagcgagctcttctgccagctgcgcgctgtggcagcggagaccttgggcgacggcggctcgggcgtcaggtggctcccaccacgcgccttcggcgggacaatggagacgatggggcccgagaaggcgcgcaccaaatctgtcataactgtgtcaaattttgtttaa

SEQ ID NO: 97823 - DNA, 160 bp, Oryza sativa
  Clone ID: PAT_MRT4530_95789C.1
gcacgaggcgtcaacccgggttgatggccaaaaatttggtggcagcaagctgaatgacaaattgagctgtcagtaacaacctctgagatagagaacttcatgtatatggtgtgctatgaacacattggcaatcctatgtcttgcattctttcaagtggct

SEQ ID NO: 97824 - DNA, 478 bp, Oryza sativa
  unsure (1)..(478): unsure at all n locations
  Clone ID: PAT_MRT4530_9578C.1
accacgcgtacgtccacgcgtccgaaaatagaaagatctagtgtcccgcagcaatgaataccattgtcgcatgcgctctccttgctattgctgcatgcagcgcctatgcgcatattgatgatctacggcaaaggtataggcatgatcagctgcaggcgcctgtcctgctacaggagcaggtgctgaccccatataatgtgttcgtaaggcagcagtatgcgcatagcggcaagccacttgttgcactcacatgcgtggcatctgataaacatccgagtgtggctcacgctcaatctatgtatgctatcaacgcgccatccagatatgcaatctaccctaggaactatggtgcacccagtaccattaccaccctagcaggtgtctggtaatgagttttaacagtatagtggatctgatgttatgagtaagctcagatatcatcatatgtgaaaaaaaaaacacaaaaaaataagngacc

SEQ ID NO: 97825 - DNA, 798 bp, Oryza sativa
  Clone ID: PAT_MRT4530_95790C.1
atggccacagggtgctacttgaatccatcgtcttccatcgccactctcgctactagtcgtggccactgttgtggacatttggtgcgcgccttctcgggccccatcgtctccattgtcccgccgaaggcgcgtggtgggagccacctgacgcccgagccgccgtcgcccaaggtctcctgcatcggccaaatcaagaaggccaacgccaagaaggtcaaggcgtgctgcaagaacggtgcatgccgctgccgccccggccgccggccgactccaccgctgccacagcgcgcagctggcagaagagctcgctcgtcaggcggatgctcttccgccgcagcaggtcgaggaaggcgtcgtcgtcgcccccttcctgcgcttcccgccgccgccgctcccttcctccatgagccgccgccgcccctttcctccgcttcccgccgccgccgctccttcccttcatggccgggcgccggcgtggatcccgccgccaccactcccttcctctgcgagccgccgccgccgccccctttctccgcttcccaccgccaccgctccttctcttcaaggctgggtgccggcgcgggtttgccgagcgggggtcggctttacgccgccgtcgcacccgcagacgcctcgccgcttcctcagagcgccgccatcgccgctgcaccacctgccgccgccgccgcaagcccacaagcacgagagatacaaagagctgtggatagggtttggatggatagggtatacgagggcgccagtgctgccaccgctgccgccacctccgacctaatgtga

SEQ ID NO: 97826 - DNA, 1187 bp, Oryza sativa
  Clone ID: PAT_MRT4530_95791C.1
ccctctccatgaaaggaaacaatattttccgagtggcccttttgtcatatattattctcactatcggaggaaaggagctcaaatccacaaatagtggagaaaacacaggtctaacattcacaaatcaacaagttaataagactgttcagccaacctttaaacacccgctgttcaaagaccatgaaattcagatggaaccaagctcttcccccataaggttggatatcaaatcgccactggtagctgcagtctcacatgcacagttgtctaccatcgactgccccataggaacaattccaattctgcgtaacaacaaactggacaccacgatggtgcaaggtatcagcacgttggctagcaatgatttacaacaactggtagcaggaatcaaatattgggatgagatatacggatcacaggcgtcaataaatgtctatgaaccaaaagtgaagcaagatagcaatgatcttagtgcatcatggatacaaattggtagtgtgccaaaggtaggcaaaggagttgggataggtgctgggtcatgtgtttatccaagcttcagtggcgacagctttgctaggttccatatttcttgggataatgaagaattgaaaaaaaattgtattgatcataattgtcctggtttcgtgcaagttagtcgcagtgttggtcttggaggaagagtacatcctatctccgtctataatggaccacaatatgtaatagatgttcttatttttaaggatccaaagactaagaattggtggctagcatatggttcaaataatacacctattggatattggccgagttcacaattttcatccatgaaggacaaatgtaattttgcattttggggtggatatgttcaaggtccaacagcttcttcggacccaccacaaattggtagtgggcacttcgcttctgaaggatttggcaaagcagcttttgttaggaatattcaagctattgaagatgagaacaacaagctggttaccccaagcatccgtagtgcccatcctcgagacgacaatccaaaattatacacctatgatgactatggacttaatgatgatagtatgcatctacagattgcttatgagcttaaacactttctcgaccagtccttaatttcaaaagtgttcattgcccgtaaaaaacgaagccttgtcggcgtggccactgcctga

SEQ ID NO: 97827 - DNA, 377 bp, Oryza sativa
  Clone ID: PAT_MRT4530_95792C.1
cggcggactgtacatgcgaccaatggaaccacctgaactgagctgtacgatggcataatctactttatttgtgacgatctgcatacttctaacaccgcgtgtgagcttttattatgcagcctcatacttggaccccatataggaagaaacagatctgccttcagaggttgccaaagagaacttcaataccatcctaatacatccagataaattccgggagagacttccagacaagatcggattcaggatgtgtagaggtgtttacggacaaactggaaggtgatgtcactggttttgaccgcccaatcgaagttcaccacacagtgcatgccaactggatcaagtcccttgacatttcctgacaaaggaatatgtgt

SEQ ID NO: 97828 - DNA, 711 bp, Oryza sativa
  unsure (1)..(711): unsure at all n locations
  Clone ID: PAT_MRT4530_95793C.1
ncccggccgggnaacaaaacaaaacaccactcaagatttccacaatgaaaggaaacaatattttccgagtggcccttttgtcatatattattctcactatcggaggaaaggagctcaaatccacaaatagtggagaaaacacaggtctaacattcacaaatcaacaagttaataagactgttcagacagaagatggtgatatatacgattgtgttgacgtcaatcaacagccaacctttaaacacccgctgttcaaagaccatgaaattcagatggaaccaagctcttcccccataaggttggatatcaaatcgccactggtagctgcagtctcacatgcacagttgtctaccatcgactgccccataggaacaattccaattctgcgtaacaacaaactggacaccacgatggtgcaaggtatcagcacgttggctagcaatgatttacaacaactggtagcaggaatcaaatattgggatgagatatacggatcacaggcgtcaataaatgtctatgaaccaaaagtgaagcaagatagcaatgatcttagtgcatcatggatacaaatttggtagtgtgccaaagtaggcaaaggagttgggaataggtgctgggtccatgtgtttatccaagcttcagtggcgacagctttgctaggtttcatatttcttggggatnaatgagaattgaaaaaaattgatttgatca

SEQ ID NO: 97829 - DNA, 148 bp, Oryza sativa
  Clone ID: PAT_MRT4530_95794C.1
gatgcacgcaggcgtacagcaaggctagccatcatttagtttgccgccccaccaaaaattaatggggaaaccaagggacagtataagaaagaggaaactcccgcagaatcaaaagaacagactccatagggacgttcaaaaaaagaaa

SEQ ID NO: 97830 - DNA, 482 bp, Oryza sativa
  unsure (1)..(482): unsure at all n locations
  Clone ID: PAT_MRT4530_95795C.1
cgccccgcgnccggcnttcttgagctcnntcgcngcggcgggaggggcttcttgcttntttntgtccttcgggctcccntgatgatgatgatgtcttgctgcggcggcntctgcggctgcggctgcggctgcccgtgcggcggcggctgcggcggctgcccgntgttccctgttgtggaggccccngcccggcaaagaccggggtcctcgctgctccctcccccntggcgngctctggnggnttggngctggcggtggngagcggcgtgatcggcggctgcggctgcttcgcctgcntgtgtggctcccgctgcngcggctgctcctgctgctcctgcnnctgnttctctcgtcgtcgtcgcccggctgcntgnggctttctcgtctggctgctgctcctgtcgntcngggctttgctcggggccttgttttgcttgcctttctgcccagcttgtcttgtggcnggccttgccttttgctct

SEQ ID NO: 97831 - DNA, 1070 bp, Oryza sativa
  Clone ID: PAT_MRT4530_95796C.1
atggccggtgatgatgactttccgacgttccggaggagagcgttttcgttgaggaaggtatggaggtttgatttgtacaaccgggggttgattgtgcagatgaggttgggcctatgcaacacagatgaacgacggcggaggcagctggcgacggaggggagccgaggactccgacagctacggcggtcccagctaggggtgtcggagccgaggatagcgacgcgcctctgccttcgctgcgggccgaacgagccaagcgaccttcgcctctgccaccggcgcccgaccgagatccgcctcgtcggcgctcgtgcgacctctggctctaacgctgctgccagcgcccgagcgagcccgacctccgccgccgctgccagcgccctagcgagttctgcctgcccccaccctcacccgtcgccatccgtgaggtggtgttcgtcggagatgcggcggccgttcacgacgctggagggggagagtcgcgggaggacctccaccgccggtcgcggagaagaaggaagaaggagggtcgcgagggagctcaagacgtggtgggttcgtcgattgaccgcggaaacgaaggcgatgcggtcaaggatgagcggcacaccagtggttgcgagcctcctcgcggcggacgtggaggcagggaagatggtcgaagagccttcgtgtcctcctcctcctccgtctccggtgcacgtgacaacagcacggcgacgacacacaccaccatgttgaggatgacgaatcacgccgcggttgatcccagcatcacccatgccggcagcggccaccaccaccaccatcgcggagtgggcggtggctggcgccagtggagggcacgacggatgttggcacggctcctcgtgtgcaactggtgctccctccgccggcgccagaacatagctctggtcgtcgtcctccacgaactcgcccgctgccacattgctatcctctccccctggatgggcctcgctgccggcactatctgctttgcggtgatagagggaggcgcagcgggcagcggcgggtggccagcacaaggaggtaggaggcggcagcggcat

SEQ ID NO: 97832 - DNA, 718 bp, Oryza sativa
  unsure (1)..(718): unsure at all n locations
  Clone ID: PAT_MRT4530_95797C.1
gcacgaggcaagggcgtcgtctctggtgccaataaggcgactgcgagggcccgcctggtcgatgctcggcacctcacctcgacggccagcagatggccgcgcacggccaggcgcggaggatggcggcagctaacaatatgaacgataactaatgtagtacaaaagttatgcagataatggcagcggataaaacgtgatgacgcgtatgaacataacaactataaatgaccgtcattctaggtggagggcaatacatataacactgaactggtaataggtgagagagagattatcatgacatgaatatcaacatgagatgagaggggatgaggtagaatagatcagaatataagagtacgtctatgcacactgatgtggtctctctgattatttttgcctcgagactcaaggaanngatttggttaattccaatgaaagaggatgctacaaaagnctcgtggtgggtgtcaggcacacacaccatgaatacaagaaccttatgacagaacttgactgtcacggtttgctcaagttgaaagatgcaaaaacactgctgcgacgcagcatagaagactatcatcatgtggaatctgtactgcatgcagcaaagaatgaaaatgcgtcacaagcacgaccttatcaccaatagatacttgttgacgatgattgggacctaccgtgttctgcagatcatatgattgcgatgagagggttactn

SEQ ID NO: 97833 - DNA, 307 bp, Oryza sativa
  unsure (1)..(307): unsure at all n locations
  Clone ID: PAT_MRT4530_95798C.1
cccaactggtagaaagggctttttatctatttgtatgtcgcttggtggctccacatggtgtcgcttggtggctccacattgcatactactattcaggttattnacttntagtnatangtgacacggggaaaaagtgcagtagtaagtaacagcaatgatatgataggaatccagttttatttttgtacanaaatnatccacattgcatactagtagtactatgcaggttattaacatgtngtatgtgacacaatggaaaaaaatgnagtaagtaacnacantgaaaaaaaaaaaaaaaaaaaaaaaa

SEQ ID NO: 97834 - DNA, 133 bp, Oryza sativa
  unsure (1)..(133): unsure at all n locations
  Clone ID: PAT_MRT4530_95799C.1
cttcgcgggagcattcttgggggggggcgngggaacatcggctanactccaccttaaatcccatctcaggaagctgaccggcaagccagcctttcctactcgctgagcctaccgccgctgctcgccctgacag

SEQ ID NO: 97835 - DNA, 1646 bp, Oryza sativa
  Clone ID: PAT_MRT4530_9579C.1
atgcaaagtccatgatgaagaaactctctccctcttgtaatgaaacaagaacacagaaatgcacacgcactttatgattttttttttagacaaaaagaactgcctttttttgtttttttttccattcatgtgacacctatctacaagcaaagactgaaacttggactcattcaaccatatagcctgatgacacatactacttgggacaacatgttacacttccagtttcagagacagttcaggaacaaatcaaacaacaaacatatcaagcacataatggcccccttcttccgacgcacttagcatcgtcaccaccatgtaaacgaaagacgcgcagattaatccttcgcctcgcctcgccttgtcacatgacaatctcgggcttgaggatgctggacttgatctccttgtgcgggagcaccacgccgccgttgctgtagacctcgtcgcagacgtgcacgtcctcgccgaggatggtcatgttctcgacgcgcgcccacatgccgacggtggagtgccacccgatgatgctgctggagatgcacgcgtgcttcttgacgcgggcgccgcgcatcaccgtgcaccgggacagcctcaccccggcctccaccacgcacccggggccaacggcgacgtccggcccgatcaggcaaccctcgccgatgacggcggtctcgtggacgagcacgttgcccaggacgtgcgcgcccgacgcgagcttggcgggcgccttcttcctaagcgagtcgaggtacagcctcagcccggtgatgtagtccctcggctgcccgatgtccatccagaacccaggcaggaccatggcgaacaggccattgtccgcggcgatgcgcgggaacacctccttctcgatggacgtgggcttcagctcgatgcggtccagcaccgacgggttgagcaggtagatgccggcgttgatcttgttgccgacgaacaccttgggcttctccacgaagcgctccaccttgtcggtctcatcctccatgaccaccacgccgtacttggaaggctcgtcaaccttggtgaccatgatcgtggcctcgccgccatgggacttgtggaactggatgagctcggcgaatgggtactcgctgatcacgtcgctgttgaggacgaagaaagggtcgccggagccgtcagcgagcttgtcgcgtgccagggccagcggcccggcggttccgagtggctctgtctcctgcgagcaggtgatcttgataccaagcttgctctcgaagtccttgagaaagttaagcatgacctcgggctggtaattgatggccagaacaacttctgtaactccaacttctttcagagcttcgatctgatgcaggatcatgggcttgttcccgaaatcgacgagcggctttggcacgctgagagtcagcggccgcaggcgagtgccgaagcctcccacgagaatgagcgccttcatggtcgcagccctgctaactcagctcctcctcacccttgaggcagccgaagaacttgcgccgagcagaggagagcgggcgtgccggggtggcgggaattgagaaagaagaagtcagagaaaagagagagagagagagaggggggaagatgattgatgacgaggaagaagacagcctcggccccgtgccctgcagccc

SEQ ID NO: 97836 - DNA, 855 bp, Oryza sativa
  Clone ID: PAT_MRT4530_957C.1
atggcgcatcacgatgtcatgacgaaggacccgttggtccgtcatttgctgagcgtactggctaggccgcccgccgtggacctgcccgcaatggagtttgtcaaatactatgagcgacgcaagtacatcgaggacagcggtgtgatgcgcgcaatggcgaaggtggccgtggaccgctccgatgggcgacttgaggtgttcgaggggtacggatttgttaatgatgagttgcttcagtatattggggataggtcaccctctctgaagggcctttcccttatttcgttattttcgtacctcgatatctccaagaaagtattcactgagttcatcagcaagtgtccctgtctagaggacctcgtcgtcgaggagggtggatttatcggtggtgaaacagggttcactctatcggttgaggtgaccgaaatgaccgaaatttcggtccgaaatttccaaccctgtggcgaaatcgtcctcgccattgccaaatcgtgcacgcagctgaagcgactcaagctaacagtacatacatacccagattctcgaggttttttcgtcgacgagccgtttggcatcgcgacgatgaagcagctgcgacacctgattcttgggagcatctgcatcggcaacgaagagctgatggccatcattgatgcctgtcctcaccttgagcttcttgatgtgagcaagtgctacaagctcgacgtcgacgacgccctgagaaccaagtgtgccggaatcaagacggtgaagctgccgctctccttgtctcacgatggtgatcagtatgcttattgtgactaccaaattgatgaatacggtgacttcattgatgactacgctgactacttttga

SEQ ID NO: 97837 - DNA, 195 bp, Oryza sativa
  Clone ID: PAT_MRT4530_95800C.1
atggtggagtttgtcattgatggtgatgacttggagtttaccttatcatatgaggaagatgaacttagcttccttttcgagaaaagcaatgagctcatgctaaaggatcaagaaatgttccagcggcagatcgagaattttggctatgcctttatccatggtgtgaaggaagtcatcctcaccgatgatcgatga

SEQ ID NO: 97838 - DNA, 336 bp, Oryza sativa
  Clone ID: PAT_MRT4530_95801C.1
atgaacggcggtgtcgttcttgcaggccattgggcctcggaatttgaaactccgaacccattgcgttctctgtctgacagccgttcgattcgtaggccaggaaaaatgagaaataatccaacgctacacgtgtggacatgcagtcaattcaatacgaacactccggcggtgccggcgccggcatcggcggcgacgacggacgacaacgacgactggggaatcgtcaaggagctcgacgacggcgtgcatggcgaagcgtcgacgacttgttgcgccgtgaggcccagattctgtggaagcctcgtattgggcggccgatttgtactgggccttgtg

SEQ ID NO: 97839 - DNA, 294 bp, Oryza sativa
  Clone ID: PAT_MRT4530_95802C.1
atgaggaaggtgaagaggaggttggcggcgacacccgcggagacgacgaggaggcggtcggggacggggctgttgcggaggaggtccgggttgtcgggcgcgaagtcggagtccgggtcgtcatcggggaggtggcggcaaggaagtggcctgactcgtgacgaggacgatggtggtgagggcggaggcgacagactggacgctggcgaggaggtcggacggggcggcggagatggagatgggcctggaggaggaggaggggtggcgtttacggtggaagatccccttctaaag

SEQ ID NO: 97840 - DNA, 1189 bp, Oryza sativa
  Clone ID: PAT_MRT4530_95803C.1
atggcgagcggtggcggggagcacttcttgcggcagctgagcgcgagcaacgggggatacggtggtgcggcgcagtatcagatggggcgaggggtggtggcggaggaggaggtggagctcggcggaggaggcaggaggaggggctcgaagcggtggtcgaagaagagggcggggaggggcgggtacggcggcggcggcggggggaagggggacgcggccgcggccgcggcggcggcggcggcggtggccgggaggaagcgggtgatggtggtggtggacgacacctccgggggcaggcacgccatgatgtgggcgctcacccacgtcgccaacaagggggacttcctcacgctgctccacgtcctcccgtacgccggcgccggcagaggcgaggagaccccctccctcgccaactccctcggcacgctctgcaaggcctgcaggccagaggtggaggttgaagcacttgtgatccaaggaccaaagctggccactgtcctcagccaagtgaagaaattggaggcgtctgtgcttgtgctcagccaatccaagccatcccatttctgttggttgagttgcatcctgcggagcagcatcgaggagttcgtcgagcaatgcatcaaccaggctgagtgcctgacgttggcagtgaggaagcagagcaagggcgtcggcgggtacctcatcagcacacggtggcagaagaacttctggctcctggcttgacaaagcctaggactattcaattttctgccaaggctttcaagtctctacataatcatatttttacccccgtatatctgccattctgttttaactgagtgcgccataaaagcctccccgctgccatgttgcgtcaccgtgcaagtgttaccatccgttgtaaagcccaaaggagccctagatctgaccaaaccctacttcccatctacttttcaagttcatgtttgtgtaatcttgtgctgtactattgtgtaatgttgcataaatggccgttttctgttaacctcccactttgctgttgtaaagaagcccgaggggcggcccccgccccccctcgccccctgggctgtcctctgcctgtccgctggccggcgtgtgccggcgccgtgtcgggcataaccctggcggcaccctactgtttcgccttgcaccacatccccctctcgccacccgccggcataacgaa

SEQ ID NO: 97841 - DNA, 609 bp, Oryza sativa
  Clone ID: PAT_MRT4530_95804C.1
ctattcctctgcctcggcctcggcctctccttcctcttcatctgcagcccaccaagcaagaagaccaagaccgtctcctttaatgcttccaataatttgcattggagcaaatgccctgtcagtctccttttgctcgactgggataggcgggtattttatgctagataccaagaatcgtatctcatcatctaaatcaagatagagctcatcaccatcttcagtcttcagcatccacctaccatctagcgccctagccgtgccatactgcatcaagtgcccgggaatgcttatatcactgaagaaatcaagtgaaacatgcagacccttttcatcatatccactgatcttcccgacaagaacctccccaacgaagggcctgaacatcagcaacctaaaggaaactttgtaagtggagcagccctctcctggaaagatgaagcctccttcgacggagcggatgtcgtagacggagacgcagagcccgaggttcgcgacgaccttgtcgaggaagagcctctcaagctcagccttgatggcgtcgacgagtggccggctcagcaggtgcggcggcatcggcaggttgtgttcgatctggctgagcacgaacat

SEQ ID NO: 97842 - DNA, 1299 bp, Oryza sativa
  Clone ID: PAT_MRT4530_95805C.1
attcccggggtcgacccacgcgtccgggcatactaaacattcattgcatcattatagacagtgcccataccaaaggattggaagtgtgcaaaacaagatccaaggtggaaagatgcaatgagagaagagttgaatgcccttatgaagaataagacttgggagcttgtaaaacttccaccaggaaaaaaggcagtgggatgtaagtgggtttttacagtgaagcaaactcctgaagggaaggtggataggtataaagcaagattagtcgcaaaaggctacagtcaaacatatggaattgactatgatgagacatttgcaccggtggcaaaaatgggtacagtgagaactttagtatcttgtgcagtgaactttgggtggcccctccatcagcttgatgtgaaaaatgcatttcttcatggtgatttatatgaggaggtctacatggagattcctccaggatttgggaatagccagacagttggaaaaatatgtaaactcaagaaatccttgtatgggttgaagcagtttccacgtgcgtggtttgaaagattcaggtgcgcagtgtgtgatatggggtattctcagtgtaatggagatcacacggtattctacaaacatagggggacatacatcaccatcttggctgtgtatgttgatgatatagtgatcaccggtgatgatgtagaagaaatcaggtgcctgaaggaatggacacctaaatgtagaaagatattgtgatgctgattgggcgagtagtatggatgataaaaggtctacatcaggttattgtgtgtttgttggtggtaatcttgtttcttggcgaagcaagaagcaggcaatggtggctcggtctaccgccgaagcagaatatagagctatggctttgagtttgagtgagatgctgtggatgaggagcttgttgactgaattgcgagtgttaagaagtgatactgtgatgcttcattgtgacaataaatcagccatcaacattggaaacaaccttgttcaacatgatcgcactaagcatgtggagattgataggttctttattaaggagaagattgatagtggggtacttatgctagagtatatcaagtcatgtgaacaactagctgattgtctaactaaggggttaggtcctagtgaaattcaatcaatatgtaacaagatgggtatgattgatatcttttacccatcttaagggggagtgttggtgtaaataagtgatgttcctaggacccatttgtaaatgttaagagaatataaaggaggagacgtgggaacaggggagtaaccctg

SEQ ID NO: 97843 - DNA, 504 bp, Oryza sativa
  Clone ID: PAT_MRT4530_95806C.1
aaaaaaaatgatcttctgttcattggtgctgttataaattagcggctgtcagcatcagttatgtcacagcaacggaacaggctcctaacagaagatgaccaagttgcagataccacagaatataaattactgacattctagctaaaaaatcctataaatctcttactgcacaaaaacagcaaactagagaaaggagtagcttgggactattcctctgcctcggcctcggcctatccttcctcttcatctgcagcccaccaagcaagaagaccaagaccgtctcctttaatgcttccctgcgaaagcattagtcagcctagttactcatcaaaggacactaagtcagaattcaaataattgagcataattctcaaggcatacaataatttgcattggagcaaatgccctgtcagtctccttttgctcgactgggataggcgggtattttatgctagataccaagaatcgtatctgcgtagcaatcaagttgatcatgagcataca

SEQ ID NO: 97844 - DNA, 1423 bp, Oryza sativa
  unsure (1)..(1423): unsure at all n locations
  Clone ID: PAT_MRT4530_95807C.1
cccacgcgtccgaatccaccaccacccacccttcccgaggagagagagagaggctatgacgcgctgcgccgtcgtcgccgccgtcgcggccgtgctcctcgtcgccggcgcggcggcggcggggggtggggaggaggaggaggccccgtcgacctgcgcgcggaggggcccgggtttcgtcgacgcgctcgcgtcgcgctgcccctgcatccggatcgagccatccccgcctgtagaggtgagaggagaggctattgctaaagagttgaaccttcgccacagaggtgttacgtactccgttctcttctatgctgcttggtgtccattttcaagcaagttccggccaatatttgaagctctcagcactatgttccctcagatatatcactttactgttgaagaatcatctgcaatgcctagtttgttttcaagatatggtgtccgtggattcccggccattcttcttgtaaatgagactacaatggtacgatactggggcccaaaagatctcagctctctggtggacttctataaagaaactacaggcttcgatccaattgcatattttgatgtcgatcatcaagacagtactggagatttcagaccagtcacaccaggggaccgatctctgcgtaaaattgcaaaagatgagccatttgtgttgcttgcggtgctttttatcatcctgaaggttgcagcgcatttcgtccccatcgtcgtctcccatctgaaaacgttcttggtcgtgcgtgttcagaacttgaacttagggatccgtaggggatcaagccaactgttggaacgagcgctgaatgtacttgatgtgaagaggctttgtagcaagcttagactgagcaataagacaagggaccttaggaaaggcgcaagcaatgctcgagcttgggcttcctcgtttacttctgtttcactgggtgaatcatcatcctcacggcaagcttaagtgcttaaccttttcggggctgtttgtttagtgtagctgcacatgtgatccaaagttatttaatcttgcttccgcatccagctatatatgatagttgctttgttgcgccattcaggcatgtgggaacctcatggtcatgtaaattctgagggcctcaccttgttgtatactaggaataccttttgcgttgcggatgcaatgcctaatcttgttgtcaagataactactgtaaatttgagatgtgtggtgccagtttgagtagcctttagatgaatttttgttgctcctgctgctgtatgaatcattacagtgttaacctttgaagaactgcttaacttggtcgttgtctgcaccagcctgaagctgggnccgccgactcatcccttatttactgtgattgttatatgtacatcaccgtttatcaagaagctaaccaaatgtttctggaaaaaaaaaaaaaaa

SEQ ID NO: 97845 - DNA, 296 bp, Oryza sativa
  Clone ID: PAT_MRT4530_95808C.1
cgcttcttttgggggcggtccagtagggggcaaacaccgagtttcaacagaatgttcctgctgacgctacgggctatttgcctggaacatgatctagcatatgtggcctatggtgcgagacacgagacaaagatgggattgagctcaaacaagccgatacattgatgaggcattgtgaggatgagccataggaaagaagtaggcaataatagagggagttatgtagccttttggtaaagtacaagacacgggcgggtgctaatgtatttgtcataacagtaaaaatagttggacac

SEQ ID NO: 97846 - DNA, 145 bp, Oryza sativa
  Clone ID: PAT_MRT4530_95809C.1
gggtgaaatggtccatgttgatcatgatcaaactggcaccaaacaagaactgatcatccttaccaacaacagtgccatggtcactggtgaactcctccatgaagtaggaactcttgttgtcaggcaggagctcccactcatctag

SEQ ID NO: 97847 - DNA, 2732 bp, Oryza sativa
  Clone ID: PAT_MRT4530_9580C.1
tcatgatgggagcagcaattggcgaagagtatcatagagcgcccgaaggatccccttgtgctgctgctcctcaggcagcctcagcatgctcgctaccttgtcgaacttctcctgcccccgtgctattcaatctcatgtactatgaatcgaactgtgcagtttatacttgtgtttgaaggggtatgatgtaactaattaaatctggaaccaaagcggcttccagttgtaattcagttccagtgatactcttacatccgtcctcatgactgacgtccatgatgggagcaccaatcggtgaaagcgtatcccagagggcccgaaggatccccttgtcctggctgctccttccgcagcctcagcatggtcgctaccttgtgcgaacttctcctgccccagtgcgccctcctccggcgaggccgccaccggcgcctaccctgtgccccttggctggatgcaccggaggggaccgatcgcgctgcatcgcccaggcgtcgagctggcgcctggagtgctccgcccggcagccgccgtcgtctgtccatgaatccgggcgtctggcacgcgcagccgagcctgcgcttgcccgagccgctggtgtgcatgcatcgacgagctggtggcgccgcctctggtgtcgtagttgaagtagccgccgttgccgggctggtctgtttacacgcgcctggcgcggtggtacctcccccggaagtaggcctcggcggcgccgtcgccgacgatgcccgccatggccgcggcggcctggagcgccgccacccagaggccgccggtgtaggcgctgacgccggacaccgaccacaggtcgtaggtctggtcggggcggccctcgttctcgaccatcccgtcgccgtcgcggtcgaactggtccatgtacgccatggccaggtacaccgccggccacgccgcctccgcgaagccggcgttccccgtcgccaccacgtcgcggtacacctgcagcacgaactttgggttgaggtccttccacctcaccgggtcgtgcagcatgtacgcgttcacctcgaaccacgggtcgttcagccccatgtcatgtggcaccgctcccaacaccttgcgcgccacggtggcgccgtcaagggtgcggcggaggcaggggtcgtggaggaggacgccgcggacgaagtcgcgctggaggttgagctcgagctcggggaagagggagaggagggcgaaggaggcgtagaagtggacgtcgtaggtgttccacatgttgtactccatcccctccaggtacagcacctgccccacgttctcctcgccgtcgcgcagcagcgccgtgcccatcgccgccgccgccgccgccgccgtgttcgaccgcgccgccgccaccgccaccgtgctcaaaatgccgtcgaccgcgctgccgccgttggcgactgtactgaacgtgtcgaggttgaacggctcagtcgctgacgaaaggctggtgttcttcggaggctgcccatctgtccaaatggtgcctccagcgttgaggtagtagagctcgttgaacagtgtaattggataccattcaggtaggctcttgtcctgcagaataggcctctgccactcctcgatctgggactcccatttcatgtgttcaagaagagcatcgtgggccaggcgctcagcagccgcgtcgcgatcggtgccatggaacttggtgtacctcctgtggtaggttctccccgccgggaacttcacctcggggcacgaccacgacagcgcgaacgacaccgcgcgcgcgccacccgccgccaccgtcgtcgtcgccgccaccgccgctccgatggacgacccgggcctcgacgctcccgtcgccgccgccgccgcattgccgtccccgacgaacgaaccattcttgttgatctgatcccacatgtccttcgccgtgacatcgccggagttggatggtcccatcgtgaagcgcgggcagccggtgacgcggacgccgtcggtctcccgcgacgcgatcgcgaacgtcaccggagggcgcccatccgccgtcctgtgatggaggaggacgccatggacgccgtcgcgagctgtcattctggagttcttatgattcccggtcagttcagatttccctccaaccgaatttgcccatgtgaagagcagtgttacatctgcaggtgtgcttccagaattgtgtaacgtaaaagtgaaaactgcaacagggaagctgctctccttgtagttgtgaggaatgaacggtgatatctgacggcaagttattttaatttcagggtcaggttcaccattgtatactgtccatgatcttgggaacaagccatggtaagtgcaattcttctctttcagcttccagtcccaggatccaatgccagctttatcgattcccccaatcccaccgaggggtacaccgcggtagcagttgtccatccatttcttcagtggatcatacactgaagccaggccttttgcattgtctttcaggtttagtcccagcattttaatcatcaacggcacaattgccatcatgtcattcaaggtcatgctaaacattgcaaccttctttccttcatcatcaaatgtcctctcccaagatattgctggtggcttttcacaatccatgtgcaggactgccttggtttcctccaattctgaacttcccatcagggcgcgaaatgaatcggacgcgtgggcggacgcgtgggcggacgcgtgggcggacgcgtgggcggacgcgtggg

SEQ ID NO: 97848 - DNA, 4947 bp, Oryza sativa
  Clone ID: PAT_MRT4530_95810C.1
atgtcttctggggagggaaaggaggttgtggatacttccttgcttgttactaaaggtgatatgaaaggtttgctagaggatttgctgaagatgggcatgataggtcctaggaatgcggctggagtgtctgcagtgaaactagaattgatgccaaatgagttgaggttggaggggagcaaaaattatttgagttggtgtaggagagcccaactgatgttgagagcaaaagggatggatcattttttactagagagttgtgaagaaccttctgataaggagagccaagcatggaggacgtggaatactacaaattccactgtggtatcttggttgatgacctcggtggctccttctattggcaggatgatagaagctatccagaatgctgcagttgtatggaagacgctgagcaacatgtattcaggagagggaaatgtaatgatgatggttgaggctcagaacaaagtggagaatttgaagcaagaggggagaacagtccaagagtatgctagcgagctgcaacagttatgggcagatcttgatcactatgatctcctacaattgaaacatgaggatgacattgtgattggaaataaatggctgcagaggcgaagagtcattcatttcttgaaggggttgaacaaggagtttgaggataggagagcagctatgttccaccaagctacattgcccactatggaagaggccatttcagcaatggtgcaggaagagatgagattgaggttgatgagaggtacaaatcctataagatcagcatacattgcagctgataatagggaatgctacaattgtgggcaagtgggtcatgtgagctacaattgtcccacttcccggaacattggtggtaggggatcgattcgaggagggcatggtggaactcgtggtggatttagaggagaccgtggtggttttgggggaaatcgtggtggtagaggaggtgatcgtggaggtcgtgttggaggtcgtggtaggggcagaggtgttcctcaggccaatgcagttaaggaggatgggaaagctgttaccctaataggtgaacaagtgacacaatgggaggaatggcagaagaacaagaccaatgagagctctaacaccaccactcactttggtaacttcgccaactacgcccaagtgggcgaaggtactcaggcacaggcacttgcatctacatatagacatcctatagattggatcatagactcaggagcatcaaagcatgtcacaggattacataatactttcacatcatacaccccttatatccactctgaaactatccaaatcgctgatggtacatccaagcctattcatggtatagggtcggtagagtgcacatcatcaatgaacttgtcttctgttctgcatgttccttcctttccagttaaccttctctcagttagctcggctattgatcaactcaagtgcattgttgtatttgatgagaattcttgtctgttccaggagaagaggactgggaggaggattgggactggagtcaggcgtgatgggttgtggtacatcaatcatgaggaactgggactagctgcggtggttggagatgttgagaaggagatcagtttgcttcactgtcagttaggacatccatcttttgagattttgagtaagttgtatctagacctctttagtagagtggataagcatagattggtgtgtgatgcttgtgagcttggcaaacatactcgctctacatatgttggaatcggtcttcgtaactgtgagcccttaatattaatacattctgatgtttggggaccatgcccagttacttctgtgagtggtttcaagtggtttgtcacctttattgattgtcacactcgtatgacttggatttatatgcttaaacacaaaagtgaggtccttcgttgcttccaagactttcataaattagtgacaactcagtttgatgcaaaagttaagattattcggactgataatggaacagaatatatcaataatgaatttgtgtcatatgtctcagatgaggggattattcaccagactacttgtcctggcacccctcctcaaaatggtgtagctgagagaaagaatcggcatttgctagaagtggcaagatctctgatgttccagatgaatgtaccaaagtatctatggagtgaggctgtgatgacagcagcatatcttatcaatcgcatgccttccagaatacttggtatgaagtctcctgccgaacagttattgggtaagcgagagttcaaggttcctccaaaggtgtttggctgtgtttgttttgtgcgagatcaccgaccttctgttggcaagttagatcctcatgcagtaaagtgtgtgtttgttggctatgcttcgagtcagaaggggtataaatgttgggatcccattgggagaagactgtttgtgagtatggatgtgacatttcgtgagtttgagccctattataaaagtaaaggagatcttgaccaatttcttgaggaattctcgactgtcatggaggttgatagtcgagagggggagagagagagaggtgacatacatgaaaaaaatgttggtgacaagaatggagaggcagtagtgattggatcaataccatgctctattgatgatgcgagtaaagaagtagtggaagtcattgaagatacacaagatgaggatagagaaatggtccctcatgaagaggatggagaagaaggagaagtagttgttgggacaattccatgtcctatggagggagccgaaagggtgaaacaaaaggatgtgctagtttaccaaaggaggcggtttgatagtcagggggagaaaagaaaagggttggtgcaaagtcaaattgaagagttaccacaccaaaaatgtccagtccctgaatcctcccagagtctctctcctccagcctccttggcttctcttgagacaattggtaatacttctccaactcttgaacatgtagaattacctcttgcacaacgtagagagactagatccaatgctggtagacctcctatacgtcttggttttgagcatcttagttctatgcatgacattgcaaactatatcacatattctcatgtttcaccagcatacaaaacatttattgcatcattacagacagtgcctataccaaaggattggaagtgtgcaaagcaggatccaaagtggaaagatgcaatgaaagaagagttgaatgcccttgtgaagaataagacttgggagcttgtaaaacttccaccagaaaaaagggcagtgggatgtaagtgggtctttacagtgaagcaaacccctgaagggaaggtggatatgtataaagcaaggttagtcgcaaaaggctatagtcaaacatatggaattgactatgatgagacatttgcaccggtggcaaaaatgggtacagtgagagctttggtatcttgtgcggtgaactttgggtggccccttcatcagcttgatgtgaaaaatgcatttctccatggtgatttacatgaggaggtctacatggagatccctccaggatttgggaatagccagacagttggaaaagtatgtaaactcaagaaatccttgtatgggttgaagcagtctccacgtgcatggtttgataggttcaggcatgcagtgtgtgatatggggtattctcagtgtaatggagatcacactgtcttttacaaacatagggggacacacatcaccatcttggctgtgtatgttgatgatatagtgatcactggtgatgatgtagaagaaatcaggtgtctaaaggaaaggctgggaaaggcatttgaggtgaaggatcttggtcctcttcgctacttccttggaattgaaattgctcgttcatcaaaggggattgttctctctcagaggaagtatgttttggatctgttgacagatacaggaatgcttgggtgtcgtgcaagtactacgcctattgataggaatcaccaattgtgtgctcaatcaggtgatcccgttgataaggaagcataccaaagactggtgggacgcttgatctatctttgccatacaagacctgatatttcctatgcggttagtgttgtgagtaggtatatgcatgatcctcgaactggtcacttggatgttgttcataagattctcagatatctgaaagggactcctggaaagggattgtggtttaggaagaatgggcatctaaatgtggaaggatattgtgatgctgattgggcgagtagtatggatgatagaagatctacatcaggttattgtgtgtttgttggtggtaatcttgtttcttggcgaagtaagaagcaggcagtggtggctcggtctaccgcagaagcagaatacagagctatggctttgagcttcagtgagatgttgtggatgaggagcttgttgactgaattgcgagtgctaagaagtgacactgtgatgcttcattgtgacaataaatcagccatcagcattgcaaacaaccctgttcagcatgatcgcactaaacatgtggagattgataggttcttcattaaggagaagattgatagcggggtgcttaggttggagtatattaagtcatgtgaacaactagctgattgtctaacaaaggggcaaatcgtatacagctccggtggccggattaagcacacggcagctgttccaatttgtggctacacagaccagatcgaggtgtgtgcacaacaccttgtggccaaccgggattcctatcgtcttaagcacattgcctaccaaatccatgatatgaacatgtgcctcgtcgtctctaaatgtggccaagaggagcggctgtctgtggtgagctgcgtgtgccttgatgaaaaggggatcggaggtcagggaccgccatgcctggcagataacacggaggcagcagagctccttggctgggagccgcaccaggacgtcgaacagcacgtccaaagggaggatgccagaatttga

SEQ ID NO: 97849 - DNA, 1587 bp, Oryza sativa
  Clone ID: PAT_MRT4530_95811C.1
atgcggagctcgcaccagcctctctgcacgagggcccaccaagcggccgccctcctcctcgtcgccgccaccttcttcctcacccgcctgctcgaccggtccccactctccgctccgccgcccccctgcgccgcaccatacagtccctggccgcaccgcgacctccgcatctacgtctacgccgaggacgaggtcgacggcctgcgcgcgctgctccgcggccgcaacgacgacgtcaccgctgcaacctgcatcaagggccagtggggaactcaggtgaagatccaccagctcctcctcagctcgagatttcgaacatttgacaaggacgaagcggatctcttcttcgttcccacctatgtcaaatgcgttcggatgacgggaaaacttaacgacaaggagatcaaccagacatacgtcaaggtggttctcagtcagatgccttatttccgcagatccggaggacgcgaccacatttttgtcttcccaagtggtgctggagctcacctgtttcgctcatgggcaaccttcctgaataggtctatcatccttactcctgagggtgaccgcactgataaacgaggtataagcgcttttaacacatggaaagatattattatacctgggaatgtggatgattctatggtgaagtctgacaggcttgctgtcaaaccgatcccattaacaaaaaggaagtatttagcaaacttccttgggcgtgctcagggaaaagtaggccgtctccaactggtgaagcttgcaaagcagtatcctgacaagctggagtctccggagctgaagctctctggaccagacaaattgggaaggatagattacttcaagcacttgaggaatgcaaaattttgcctagctcctcgtggcgagtcttcatggacacttcgcttctatgaatccttctttgtggaatgcgtgccggtaattttatcagatgaagttgagcttcctttccagaatgtgattgactacactgaagtatcgataaaatggcctgcgtccaagattggcccggggctccttgaatatctcgagtcaataccagatggaagagttgaggaaatgattggtcgcgggcgggagataagatgcctatgggtgtatgcggcggatacagagcggtgctcggctatgagcgctatcatgtgggaactgcagaggaagttcttaggccaagatgttgagttgactgtctattacctgaagagaaaattattgggcaaacacttacggtgcaatgctgtttcagagcttgatctatacaaatttgccccttgggatcttccagagaaatcttcgttgcagagtaaggatcgagaatggtatttcttttgcccacgtgataggaaatattctagtgggtcaagaacgaaccgatcaactgaagctgggtattggaaagctactggaaaagacagaccagtaatatataattctcagactgttgggatgaagcgaactttggtgtttcatcttggcaagccacctcggggtgatagaactgattgggtaatgtatgaatacaggctggaggacaaggaactgtctgcttctggtgttaaactggtatga

SEQ ID NO: 97850 - DNA, 252 bp, Oryza sativa
  Clone ID: PAT_MRT4530_95812C.1
atggccgcggctgcggcgtgctcaacaaagagccacttgggcatcgactggagaaggaacaacggaagttgtacccaagggggacaaagggctccgagcgtcatcgtcgtccgtgatttggctcccaggggggcctcggggtgccacgccacacccctcgggctttcggggcgtgctaccccggggccctcgcccggccaccacatggtggggagaggaggcgaggcgaaagacgatgctccgcgcctttaa

SEQ ID NO: 97851 - DNA, 270 bp, Oryza sativa
  Clone ID: PAT_MRT4530_95813C.1
atgtccggcgaccagatgggctcagaaccaccgcgtgtcgccgccggcgatgcgcccaagacggaggggcgcattggcagcttcagccgcctcttgtccgggctcgacgccggcggcgtgctcagggacgtcgagccggagaagatgaaggacgagatccggcggtgggccaagtccgtcgtgtcgctgatgaaagatcatttcatctacaattcccctggtttctggcgatggaagaaatactgcaaatctgttagcatgcttccctaa

SEQ ID NO: 97852 - DNA, 458 bp, Oryza sativa
  Clone ID: PAT_MRT4530_95814C.1
tccgggctcgacgccggcggcgtgctcagggacgtcgagccggagaagatgaaggacgagatccggcggtgggccaagtccgtcgtgtcgctggtgcggcagctcagcttcggcgcgccgccgccggaggatcatcgcagcagcaactcgatagttcacaccagctagctgaagtagcttactcttgttttcttatttaaatttaacattttttattgtagatgaaagatcatttcatctacaattcccctggtttctggcgatggaagaaatactgcaaatctgttagcatgcttccctaactactacatttttttcaaaaaaacctataacttaattaatcatgtgttaattttaaaaattcttcccgaactactactacctttttttcattctgtaacttaattattcatgtgttaatttaaaaattctataacttaattaaaaaaaaaaaaaaa

SEQ ID NO: 97853 - DNA, 434 bp, Oryza sativa
  Clone ID: PAT_MRT4530_95815C.1
ctatgggcaaccatataagaagaattctttttctgttgctaataaaaaacgagatattcatagtgaccaatctcccatgagcccagtagcaatggcaattgtaccacgatagtgcaacgtgtacttcatcagttaacatgttttggagctctgttagattacggacgcctgtgcctatctttgtcacgagatgagtgcggactgtagtgatcaccacgatcttttgaggagcggtgccttgacttgtctttgccatagggatctgaacttctgtccttaaaagggtgactctgttgcctatccctgtgtgcttctgtatcacgctccctttcccgatcggagtccttgaccttgctatcatgatcagagactcggcccctgttatgagggaccggccctcttgatctatgtgtttgtatttcccgcgagcgatc

SEQ ID NO: 97854 - DNA, 123 bp, Oryza sativa
  Clone ID: PAT_MRT4530_95816C.1
ataagtaaagctgaagctcctgcacgctagccggtcccgaatcgcagtttcgacccacgcttccgcgctcgagttttactgctatccctctagttgctcgtccgggtcactctgaatctaacc

SEQ ID NO: 97855 - DNA, 180 bp, Oryza sativa
  Clone ID: PAT_MRT4530_95817C.1
atgggttctccttctgccaagtacttgctgtttagccttgcaatcctgctggtcctgagtagccagcagcaagctctgctgccttcggcattcgcccgccagttggttccgatgcccacgaacactgccgccgatttaaatttatcgaggaggaattactttgaacgttttctggtttag

SEQ ID NO: 97856 - DNA, 551 bp, Oryza sativa
  Clone ID: PAT_MRT4530_95818C.1
attggccggaggttggttccgcggcggcgcagtcggccagactgggttggtgctcggtggggctagctctttaggtgagacgttgtcaccggagcaacaaggaggcgccatagagggcctcgccactgacctggccgcagcgatgcgcccattctcgatgatcccacatcagtattgatcggtttcggttgtcgacgttggtgccgctgtcggacgcctagtcggctatccactagcatggcagcaccacgaagcgttccatgcattcggcggtgcctgtgcagcgttcaacggtggcagtggaggatggccaggggctctccctctcgatctcgccgtcactgcagtagctggagatggcgaagcaggcggaggggctacgagtccgatacggcgtgctctacatcaactagcaggagcaatagcaattagcaggaaaaaggcagcggcagcggtgtcggtgcagaagctccgaatggcattgcacggccaggagatcgctaggcggctgcgcgcggggaggagtcaccggccgcagcacgcacggggag

SEQ ID NO: 97857 - DNA, 387 bp, Oryza sativa
  Clone ID: PAT_MRT4530_95819C.1
atggcaagtttggcaaccatttcttatggcttcaattttcaacatggaaggatcatgttggcaataatctcctggtctcctaacgacgcatcaattgaaattattaatttgaatgatcaaatatgtgcaacatgtcaaacacgtaccgaggtggtggaaaaaccggttgctcagcaggaactactcgcggttgcaggcgttgatgaaggcgcgcagcacgcgagcgaagtggaaggcgagccatcgcggacgaacagggagcagtcgcgcgaaacgcttcccaaaaaccttattgccgccttctcccggtgcaggacgtcgaaggcagaggttctggagacctactctccagatcgccggtgcacgccggcgagcgggatggaatag

SEQ ID NO: 97858 - DNA, 484 bp, Oryza sativa
  Clone ID: PAT_MRT4530_9581C.1
ggcaattgtgccgttgatgattaaaatgctgggactaaacctgaaagacaatgcaaaaggcctggcttcagtgtatgatccactgaagaaatggatggacaactgctaccgcggtgtacccctcggtgggattggtgcagggagcatagggagaagctacaggggatattttcagcagtttcagatattccccagtatatatgaagagaagcctatcctagcaaatcaattttcagcattcatttcgcgccctgacggaaagagatactcgacagtgttgtcggcaccgaatgccgatgtcctcaagggaatcgataaagctggcattggatcctgggactggaagctgaaagagaagaattgcacttaccatggcttgttcccaagatcatggacagtatacaatggtgaacctgaccctgaaattaaaataacttgccgtcagatatcaccgttcattcctcacaactacaaggagagcagc

SEQ ID NO: 97859 - DNA, 478 bp, Oryza sativa
  Clone ID: PAT_MRT4530_95820C.1
acagacagctgtataactaaatatcattaacggggcactaggccactaggctctgtatatattacataacctatggatgcacttctcttaccttatattcatggtttaagaactatggatacaaagggcattatgtcacgggccacctcaaaagctatgaagacagaaaccacataaacgtgcacgatgctatcacccaccatgccaaaaagcaaatcctgcatgcactttggtaagctcgcacggacactcttgaccatggaagggatcacttgaactcaactcattctttgcaaacgttggctgccgctattgatgccatcgtgacagattgacttgctggcaggatgaagttgggccacataagaggggccgcagaaggatcagcacggttccagagatttgtcatttgtgcatgaacagagggcaatgtgtatggagctctttgccaagcaacccattcacgttcatgataact

SEQ ID NO: 97860 - DNA, 236 bp, Oryza sativa
  Clone ID: PAT_MRT4530_95821C.1
cggtccggaattgcagggctggacatcgccagcggtcgttttatgccgctttaccccttgtcgacgcggcgcaggatttctacaagacacttctgccgccgagcgatggattccaatacaagctcctagaccgttctaccatgtgaggaacacaactgctgtcgcacaaagaagaagttcatggccctcggacccgttgtggcgcccgcgcctcacaagctgctgattgtggaggt

SEQ ID NO: 97861 - DNA, 186 bp, Oryza sativa
  Clone ID: PAT_MRT4530_95822C.1
atgacgaaggagtgcctccactacaaagagcgcacccccggtgtggcaaaattgaagttgaggcagcactacactggaacgcgttgtgcctgctccctccaaatggtgggaacaaccatcgagccacctgggcacttcccagtgcccttggcaagcgagagggtcgccgccgctcgcgcggcctag

SEQ ID NO: 97862 - DNA, 205 bp, Oryza sativa
  Clone ID: PAT_MRT4530_95823C.1
tcgtttcaaaccacgcgaccctcaaacttctctgtgtctcctcatcttcagggttggcggcggctccatcgaatgctggttgggggtgattggatcacgcgcgggctctgcagctgctgctggccctaatccgcttcgcgggttgtaatgagcttatgcggaaactaacgatcagaggtaagcgctgtccagcgagggatgctgg

SEQ ID NO: 97863 - DNA, 372 bp, Oryza sativa
  Clone ID: PAT_MRT4530_95824C.1
atgaagtacgtgttccaacttccaacttccgacctcctagtagttgagcaccaactttcgttcgaaggatactaccgcgagaagatgcaacaaaacaaagcaagaataagagaaaaatatcataggggtggatccactcgcaaaagacctcatgagctgagcaccagcttcagtcgaaagggaactagggagtgggaaggttacaacgacagaaaactaagtgagacatacgccaggaagatacaaaagatagggaggggagaaggcaactacggggtggtagatactcgcaacagagctccagcgccgggctctgatcagactcaccagaggtgcgtctcctacaagattccatcgaccaactggggatag

SEQ ID NO: 97864 - DNA, 423 bp, Oryza sativa
  unsure (1)..(423): unsure at all n locations
  Clone ID: PAT_MRT4530_95825C.1
gcatgcacgcttacttatttttggaaccttccgtgcgcccgcccttaatttttntttgtttttttaaaaaactaccctcataaacgccgagacagcatctctgccactgataaaaactttacaacggacgaaaataaacacaccgtttattctgttcaataaaacagggtgaaagcagaaaaaaaaggcagaaaaatcacctttttcgcttggatactctcgatttgctagctacgcgtgacgcagatttcttcgtcgctttgggcatttcgcactgggggcacagccagtcatgttctgggacagcttccaggggagggtcgcagcagtcgatgtgcatacctacaccgcagccggtcgagccatcctcgttgccgcagatgagcatcacctcgccccggtccgtactcccgcacgccgagc

SEQ ID NO: 97865 - DNA, 341 bp, Oryza sativa
  Clone ID: PAT_MRT4530_95826C.1
tatgcttctttctactcacctctcttcgcactctccttcgccgccgctcgccgccgtgggtctccgtcgtcaccgtcatcgtcatgagggagtgcatctcgatccacatcgggcaggtcgatatccaggtcgtgaacgcgtgctaggagctctattgtcttgagcatggcatacagcctgatggacagatgcccggtgacaagaccgttgggggaggtgatgatgcttttaacacctacttcagtgagactggtgctgataagcatgtccctcgtgcagtcatcgacgatcttgagcctaccagtgattgatgaggtgaggactggtgactaccggcagct

SEQ ID NO: 97866 - DNA, 278 bp, Oryza sativa
  unsure (1)..(278): unsure at all n locations
  Clone ID: PAT_MRT4530_95827C.1
ggacgngtcagngnacgtgtggntgncattnnnttctcctccccctcttntatnttccctcctcggttcggttccntgnttcgtctagggtttagtgggttaaaatggcggcgccggatgtcgagtaccgctgcttcgtcggcggcctcgcctgggccaccnacgaccgctccctcaaggncgccttctccacctacggcaagatcctcnantccaagatcatnaacgacaggaagacggggaggtcacgtgggtttggnttcgtaaccttctcctcc

SEQ ID NO: 97867 - DNA, 310 bp, Oryza sativa
  unsure (1)..(310): unsure at all n locations
  Clone ID: PAT_MRT4530_95828C.1
agacgtatcacaccctacaatctgtggagagatgatgatcctgatgctgcctggaacatatcattgcagtcatgcgtgcataggttgcccactgatcctgccatccgtggttcacagtggccggtggaatggccattgaggttggagaaaccaccttactggctgaaaaactctgaggctggtgtctatgggaagcctgccactgaggattttcaagcagactatgagcacttgaagcaggtcataagcaattcatatatgaatgacttgggcatngattggtcaagtgttagaaatgttatggacatga

SEQ ID NO: 97868 - DNA, 1410 bp, Oryza sativa
  Clone ID: PAT_MRT4530_95829C.1
atggagttcccccgccgcggccaatcctcccatcccgccgacgccgacgacgacgaccgccgccgcctccgcttccctgactccaccccgccgagcggacgcgaagctaggccggctccggcgcagggggacgcggtgacggcggcgctggggcggcggagggaggagctgctgtgggagctccacaagacgaagatccaccgggagatgctcctgtgccagctgggcgacctgctcccggcgcgggagtacgcgtggcggagcacgccgtgggaggagcaggcgaacgcgaacgcgaacgcgcacgcgcacggtgccctctcggcgccgcgctctggtgacgaggagatcaccccgtggtggcgccggagcccgtcggcagtgacacccccggtgtacccgcacgtggagcgctctccgtcgccgccgattgcgcggggatggccggccgacgatgacgagcggcaggaacgtggggagccatccgggtcgccggcgatggctcctccggtgcggcatgcacctcatgtcgaacagtccacaccagtgccgatcaagtcgcctgcggcggaggccgtttgtatgccatctgggtcaccggcgatggctcctccagtgcagcctgctcctcatgtcgagcagtccacaccattgccggccaaggagcctgcggcggtggcgaaggtggaggcagatgccattgtccagactgcggccaatgctgatgccgaccaggcgttgctcggcaagggggcgacaccaggagggcaaggttgcactggtcagaagggtgaggaaggtgatttcgccatcgacggccatggcaggcagctgttgggtgagatgaatgtaagcaagagcaccgagcagccaaaacctacagaatccatctctggaggccacaccgatgaacttgtccagaagcgttatcaagataataagccggcagatcaggagattgcaacattggacaagcagaagcgagtaggttccaatgatgagattgagcttacaccagaaaggagatcctctggtgtgaagaggcagctggcttcaggaacctcactggcaaagaagccgaggtcccaggggagctccatcacttgctccctctgcaaggtcaccatgacttctcccagggcgctggttgagcaccgggcatccctcctgcaccggtctaacctcgcgccattgcgatcggggaacaaggccaccactgaagctgcgcagcccgcggagaagaagaccgagaagccagaggcatctgaatggaacagcagtgcacaccaccaccagaatcggatgtactactgcgatatatgcgaagtgaggtgcagcagcgagaagatgatggcgtcgcatctcgccgggaagaggcacagggagcggcacaactccattttcatgtaa

SEQ ID NO: 97869 - DNA, 440 bp, Oryza sativa
  Clone ID: PAT_MRT4530_9582C.1
cttggtttcttttctgtctgcggcgtgcagacatacaaaagaaacgcacttaaactcgtaaaggcccaaaacattacggagagtaaagactgactgactgctgacagcacgaacgaccctcttctaccaggggacaaaagagccccgcagaacatactcagggggcaaaagaaacatccaccacagaaccacggaggcccgcccgtcgatttctcgaatggcggaacatgctcggaagccaggaccaaaactcattttacgactgcgttagggtcggagatttctctattgccacgatcaaccagcgcggtgggctgagctttggcaagagcccttacctgggaatcgggcgactcaaggaatgctgcgaccaccttgggactgagcccatcaacccatgtgttgcattaggcttgaggagcttttttccatagagaggg

SEQ ID NO: 97870 - DNA, 651 bp, Oryza sativa
  Clone ID: PAT_MRT4530_95830C.1
cggcacgaggcaggcgcacccctcccttcagttgcgccatccccgcccccatcattcacgtgctccctcccaaaccataaccccgccgcctcaaccagtccccgccgccgccgccgcctcggcctgtgcacctgactcggatcgatggtgagccctggacagcaacccctccaaatcgacgcagccggcgccccctcatgctactcgcgacgccacgccccgccattgtgccgtcgtcgattcccgcctcccagatcgatgccgctggcgccgaccgcgccgggactcgcgacgctgccaacggaatgggatccgcgctgatccattgcaccaccccacctcactgatcgaccgcgtgtcccggccaacgttcatccttggcaggcgtcgatgatctgagggtcccctccaatgctcctcttcactatgcgctttgctcggaccaatcagggtcaccgcgtccccacgctgcgagactcctccgattcctctccgtgaaggtctccatcggcgtcggcgtcagctcctccactccactgcgccacgcctcaactccgtcgccaagcgctccggcgtcgctgcggcgggtggcgctggttctgggcccggttcggttctggggctcccagggctcgactcgctaatcgttcc

SEQ ID NO: 97871 - DNA, 531 bp, Oryza sativa
  Clone ID: PAT_MRT4530_95831C.1
gcacgaggtgccatggcgttagaaggagggcattttttgtcttcaacggggctggcaaggggatcccctcacccactaaggggcacgctggaatatgcggacctgctttgtctgacagactaactgctgaaagtgcccctgggatgattgctgctgaacgatgcggccaggattaacggcatgtcgcttagggggccgcgtatgtcctgacatcctataagattcttacaggatgggatgcttaacaatccactaaatatacagctgagagtgatgttcaagatagtgatgaaaaggctcggggctgaagacgtactgactctgtgtgctactttacaggtagccccaccttcttacatgacaaggattgtttaactaatttagaagggtgataccaacagcctcatccttacttggaggaaatttggcgaagccttatacaatataatccctgcctatcacaacatagtcttatatttctttccggggattcacgtcctcatgtcccatggttatgcacacgggggttcg

SEQ ID NO: 97872 - DNA, 361 bp, Oryza sativa
  unsure (1)..(361): unsure at all n locations
  Clone ID: PAT_MRT4530_95832C.1
cccacgcgtcccgacgcgtgggtgccgtcgtatgttattattgggtttaatctttgccttattaaagaaccaatcttggaattaggtttattttggtgggaaccaataatgtttctcctcctgtgnaccattggattggtcctgtattcgtccttattggntggaatcctgtccaatacctcngaatatttccaatgttttggtgaacttcgtattttttattcggattcttngcttcttattttaccggncgccctcttgggcactngtggcatggctagaccaatnccatngtaatcacctgtctctaatcgttaatgtaatgttccgttgctgttcgtgtgaaaaaaaaaaaaaaaaa

SEQ ID NO: 97873 - DNA, 909 bp, Oryza sativa
  Clone ID: PAT_MRT4530_95833C.1
atggccgccgcgcggaaccccctgcgccggtggaagcccttcctcgccgcgttcgcctccgtcgacgacgccatcgagatcgaggccgccgacctggggatctcccgcagcgagatccggcgcgcgagaggccgcatcgtggggatgctccgcggcgcggaggacgaccgggaggcggaggagctctgctcggtgctcgacgaggtgatggcggagtctctcctgacgctgcggttggtgcccgtgacgcccaggacgctggcgaccaccgatctcgccggggtggtcggcgcgctgaggaagcacgactcggagcggatccgcggcctcgccaccgacatcgtccgccggtggagggcggccgtgaagcgagaccttgtcaggatcggggtcgccatggagaagctctctcagacaccggagcgcatcgaggccgccgatcggccagtctccgatctggatgcgaaggagtgctccggccgacatgggctcggcaacaaagccgaaggagccaacccatccgccgaagaagaagccgccggccgccgcgatggtgtcaagcccaatcacagtgacggcggcgagaagctgatgacggctgctacaaagcggaagctcgatgaggcgcagaagcggcgcaagacggccgacatggccgcagcagcaaagccagagggctctaattcgctcccgttgttgaagatggtggcgccggccgtcgttgccagccacggccgccgcgagagcatcgagctccacaacgacgaagagaagatcgccgctgcgaagcggaagctgcgtgagggctaccaagacgcagaggaggcgaagaagcggcgcaagatccatgtgatcgaggacccaaagatgctgaagcacaagcaggagaagatggatatccgatcctga

SEQ ID NO: 97874 - DNA, 134 bp, Oryza sativa
  Clone ID: PAT_MRT4530_95834C.1
ttattttctagaaaaggagcaaaacatccagtttatgcatcttttaacacgacatacatattatggatagttaaaggccatcctattcacgacttatgctagcatgatcttctgtaggaaatttaactttataa

SEQ ID NO: 97875 - DNA, 294 bp, Oryza sativa
  Clone ID: PAT_MRT4530_95835C.1
atggcgcaaattctcaacaagaaggctgcagcagtgttcttcttcacatctcttatggtgatggccaccgtaaatttctcatccggtcatactacacaaggtggatatggagaaatggattcgtgcatggtccttgtaaattgcgatatgaacaagtgcatgagtgactgccaaatcaaggggttcaacggaggcctgtgcgacggcgagtcgaacgaccactgctgctgtactgatgaggcccgcacaaataatagatttctcttgtccaaatcaacaacgacggttgtataa

SEQ ID NO: 97876 - DNA, 1215 bp, Oryza sativa
  Clone ID: PAT_MRT4530_95836C.1
gcagaaaacatcttatcatcaggtacaaagaacagagaattgcaaggccatactaaatttttattttaatcagtggcgagtaaacatgctatggacatgatcataaccattctcaccaatttatttgtacttctatgacgaatctctgaaacgaaacacccttcttgcagtctctgaaactaacccatccatgatgcatcgagttcatgtcttcttggtggttgtagcaatgtaagtctcgtaggcgagctgcgccgccaaaagatcgaccaccgccgtcccgacggacttgaacaccgtgatctcgtcgtcgcagcgccgcccagccacgctcccggcggcaagctccgcgagcgtcccggccacgtcctccctccggagcacgccgcgctggagcgcgcccaccagctctccggcctcctgcatcgccgcctcgaagtcgatgaacaccctcccccgccgcagcgcctcgtcgtcgcactccctcatcgccggcgtgaacgagcccacgaggtccaggtgcgccccgggcttcagtagctccccgcgcacgatcggctcctgcgaccccgtcgcgcagctcacgacgtccgccgcggacaccgcctcgtccatgctgtccgcctcctcgacggcgacccccgggtgcgcgtcacggagcctggcggcgagcgcggcggatttggccttggtgcggttccagatgaggattcgggagatggacgggagggcggagaggtgggcttcggcgaggtagggcgcgagggcgccggcgccggcgagcgcgagggtggagggcgggcgggtgggggatgccaggagggacgcggcgagcgcggacacggcggcggtgcggaggagggtgagcgcggagccgtcgagggaggcgagggggacgccggaggcggagtcgaagagggagacggcggcgtggacggaggggaggcgcggggagttggccggaaacgaggtgacggccttgagcgcgaggtaggggagcgaggggtgcgcgctccaggatggcatgaggaggagggaggcggatggcgcggtggggagcgggaaggagacgcggtgcgggcagtggatgccggcggcgaaggcggggaggccggcgccgaggtgggagatcagggacgggaaggggaggacggagtggagcgccgccgcgtcgatgtagacgaactggttcgccggcggcggcggcgcggccat

SEQ ID NO: 97877 - DNA, 1493 bp, Oryza sativa
  Clone ID: PAT_MRT4530_95837C.1
gcacgagggaaatttgatgaagaaacaattgggggtaccgagatggcagacgatgaaaatttgacgaagagagcagatagaggcagagattaagaaaataaaagaagctaacgctgaagacgaagaatttcccgatgaggtggagacacccttagatgtcccagcaaaaaggcgatttgcaaaatactcggcgcgagggtcatttaggacatcatcctgggatccaaaggaatcactgccacaggattatgcaagaatatttgcattcgataactttacaagaacacaaaagcatgttcttgctaaaatggcagagcgagatgaaggaaccttgaaggattgtgctcaaagaggatcatttgtgaggctccttctgaaaaatgttcctactgagattgcctcaaaacttgttcatccatcaaggagattgcctgtggttgtttctggtcttcttcaacatgagtcaaaaatatcggttctccatttcagcataaagaaacatgactcctatgaagctcctatcaaatcaaaggactccttaattttcaatgttgggttccggcagtttactgctaggccattgttttcaactgacaacatcaattgcaataagcataagatggagaggtttctacatcatgggcggttttctgttgcctctgtatatgctccaatttgctttcctccactccctcttattgttctaaagagcagagatggggagcagcctgccattgctgctgttggttcactgaaaagtgtggatccggaccggattattcttaagaaaattgttttgactggttatcctcaacgggtctcaaaactgaaagcagtagtgcgatacatgttccacaatcctgaagatgtcaagtggtttaagcctgtagagttgtggacgaaacatggtcgacgtggccgaatcaaggagactgttggcactcatggtgctatgaaatgcatattcaatagcagcgtccagcagcatgataccgtgtgcatgagcctttacaaacgcgcttaccccaaatggccagaacagctctaccagatatgatcatatgagggtcatggatatgtgcttgcacgttggcatgtacgtctcaaagttttgacagattgagctcatcgatgtgcttcctgatgcagctcatatatgtatactagtgctagcagaaaaagaaacctcatgtcaacatgtagttagctgtattctgtatgttaacatttgttttacgttaacagctatgatttttgatttttgctgattttcggcgtgctttcatccgcatttgtgattgattgagccggtaattcaagctgcaatgttacaaaaaaaaaaaaaaaatgttacaggtgcaatcaggagctcacctgtaatccatgcccatgggtggtggcttcaagagaaaccttatatggcataatatgttaaattgcttcctaaaaaaaaaaaaaaaaaaaaaaacctgcagcccggggatccactagtt

SEQ ID NO: 97878 - DNA, 429 bp, Oryza sativa
  Clone ID: PAT_MRT4530_95838C.1
ggccaaaaacaaaggggtttccataaaggggaaccccattaaagggaggggttacggggaaacccaaaccccggggggaaaaaacccctttaaaaccaaaaagcccggaacccgaacaaaaacgggataaaccccccccccccctgaaggggggggcaaacgggatgcccctgggcaagaaggggaccccccggggggggagggcccaaaggggggggcccccaaaaaggcccacaagggaagcccggggggccccctgcaggggggggaagggggacaaatggaacccgggggcccgtttgaaagcccgggggaacccccccaccaaccggggaaacgggagcctccggaacaaaaggcccgggccctttggggacttggggagccccccgaagaccccccgccccggccaaaaagggggcggttttt

SEQ ID NO: 97879 - DNA, 678 bp, Oryza sativa
  Clone ID: PAT_MRT4530_95839C.1
atgtgcaattttagtattctactacaagtagaattaatctcaaccgtttattttaaagggcaggttcagtggacggccacggcaggcaccaccggcgattgctgcagcacggcatcgtcgtctctcgccggcaagggccacagcgcggagtacaccgccgacggggcgcggtttgaggtgccattggtgtaccttggcacgatggtcctcggcgagctcctcgtcatgtctcaagaggagtttggctttgccggcgacgatggcaggatcatgttgacgtgcgatgcgtcggtgatggagcaagtcatgtgcttgattagcagagatgcctctgaagaggttgagaggatgttcttgagctgcatggcaagttcttgccacagtgtcagaggaatcagccatcagttttacagtgtcggagaacggcgggctattcgggatcggctgccacggccggccgaggtaggtctccatgctgctgccggcgggggcgccgcggaggaggtcgtcgtcggcgtagatgttgcagtcctggaacgagaagccggtggtgcgggattgggtggtgatggtgttctgctggccgcggagggaaggcgcgtgacaatgtcgcagtgttggaagacggcggtgatgcgcgtcgccgaagatgagttagatactgataaattacaataa

SEQ ID NO: 97880 - DNA, 822 bp, Oryza sativa
  Clone ID: PAT_MRT4530_9583C.1
atggatctcgacaagtccacctccacaaatgcgtccctgaagaaactgcaggacgacgatgctctccctggccgcgggaccatggagcgagaaacaagaggtattgaacctgaacctgtcctgggccgcatggttgcggttgaggattacattctttacgccaagcagcgcacgccggtggtgtccgtgctcggcagcacgcagcggcagcatgcacgctgcggtggtgccgcggtcaaggacgacggcaccgtttctttcatctatatcatcgatgacctccgagtacgagggttgtcggggtatgaagttgctgccgacttcatcggtaggcggatccagccgctccaggctcgagtccacccagcctttgactattctgggccagaggacacggcccgggtttctcctcggggtttgaacagcgaaactgtggagcgctgcgtcggtcaagtaatgatcagcggccccacaacggcgagcaacatcgtcgtccccctttgcgaggaggggacggccgaacgcgaagctgcaatcaacgctctccctctgactgacgtcatcgggctgctcgtggaccatcaggcggcggcgtcgttgaaagagggcatcgcgaaggaggcgttcgacgttgttgctgctcccacgacgagtggcagcaatgtcccgaagagagagaggaaattctcctctgtacttgggacccgccggaaggcgcctaacccatcgggcggtgcgggcgaaggcggtgcaagacgggtccggtgcgacctccagtgcgtctcctgcagcggcttcgacagatgtcgtggtcgcgactag

SEQ ID NO: 97881 - DNA, 504 bp, Oryza sativa
  Clone ID: PAT_MRT4530_95840C.1
atggagaaggagcaactaatcaggggctcagaaattaatctagctgtcatggaagatggaacatgggataataattcgcgtaagaacaccatcaccacccaatcccgcaccaccggcttctcgttccaggactgcaacatctacgccgacgacgacctcctccgcggcgcccccgccggcagcagcatggagacctacctcggccggccgtggcagccgatcccgaatagcccgccgttctccgacactgtaaaactgatggctgattcctctgacactgtggcaagaacttgccatgcagctcaagaacatcctctcaacctcttcagaggcatctctgctaatcaagcacatgacttgctccatcaccgacgcatcgcacgtcaacatgatcctgccatcgtcgccggcaaagccaaactcctcttgagacatgacgaggagctcgccgaggaccatcgtgccaagcaatcgccggtggtgcctgccgtggccgtccactga

SEQ ID NO: 97882 - DNA, 2656 bp, Oryza sativa
  Clone ID: PAT_MRT4530_95841C.1
ggctcgtggtcttgtccgtctgttctttttttgtgggttcagtcgatgagataactccaaatgaattattatcacttgcttgcacaaactagcaagcatgttccaacaatgtctcaagaacccaagatactgtgatatccaaccaggggaccagggaaaagcttttgccaagatctttccttgaacacaagtacaacttcaattttgtaagagaacgaaaagaggaagaaacatacaaggcacacagtttgtatgacttgcccttctcaggcagcaagttaacgaaccctctggataggaggcactgcagaaaaatgagcttttattattcgttagagtagcacttctctccatcaaaagaccaggaaactggaatcagctttaagatttttgacccaaagcaggaatcttcttacaagcagggattgaaaccaaaacacccatttccgcaattgcttctttttagctaagaaatgggctgacatattgtacaaccgggaaatccagatgaaacaaacctttccggttcgaaaagtcaaacggagggatgagcagagaagagctaccaaaagaatttttgttcccaaactgactttgcttccctaaaaattttcgtcgacatcttagtttgtccatgaggcagacctcttcaaaacaggcttcattgccttatcctcctctagtgatatcattccgagatgagaagggtcctcaagcatcatcttggcgaccaaataccctgcgatagaccaagtctggaatttccttgcctgcttgccgacataccgcccaagcttcccatcatagtactctggccaaccatccttcaacagccttctctcagctaagtcaattgcacgccttgcaatttgtggccggccagtcttgatgcaggctgctgtgagcagccatagtagtactggccaagatcctccattgtggtaactccatctagtattcttcggatcacagcctgtcacaatacgccattcgtgattctcaatagcagggtagcatatcttcagaggcatttcaccaataagctcttcccatcgctcctcaatgagatccattatggccgttgattgctcaggtgtagcaagggatgatagtatagcaatcatgtttccaagtgcaaaccaccggaagtccatccttgcaggactaacattaccaatgaaaaaaccaccctggcaaggcataaaatcaaataaccaatccggaatagaatctgggatgacattgaatttgttgacagcagtgtgggaatattcctctgtcttatagcgataaatatcatttagctgctggaaatcaagccaatagtaactccgcatgtgataacttagagcgtgaagacgagttgcaatcctctctacaaactctttcccttcgttatcatgcttaagcaattgaagagcacaccttagtgccataaagaacagggcttgaatctcaatagggtacccataaacacccattctgcgatctatcatgcagcaaccgtctgcacacagcaatgttgggaaggtatcaaacccctcagacaagcacaggctcagtatcagcctcattcccttctggcattccggcgtctccgcgagcgtgagatccccggtggacttggtgtatgcccgtagaagtatgatccaccagaaccccgaatccacgggagccaccctgccaatggcgctctccccgaaatccgcatgcagggtgtcgacgcccttcttggagtcatggagcactttgaagctggccggcatggcgccctccccgagcttgaaccgatcgaccttcttctcccagccctgcagcaggagcgtcttgagcaggaagtgcctcacgatctccggctcgccgttcatcaggaacgccagcgcgctcggcacgaaatccctcacgaacacctggtcgtagttgaggacctcctcggaggcgtggtcgaaggcggcgatggtgccgaggggctggccgcggaagaagacgagcgagcggcggagcgcctcccaggcgtcgccgacgatggggtggggctcgaaggagtggagcgcggaggaggccggggtgccgacgagcgaccgcaggccaccccccggcgagtacatgccgtcgaagccgcccctggtgccgccgtggccgccgccggagtaggagacgtcgctgagcgagcggtcgtcgaacgagcgctgccgctcgacgttgatccgcggcttgttcagcagccgcgacaggtcgaagtcgtccgactccgacagcgacgtgtgcgacgccgacctccgcatcccgcccgctcccaccgccagctccatgcccctccgctttgcttgcttgcttcccctccctcccctcctcgccgcggatctccgccgcctcccgcccagatctacgcggatcgccggaggggagggagggagagacgcagcgagagatctaggcggcggcggcggcggtgaccacaaggccacgcgaatctcgatggggagaaaaaaaaaatctagctgcctcgagctcccctactatatatcgccggcggtgcgggattccggcgggggtccgtacacccggggtgtatgacgggtggggccgggggagtggggcccacacgtcggtggggggtaggcgaggagggttttttttttgttaattcgagcga

SEQ ID NO: 97883 - DNA, 582 bp, Oryza sativa
  Clone ID: PAT_MRT4530_95842C.1
atgggaggccccggagctagtagcaccatgtcgttcgagcaagcgttcctcaagaacctcctcctgagcctccaagactgctcgacgacgaagcccctggacgccatgagcctccacgagaggaagcgagccgtcaagtcctccgccgacttcgccatggccacggcgcgcggcggcggcgcgcggtggcccaaggccatcgtcttgcagcagcagccggcgtcgacgacggccagggcgcggcggtgcgggaggatcgtgaggcggtgctgcggccggaagacgagatcaggtgcaggtggtggtggtgagatggcgaggaggctgcaggtgaggaggagggccatggcgctgcggaaggtgatacccggaggcggcgacgccatggacgaggcggcgctgctccgcgaggccatggactacgtcgtccacctccgcgcgcaggtcgacgtcctccgccgcgtctcggaagccgtgcagcttcagagacgatacacgtcgtccacctctctccgggattattcttggtctaaatgtgccttgaaaggagaggaggattcgagcatgaatatgaagcgatga

SEQ ID NO: 97884 - DNA, 2799 bp, Oryza sativa
  Clone ID: PAT_MRT4530_95843C.1
atggctgctgcggtggcggtggagcaggaggccgcctgcctgcagagcttcgagctctacgagagcaagtcgaggttttatatttttggaactaacactggcaaaacacattggagattactgaagattaatagatcggagccatcggaccttgacttacatgagtgttgtactgtgtatactcaaagtgaatatcatgaactgttaaaaaatcttgatgaagaccacaggttgactggtggtgtaaagtttgttacaaaattttatggcataatcggtttcataaagtttgttggaccattttacatgttaattattaccgagcagcgaaaaattggggagatatttgatcatccagtataccaggtgattaagacttcgatggtcgagttagcgaattctaagacgcgatccagatttctaaattccaaggatgagaacaggtacaagaagatactgaatacacttgatcttagaaaggacttctttttcagttactcataccatatcatgagaagccttcaaaagaacttgagtgatccacaggaaggctggaacatatatgagtcaacttttgtgtggaatgaatttctcacacaagggatacgtaattttcttggaagtactttgtggaccgttgcgttggtctatggattttttaagcaggataaaatttcaatatccgggaaggacatcatgttcacgctcattgctagacgctcaaggcattttgctggaaccagatatttaaagaggggggtgaatgagaaaggcagagtagcaaatgatgttgagactgagcaaattgtttatggagctggacctaggcctacagaagtaagttctgttgtgcagaacaggggttcaatcccgctattttggtcacaggagacatcaaagatgaacattaaacctgatattatattgcatcagaagggcgagaattatgaagctactaggctgcattttgagaatcttaggagaagatatggagatcctatcattattttaaacttgattaagaaacgtgagaggcgagagtcaatacttcgtcgtgaatttgatagggcgataaggataataaacaagaacataccagaggaaaatcatttgaggttcttgcattgggatcttcatgaaaactctcgaggaaaacctacaaatgtgcttgatgttcttttgaaagtggcgttccgtgctctgaggttgactgagttcttctattgtcaacttgcaccatctaccggatctgatactgctcatcattggccttccctattgagtggtcttgatccatttttatgtgaagaaaacagcaatagcgacaacacagactgtacggaaattgttggtgacatatcccaagaagacatctctggcagctctgattcctcttgcaatggaactacagaggataaagctgaaaacaacgaatcacctccactaaaaccaccaaaattccaaaagggtgtcttacggacgaactgtatagactgcttggatcgaacaaatgttgcccagtatgcctatggtttagctgctcttggacatcagttgcatgtgcttggttctgtagaatccccagaacttggtttagatgaccccttggctcatcatttgatgcacttttatgagaggatgggtgacacccttgcggtgcaatacagtggttcggctgctcataacaagatattctctgcaaagagaggtcatctgaagctttttattcgatcacaagagttcttcagaacactacaacggcactacagcaatacctgtatcgatgctaacaagcaagcagccataaacttatttcttggctacttccaaccacaggaaggaaaacctgcactctgggagctagagtcatcttcagtggatcatatcgctgtgcacgcacgtacaataaaaagagtgagatcagatggcagcattctttatggaagcaacacatccatatctggatgtagtggttgccataatgaagacaaggagctgttgaatgcagcaccgcttgatgttaaaagtgggtcacaatttccagtgttggaatctgattcagtacatggcaatgaaatttcattgacctgtgaaagtgaggtatcaaacttaaggtatacacctatgatacctcagacacatcatgttccaggcggcgttgaaactgaaagtagcattcattctggtgattcaaactttctggatcttgaatggctttcaacttcaggcaactcaagcgatgaaaggtccattgcaattagtactccagatgtgaacctttcagcggagaatgttataagtggcataaattctgagaccatggaaaatcaagatgctgatatctatactcagaatttacctgagcatttcgtgcagtgggttaaccacggagacaccttttggtattaaaattacccgatgcttgtgtcatgtacgcggtacgcgttggctactttgaaggccaaaacttgtcttttccaagtggtcatgagacgggaattggtgatttgagtagggaattaggagtgagaagagatagatggcacagcaaacttcagacattcgccttgtgatatatgtccacatcatcccatagccctcttaggaaagtataacattctggttatttgttcccatctttcttgtaggagcaagtagataggcgtttttctcaatttttgaaaagaaagtagaggtagattcatatggatatataatttttgttctttcgaaaaatgtaccattgtgggaacattccgtttgatatgtaaatattatttttaaaaaaaaaaaataaaa

SEQ ID NO: 97885 - DNA, 176 bp, Oryza sativa
  unsure (1)..(176): unsure at all n locations
  Clone ID: PAT_MRT4530_95844C.1
agttcctcgcatcaggttctttttctaggagttctttcttttcattggtggtttgctattgtggattataatgctaggaaacattttttctcaaagatttttggttttaccttgaaaaatttgtagaggtttatgngcacaacagattggaagtagtcgagggtagcttcagtttg

SEQ ID NO: 97886 - DNA, 2802 bp, Oryza sativa
  Clone ID: PAT_MRT4530_95845C.1
atgcggcgcccgcgggggctgctggggtggggcgcgctggtggccttcttcttcgtcatgaactggtggatgttctcccgcctccaggaccccgccgcgcgctcgcacttccgcctccgccgccgccactcgcccgccgccaacgcgtcgctgtccactctggaagaagtcagtggtgctggaaaggggaagagacctcatcaggtcatgctcactcggctacttgctttagctgcccatgcattggcagaggcagagacgaggccagaaccccaggatttgtggaaagagccaataaatgctactatgtggcgaccttgttctgacaaaaggacttgggagccatcagaggggaccaatggatacatcatgattagtgcaaatggtggaataaaccagcaaagggtggcgatctgtaatgctgttacaatatctcgattgctcaatgcaactcttgtcattcccaaattcttgtacagtaatgtttggctggacaaaagccagtttggcgatatatatcaggaggattattttatcaattatttgaaatctgatattcggattgtgaaggagcttcctgtggagctgcaatcattagacttggaggcgattggtagccttgttaatgataccgatgttatgaaagaggcaaagccaagcttatatgtaaaaaagatactaccaattttattgaagaatagagttgtccacttagtaggatttggtaaccgtttgtcttttgatccaataccttttgaacttcagagactgcgttgcagatgtaattttcatgctcttcgtttcgtacacaaaatacaagaaactggtgcattacttgtagagaggttgcatggtcatagaccccatccatcacctttggaggataatcttttaggccattttgctagcaaatctgttctcaaggggaacaagaatgaaacatcgaaatatctagcagttcatctcaggttcgagatcgatatggttgcatattctatgtgttactttggtggtggaaaagatgaggaagaggaattagagatgtatcgtcaaattcactttccagccttgacagaactaaggaagacgacaaagttgccctcagctgctttcttgcgatctgaaggaaaatgcccccttgcacctgaagaggctgtgcttatgcttgctgctattggtttcaagcacagcacaaatgtatacattgcaggtgctgaaatttatggtgggagacataggatggcagccataagccgtctataccctgctttagtatctaaagaaactcttttgtcttcctcggaactcgaaccattcagaaacttttcatcccagttagcagccttggactttattgcatgtgcagctgccgatgcctttgccatgactgacccaggtagccagttctcttcccttgtccaaggatatcgcatgtactatggtggtggggaccttcctacaattagaccaaacaagcgccggctagccagcatacttctgaagaatgccacaatggagtggaatgaatttgaaactagactatgcagccatccacgtcactccttgcgtacggacgacacacctacaaaagagaaccccgtcccgagtctcaaacctccctgtacaccacctgttcgatcaattgcgccgccgccgccgccgccgcctatgagcttcctagccggccgcctcgccgccaaggagggcgcctacttcctccaggagtccaagcacgccgccggccgcctcgcggagaagctccccgcctccgcccccgcccccgcccccgcccccgggtcgacgtcgccgtcgcccgacgtgctcccggagatcctccgccacgccgtgcccatcaaggcgacgccgcctccgggtgagccctcgctctccgcgtcctcccgctgggccgtcccgcggggcggcgccgaggctgccggcttgtcccccgacgcgctcaacccgctccgctcctacgtctctctcccgcaggcgaccttcggccccaaaagttctttcgacaaattgggaaaaaaaggcagacatgatcccagaatcctcatgttttttgctctgcatatgtggagaagcattcatttaagttcagttaaggatgatattgattacatggacataatgtactacatatggcagcttccaaatgagcagccaaactactcttcctcaacggccaatgagcgacggcgtgataggcacccacctcccatggaccctgaaaagttgaaggctatttttacagattggaaaggcatttattgctgcaactatattggtgtttggaggatcaacggctgtcctattatacacagcagataagctgcagttgcattcagtagatgatgtcagaactaaaggaagagatgctgtgcaaccacgagccgacatgatcaaagaacaaatagctccattgagaagctgggctgaagagatgtcccgaaaatggcatttcgaaggagataaagatgccaaggagaagtccattatcagagagctttcaagagcactcggctctaggacgccgccaacttgatcaaacatcttccgccgatagttgatgttaccaagtttaccatcgagtccatcgcttgtacgttgtgtatattatgtttgttataagcctataagtaatgtaaagttcgatcaaataagagagtttgttactaccccttctggtctgcgtaaaagaccagatcgaaaaggcggactcttggataaaaacattgtgattgttaacggtgttaggtaaaatataaagagaagctagtgtgagtaaagcattttctt

SEQ ID NO: 97887 - DNA, 178 bp, Oryza sativa
  unsure (1)..(178): unsure at all n locations
  Clone ID: PAT_MRT4530_95846C.1
gcgagccgtgaccggcgagggtcaccgagtaccgcgaaggtagcagtcgcgcgccgctgctggatcatgtgacactggactagcggaggcgtgccgcatcgcgatgggaggactacgngagagcatgccgatgcccctggagcaaggctggtcgtcctcttcgtcggagtactacggc

SEQ ID NO: 97888 - DNA, 245 bp, Oryza sativa
  Clone ID: PAT_MRT4530_95847C.1
ccactgatacctgagctaattttttagcttccgacctccaatgtggtgaaaattcagtacaagacaccgcccagggtggaaatactacccggcgcactattacccctagggtagataccatatgtggatggcaaggtaaaagccaacagtgcttgcgcttgagccagaacccggccaaagtagagatgcccaaactgctggaggtgtagcttctgcgctatggcctggacaacgttaatgtcctg

SEQ ID NO: 97889 - DNA, 1696 bp, Oryza sativa
  Clone ID: PAT_MRT4530_95848C.1
atgtcttttccatgctacttcccagagttgcaaccagctaaagtcaatcccagtgggacatctgctggtggactcccatatattcagggattcagggcagagagcagtatgcttttgcttctaaaattgcagattcatactctctcctcttctttctcctcttctccaagagttctttgctgggtgctggctgttcttggatattcatacagattacaggcctcaagtctttctgctggtgaattaactgatcttcagggaaagtttttcatggaaacctttttcaggaaagatacaccgatcatcagaaatgtgaagatctactcctccaaggagctcagaaaagccacaaaaaatttctgctcaggacacaaactaggacagggttcttttggctgcgtctacctgggaaagctcaggaatggtcagaaagttgccatcaaggtgctctcctccgagtcaaggcaaggaacaagggagttcttaaatgagctgagtgtcatatccaacataaaccatcacaatcttgtgaaattgcatggctgctgcgtcgacggagatcagaaaatgctggtctacaattacctggagaacaacagtcttgcacagtccctctttggcaattcccatagtagtatccaattagactggaaaacaagagtgaaaatatgcatcggcgtcgcgagtgggctcaagtatcttcatgaagaagtccggccggtcatcgtccaccgtgatatcaaggcaagcaacattcttcttgacaaggatctgagccccaagatatcagattttgggctggcaaagcttttcccgggcaacatgacgcatatcagcaccagggttgcaggaacactaggatatcttgcaccggagtatgcgatccgagggcagctgacaaagaaggccgacgtctacagctttggagttctacttctggagattgtcagtggaagatgccacactgaccccagattgccgcggcacgccggggccgcaggggaaagggcacgggggctctacgagtccggtgatctcaaaagcctagttgatggcaccttgaaaggcgtcttcgacaccgaggaagcgcaacggttactgaaaataggtctcctgtgcactcaagatactccgaagatcaggccctccatgtcgacgatcgtcaagatgctcaagggcgagtgcgcaattggcgataagatcatgaggccaggcctgatcacagatgtcatggacctgaaaatcagaacagttgagccggttcagttcagtgcctctccacccaaatctccttcagacagcaactcccaggtgtccatgcttgcagtagctggtagcactgtggtagaagagagcccctgatggaaggttggatatctgaaggaaaagatgatttcaggttagaaagatataaaagaagaatgaaaagatgcctgaaaagcaatggttgtaaattgaaagggagatggaaagagcccaagaggatcttatacatttttttttttttgtttgtgtagttttgctaggtagatactattgtaggaatgttgtttgtatacatagcatctgagttttattatcaccagctatacaaacacttggtgtttatactaaaaaaaaaaaaaaaaaaaaagtaagaacaaacttggctgcgaatagttggcaatgatgtcaaataaaaaaaaaaaatataaaa

SEQ ID NO: 97890 - DNA, 400 bp, Oryza sativa
  Clone ID: PAT_MRT4530_95849C.1
atggcgtactcctcccgtttgaatcggagttgaaaccaaacaaacttctcctcaggaggatagatgggcgatttaggtgagatcacatgtagatctaactttctattcactcgtgggatccgggcggtccggggagggggggcactacggctcctctcttctcgagaatccagacatcccttatcagtgtatggagagctatcgctcgagcacaggttgaggttcgtcctcaatgggaaaatggaccacctaataacgcatcttcacagaccaagaactacgagatcacctctcccttttgggccgctcccggcccaatccccctttccctcccgcggcccacgcccctctctcccttcctcggccagcctcccctctcctctcttgggccgtcggcccg

SEQ ID NO: 97891 - DNA, 1036 bp, Oryza sativa
  Clone ID: PAT_MRT4530_9584C.1
aagttcttttccccccccctttttccctcttgggccggctcggcccattccctccctctctctctctctttcctcccgcggcccatcggcctccccgcgcgcgcgcgccgctgacaggcgggcccgcccgccactctcgctgacgggtggggcccacctgtcatctccctcctcccgccgcgccgccgcccgcccgtgccccccgcaatcccctctcccgattccccctctttcccctctctctctccctcggattcgctcggaatcaatcccgcaaacctcgccggcgtattcaatggagccgagatctccgcgcccgtttcctctctctccggccgctctctctccctcccgttgctatataattgctccccgagctccgctcttccgtttccgccgctcgccgctcgctctcgccgtcgaaatcgtgctcgcgccgggctccttccttttcgccatcgccgccgagctccgttccgccgccgccgccggttcggactttttccttactcggggaaccctccgtccgcttttgccgggttgccgccgaccccgtccgccggttccgttttgccccgccgaacggcggaaaaaccgtggcccttttaattccgagccgggccggccgggttttctcccggttcggtccgccggttttccgccgccttcgctgtctcggggtaagccgtggaccgtccccttcgtttcccccttccctcctctctctcgggtgccactccgccgcgccgttggtcgccggcggcgaccatcggggcgcgggtgcgcgccgctcccgtcggccgcgccggcgaggccgccctcgggcgcgccctcgcggctgccaagtgggcccggccgtcagccgcccgcgcccgtgggtgcggctgacgcgcgggacccacggcgccgaccgccgccagccgcgtgcgcccggtccaccgtggaccgagcggctgacacgtgggccccacttcccgtggacccggtccgcgcgcccgccccctcggctgacgcaataaataggatttttaattga

SEQ ID NO: 97892 - DNA, 528 bp, Oryza sativa
  Clone ID: PAT_MRT4530_95850C.1
ggaaaacccggaatattcaaagggaagcaaagaccatcaaaaaaacaatggcaactggggcaaaaaaaaaaaaaaggcgggggttttgggggcaaaaaaacaaattggtttttgccaacggcccccaccccccaaacagggaaactagttcaggcccggcgttttcgaaccaaccccaggggggggaaaaacagcatgggttacggggacacaaggacttgggacccaaacaaggggggaaaaaaacggggggggccggggttgggcgggggggggccccccaaacaaagcccgggagcgccggccggagccccccgctgaaaaaggaggggaactcaaggggggcccccccgccctttttgacgtcaacaacgaggacggggggccccaccctaaaaaagtccgggggccacggggagggggcccttggccccgccgggctccgggccctcaaggggcacgccgggggccccgttttggggaacccgaatccggccgccggggggcgccgcccccccctcgaggggg

SEQ ID NO: 97893 - DNA, 837 bp, Oryza sativa
  unsure (1)..(837): unsure at all n locations
  Clone ID: PAT_MRT4530_95851C.1
cgtanacgtattccattcccttcatgctggttagcttctcccccttgttcgatgcctccggatccctaacgcttgcttctcccatgccactccactcccacctcctccttctcctgctggctctctccacgtcggtggttgctggctctgtctcctcctccccctcggtttgtgccggcggcggtggcggtggcggcgacgcggccatcgtcgcggcggcgttccggggcgtgcgcaacttccagctgcctccatgcggggctgtgcgggagctgcggctcccgtcgcggaacctcacgggcgccgtggcgtgggcggcgctcgccaacctgtcgggcctcgccgtgctcgacctgtccgggaacgcgctccagggcgccatccccggggggttctggcgcgcgccgtcgctccggcacgtcgatgtctccgggaaccagctgggtggggctctccgggtggtggaggctagcccgcggctcgagtcgctcaacgtgtccggcaaccggttcaccggcgtcgctggggcggaggcgctcgccgggctccgcgtcctcgacgtgtcggcgaacaggatccgggcggtgccgcaggggctgaggcggctggcgcgggtgagccggctcgacctgtcgcggaacgcgatgcaggggaggttccccggcgacctcccgccgctcgccgggctccgtttcttgaacgtctcgtacaacaacttctccggcgtggtggacggcggcgccgtcaagaagttcgggcattctgctttcgtccactccggaaacacttcgctggtgttctccgagaactcgacggcgcggcggcctccaccgccgc

SEQ ID NO: 97894 - DNA, 1571 bp, Oryza sativa
  Clone ID: PAT_MRT4530_95852C.1
ccctcctccttcgcgccgcgccgccgccactcgccaccaatccccctcctcgagcaacccctccacgcctcacctcctcgcgctcaaatcccccacgataaatcgaacctaatcattcaccggattttgttcggagttttccgcgatccgtcgcctcctcgtcgagccgcaatcagtggtgcgtgggtgggcgagcatgagcatggcgttctcgtgcgcgggcgcgcggctgcagcaggggcgggtcggcgtggggaaatgccggggtggtggtggtggtggcggtggcgccgcggtgcgtgaggcggagcggctagctgcctctacccgggcgggaggagggggctgggggttagggggatccgcgccgagctgccgccgcgggcctgcgcggatgggggcggcggcgccaccacctccggttcgaccgtcgccgtgcctgatgctggggaggttgctgaccacgtgaaggaggtctcaactcatggtgtaacaatagtgcaaatactaacattgcgtggcgaggtggctgatgttgacggctcgggtgggaatgggaagttaccctccagtggcggcggcggagatggggataatggtggtggcggcggtggtggtgatggtggggacggtggggatgaaggggatgatgagtttgggccgatcctgagttttgatcaggtggtccaggaggtggagaagcgaggggtcagcttgcccagcttgcccgcggatatgattgaggccgcaaagagcgtcgggattcagaagctactgctgctgagatacttggacatgcaggcatcggcttggccgttgggtccagccattaggtcctgctcacttctccggaacaggatgctagttgacccttcatttctctttaaaatcgggactgagatagtcattgacacatgttgcgcgacattcgcggaggtacagaagagaggggaggagttttggtcggagttcgagttgtatgcggcggatatgttggtaggcgtagttgttaatgtagctttagttgggatgttggcgccatatgctcgatttggtgggggatctgcatctccaggtcttcttgggcgtgttaggcatgcttatgactctctcccaagcagcgtgtttgaagctgaaaggccaggatatagtttttccattcaacaacggataggaacatacttttttaagggtattttatatggtacagttggattcttttgtggtcttgtgggtcaaggaattgcgaacttgataatgactgccaaaaggagtgtaaagaagtcagatgatgatgtacctgtcccacctctgctcaaaacttctgcattgtggggtgcattccttggtgtgtcttccaacacccgttatcagattattaatgggcttgagcgtgtggttgaggcttcacctgttgccaagcgtgtcccagctgtttctctggcattcactgtcggtgtgcgctttgcaaataacatttatggaggaatgcagtttgtggactgggctagaatgaccggttgtcaatgaagggaaggcattcttattttcatgttatcattcacagcgat

SEQ ID NO: 97895 - DNA, 2172 bp, Oryza sativa
  Clone ID: PAT_MRT4530_95853C.1
atggctggcggtggaagggaagagaatttgtcatgggaggtcttcaggagggtggttagctacatagtgcagagaaatcataagtatgtactacatattgcttccttgagagcccgtgttggccataattatttgaccgagggaggaaaagatccgccttttatattgagatcttcttgctttcaggatcaaatcaattggcacgctcatgaacctcaaaggcaagatttttggacctgcactggagttaagcagatctcccaggcctcatgtttttcgcatcaacacgcttttggcaagcccagtgggaccaagttacgacaattttctctcatggctgaaaaaccaccacagtcaccatcatcagcaacaaagactgtggtccctcctcagaccaagattccaaagcctacgggaaccaatgaggctgagaacgcacaacaacaattcatgaattcattcacagagactcggcaagggagagttgttcaaaaatacaagttgaagctagttgctgatgtccctggaacaggtccttctaaagatggtgaggtgcaaaaaactcaagtcagcacagatgattcaggcagcaaaggtactacagatggattgggcgacaaaggtgatgggctccaggatggcttggttgaggatcttggtgaagatagcaacagagaacaattgcagttcaacaacttccaagattggatagactacaccgtgcaacatgctttgatcaaccaatcgggagtgctggttaataccttaacaaacatggtgaagtttttggtcgatggaacaatagctaagcatcaagctacaggaccagtttatcttccaggaggtgtcttcccaaattacagatatttgataactggtaaccaacagcctgctaccaacataacaccagttcaaccgacggcaccagtttcggctcctgcaccagccgcaccgtcgtcagcaccaaggcaaacaaccaatcctcgattgttgaccagagaacagccacagcatgttggacaaaatatcaatcggttgacccaggagcaggttgctgcgatgtttctaccaaacccactggtggccaacccagcacagtcaatgccgattcagcaaacaccaccaagacagcagacggatcaatcggtgttgccccaagttattcctgagcatttagtgcataatattcagccgaatttccagaattattatggaggtaatttgagctatcagtaccagcctccattgcctcatgttcagtatcagcaaagaggatcacctcagccccaatttgctcctcaatttaatcagttcgagccgattccacagcagatgcaaggagtaccccagcagagaccttgggccgacatgattgcagatgtgatgaggaagcagtttgggctcaagccaaaggactatggaaacctgtatcagcatccataccctgagtggtttgaaaggatggagctatcggacttgacggcaattaggcaaaggcatgatgagtctgtgcagcattacagtcagaggttcagggagatgaggaataagtgctacagtttggctctaactgattcttcagttagccgatcatgcgcttttcaaggtttaatagctccaatcaaggagaaattttcatctcaggagtttgagagcttatcacatcttgcacagaaggtgactttacatgagcaaagatttgccgaagccaagaagaatttcaagaaaatcaatcatgtctatccttacatgtatgattttgatgaagaaaatgattccgaagtagcagcagccgagtgggttaggagcaagaaggttgtgccatgccaatgggtgaggagttctggaaaagaagaaagaattgactttgatatcaccaaggctgacaagattttcgatctgttgcttcgggagaaacagattcaacttcctgatggtcatataatcccatcaaccgaagagctaggcgaaaggaggtattgcaaatggcataactctggttctcattctacaaatgactgcaaagttttcagacagcaaatccaggtagctattgaagggggaaagatcaaatttgatgactcaaagaagccgatgaaggttgatggtaatcctttctctgttaacatggtacatacatctggaaggacagccgatggggggaagaattga

SEQ ID NO: 97896 - DNA, 1958 bp, Oryza sativa
  Clone ID: PAT_MRT4530_95854C.1
atggtgtcctacaggcattttcaccaagaatcaaaagagaatggttcaaagaataaggaacatggagcgctttcaagaagtagaacaagaaatcaatcatcggctgaggaaaacaaagaccaagcagcgatttttgagaagccagaggggacaaaaaatcggcatctcaagccgttgtatatcaatagatttgttaatgggaagccgatgtccaagatgatggttgatggaggagctgctgtgaattgcatcccaaacgctactttcataaagctggacagaagggaaaatgattgctcaaaaggaaaatgccaattgaagatggagagtccaaattattattttgagggcgtcgtggagggttcaaacgtctacaccaaggatacagtagatgatctcgatgacaagcaaggaaagggtttcatgtcggctgatgatttggaggaaattgacataggtctaggagatagaccaaggccaacattcatcattccagttatcaagaaaaatggcaaagtcagggtgtgcattgattttcaagatctgaacaaggctactccgaaggatgagtacccaatgccggtggccgatcagttggttgatgctgcttcagggtataagatattaagttttatgaatggcaatgcgggttacaatcaaatctttatggcagaagaggatattcataagacagctttcagatgtcctggtgcaatcggtttgtttgaatgggttgtgatgactttcggcttgaagagcactggagctacatatcaaagggccatgaattacatattccacgatctgatcggctggttggttgaagtttatattgatgatgtggttgttaagtcaaaggaagtagaaaaccacatagtcgatctcaggaaggtttttgagagaactaggaaatatggtttgaagatgaacccaacaaaatgtgcttttggcgtatcggttggccagtttttgggatttcttgttcatgagagggggattgaggtgactcaaaggagtattaatgcaattaagaagatccatcctccagaggacaagaagaagaggtttatctctaatttatctggaagattagaaccttttacacctttgttgagattgaaagccgatcaagaattcacctggggggcagagcaacagagggctttggataatatcaaagaatatcttagttccccaccagttttgattcctccacagaaggggataccgttcagattatatctatcggctggtgagaagtcaatcggctcggttttgattcaggagcttgaagggaaagagagggctgtattctatttaagtcgcaggctcttggatgcagaaacaaggtattctcctgtggagaagttgtgtttgtgtttatatttctcttgcacgaagttaaggcattatctattgtccaatgaatgcactgtgatatgtaaagccgatgtggttaagtacatgctgtcggctccaattttgaaaggaagagtcaggaagtggatatttgctttaacggagtttgatcttcggtatgagtcaccgaaggcaattaagggtatcggcttggttataatttctcctcggggggcaagtttcgagtttgcctatactattaagccctatgcaactaacaatcaggctgaatatcaagcggttctcaagggattgcaattgcttaaggaagttgaagccgatgctattgaaattatgggtgactccttgttggtgatcagtcaattggcaagagaatatgaatgtaagaatgatacattgatggtttacaatgagaagtgcagagagttgatggatggattttggctggtaactttgaagcatgtatctcgggagcaaaatgtcgaagctaatgatttggctcagggggcatcagggtacaagccgatgatgagagatatcaagatagaagttgctacaatatcagccgatgattggag

SEQ ID NO: 97897 - DNA, 2655 bp, Oryza sativa
  Clone ID: PAT_MRT4530_95855C.1
atgaaggttgatggtaatcctttccctgttaatatggtgcatatagctggacgatctgctgatgaagggaaaactcggggttctcagttgaatacaaccaggattatcaacaaatatcaaagaagattctgctggaatgaagcaaaatttgaaccgaggcaagccgatgtggatgatgttgaagaggtttctgcgagattggttttgtcaccggaacaagcgattttcgagaagccagaggggacagagaatcggcatctcaagccgttgtatatcaatggatttgtcaaagggaagccgatgtccaagatgatggttgatgggggagccgctgtgaatttgatgccatacactacattcagaaagttggatagaaattcagacgatctcattaagactaacatggttctcaaggattttggtggcaatccatcggaaactaaaggagttttgaatgtggagctgacagtcagcagcaagaccgttcctacaatattttttgtcatcgatgggaagggttcctatagcctgttgctaggaagggattggattcatgctaatttttgtattcattcgaccatgcactaccaattgaagatggagagcccaaattattattttgagggagtcgtggagggttcaaacgtctacaccaaggatacagtagatgatctcaatgacaagcaaggacagggtttcatgtcggctgatgatttggaagaaattgatataggtccaggtgatagacccaggccgacattcctcagtaagaatttatctctaaaattcagaaccaaattgatagagcttttaaaagaatatagagattgcttcgcttgggagtattatgagatgctagaactcagccgatcgattgtcgaacatcggcttcctattaaaccaggggttagaccataccagcagccgccgaggagatgcaaagccgatatgctcgatgctatcaaggctgagaaaaatggcaaggtcagagtgtgcattgattttcgggatctaaacaacgctaccccaaaggacgagtacccaatgccggttgtcgatcaattggttgatgctgcttcatggcataagatattaagctggttcgttgaagtttatattgatgatgtggttgttaagtcaaaagaagtagaagaccacatagccgatttgaggaaggtttttgagagaactagaaagtatggcttaaagatgaacccaacaaagtgtgcttttggcgtatcggctggtcagtttttgggatttcttgttcatgagagggggattgagttaaggcattatctattgtccaatgaatgcattgtgatatgtaaagccgatgtggttaagtacatgctatcggctccgattttgaaaggtaaggttggaaagtggatatttgctttaacggaatttgatcttcgtgtgcactcatggttgtggtatcggcttagttataatttcccctcgggggaaagtttcgagtttgcctatactattatgccatatgcaactaacaatcaggctgagtatgaagcagttctcaaggggttgcagttgcttaaggaagttgaggccgatgctgtcgaaattatgggtgattcgttattagtgatcagtcaattggcaggagaatatgaatgcaaaaatgatacattaatggtatacaatgagaagtgccgagagttgatggatggatttcggctggtgattttaaagcatgtatctcgggagcaaaatgttgaagctaataatttggctcaaggggcatcagggtacaagccgatgatgagggatatcaaagtagaagttgccacgataacagccgatgattggaggtatgatgtgtatcaatatttgcagaatctatctcaatcggcttctcagaaattgcattataaagctttgaagtacacattattggatgatgagttgtattatcggatgattgatggggtgttgcttaaatgtctgagtgccgatcaagccatggttgtgatgggtgagcgaggcgactcgactccacaggcaatccttgacggcagcgacaaaccaacttcgacaagacagctcccactaggaagatcttcagctctggttatcaatggcatatgggctgacgtcacccaaggggggggcgccggcaagcggggtccgcatgtcagtggcacaaggggagagggagggggcgccggctggtggctcaaggggaggggtggtccaccagctggtggggcccaccgggcagcagcacaaggcgggaggggagtggatggtggttcggcacggctcaagccggccgaccatggcaaggcggcagcggccgcaggcggcctccgacgacgaccggcggacggcgaggcggcggcggccggcgtgaaggcgacggcgcacggccggaacagcggcgtggctcggcgctcgcgggaaggggaaggaaaggaggaaaggtgtcctcaccggcgatgcgagggaatcgggttccggcggtggcggatggcaatcgagtgggaccgaggtgcgggcgacactggcgagcgcggcggcggctttagcggtggtggcgcgcggccagaggcggtagtaggcggcggcgcgtgggaagagcgggctctgaaaattccactaaaaatcctgttaatcgattgtgacatctag

SEQ ID NO: 97898 - DNA, 1419 bp, Oryza sativa
  Clone ID: PAT_MRT4530_95856C.1
gcacgaggctcctccccctctttagcttttcctcctcctcggttcggttccgtggttcgtctagggtttagtgggttgagatggcgccgccggatgtcggctcccgcggctgcgcccgcggcctcgcctgcgccaccgtcgcccccgccctcgcggcccccgtcgccaccgacggcgtgatccgcgacgccctcgtcggccgcgacagcgccgccggcggggcccgggcccgccgctccggcgccggcgccgccggccgggccttccgcggcgccggcggcggctagaacggccccggccgggctagccacccccgcctcccccattctccccgccgccgccgccgccgtctcgccgccgacgaggagatgggtcgcgtgatccgcgcgcagcgtaagggtgcgggctccgtgttcaagtcccacacccaccaccgcaagggccccgcgaggttccgctccctcgacttcggcgagcgcaacggctacctcaagggcgtcgtcaccgacatcatccacgaccccggccgcggcgcgccgctcgccaaggtgacgttccgccacccgttccggtacaagcaccagaaggagctgttcgtcgcggcggaggggatgtacacggggcagttcgtctactgcggccgccgcgccacgctctccatcggcaacgtgctcccgatccggtcggtacccgagggcgccgtggtctgcaacgtcgagcaccacgtcggcgaccgcggcgtcttcgccagggcgtccggcgactacgccatcgtcatcagccacaaccccgataacggcacatccaggatcaagctcccctctggtgccaagaagattgtccccagcagctgccgtgccatgatcggtcaggttgctggtggtggcaggactgagaagccgatgctcaaggctggaaacgcctaccacaagtaccgcgtgaagaggaactgctggcctaaggtgcgtggtgtggccatgaaccccgttgagcatccccacggaggaggtaaccaccagcacattggtcacgcctccaccgtccgccgtgatgcacctcctggccagaaggttggtctcatcgctgcaaggaggactggtcgtctcagaggccaggccgccgctaccgctgccaaggccgacaaggccacttagagtgttacttattgttgctactatccatattcgctaccatgcttatcatcgctagattaaaggacatgtattccagtatggtcgtgctttttgcttggtactctggtcacatttgtgatgaatgttcgcagttttcgtggtcatggtctggattctacattccacctaaagaagtttttacctggttatttaaaaaaaaaaaaaaaaaaaaaaaaaaaaaaaaaaaaaagaaaaaaaaaaaaaaaaaaaaaaaaaaaaaaaaaaa

SEQ ID NO: 97899 - DNA, 4347 bp, Oryza sativa
  Clone ID: PAT_MRT4530_95857C.1
agcaagattccaaagcccacaggaactagtgagtctgaggttaatgaaggaaacattattccgatcactgtagacaagctttcaccagaacaaaagaaggagtttgaattgatgatgaaacatacgcaacaacaattcatgaactcattaacagaaaccaaacaaggaaaagtcattcaaaagtataagctgaaactagtagctgatatgcctggaatgggttcgtcaaaagatggtgacactcaagcagctaaaggtagtacaaacgattcgggtgataaaggcacataccctaaggatggtgaagttggagttgtaggagatggcagtgaagaacaattgcagtttaacaacttccaggaccagattgactatgctgtgcaacatgctttgatcaaccaatctggagtacttgttaatactttaacaaatatggtgaagactgttgtcaatggtacaatagccgagcaccaagccacggggccagtttatctaccaggtggtgttttcccaaactacaggcctttggtcacagcaaggttgagaacacctgataatcggcaagtacagcacgtggtcaaccaggttgttcctgagcacttggttcataatgtgcagccagatcaatcggttgtagcccaagttattcctgagcatttgcatcagcaaggtggatcacctcaactgcagacgttgccgcaatttaaccagtttgctcctcaacttaatcagttcgagccgattcagcagcatgtgcaaggagtacctcagcagaggccttgggctgatatgattgcagatgtgatgagggagcagtttggactcaagccaaaggacactggaaacttatatcgtcatccttaccctgagtggtttgaaagggttccattgcctagccgatacaaggtcccagatttctctaagttttcagggcaggataatgtttcaacttatgaacatatcagccgatttttggctcaatgtggtgaagcatcggctattgacaccttgagaggtttgatagcaccgattaaggagaaattttcatcccaggatttcgagagtctatcacatcttgcacagaaggtaacttttcatgagcaacgatttgctgaagctaagaagaatttcaagaagatcaatcatgtatatccctatatatatgattctgaagaggatgatgattccgaagtatcagcagccgaatgggtcaggagcaagaaagtcataccatgccaatgggtgaggagttctggaaaagaggaaaggcagcaaatccaggcggccattgaagggggaaaggtcaaatttgatgactcaaagaagccgatgaaggttgatggtaatcctttccctattaacatggtacatacttctgggaggacagccgatggggggaagaatcaatgttttcagatgaattcagctagaattatcaacaagtatcaaagaaagtatgacaagcagcaggagaggtattgtgaagaagatgatggtggatttgatcctcattgggactgtgagtttttcagattctgttggaacaaaggcatgaggctaccatcaattgaagattgccctgggtgcagtgataatacaggaagttcaagccgatccaacaatagaggtaatcggctaggtcataaaagggtgtctgttcatcagaggttgggcccggttaatcaagattgctaccaggatgacgatgaggataggaagactcagtggtgtccttctggtattttcacaaagaatcaaaagagaagggttcaaaggttgaggaatagagaacgcttccaggaggtgcaacaagagattaatcatcagctgaggaaaacaaagaccaagcaggagtggcgtgttaagagcgcggttacaacagccgatgaagttgaagctaacaaggcgagaagattgcttaagggtaaggctactgcatctgcatcggtgaatatgatttttatgctacctgcagaatttgaagctaggcaagccgatgttgatgacgttgaagaagtttctgctagattggttttgtcaccagaacaagcgatttttgagaagccagaagggacagaaaatcggcatctcaagccattgtatatcaatggatttgttaatgggaagccgatgtccaagatgatggttgatggaggagctgctgtgaatttgatgccatatgctacattcagaaagttgggcagaaatccagataatcttaccaagactaacatgatggagagcccaaattattatgttgagggcgtcttggagggttcaaacgtctacaccaaggacacagtagatgatctcgatgacaagcaaggagagggtttcatgtcagctgatgatttggaggaaattgacattggtccaggagatagaccaaggccgacattcattagtaagaatttatctccagaattcagaaccaagttgatagagcttttaaaggagtacagagattgcttcgcttgggaatattttgagatgccaggactcagccgatcgattgtcgaacatcggcttcctatcaaaccaggggttagaccatatcagcagccaccaaagagatgtaaagccgatatgctcgatgctgtcaaggctgaggttgcacgattatatgatgctggcttcatacgtccatgctggtatgccgaatgggtttctaatatagttccagttatcaagaaaattggcaaagtcagggtgtgcattgattttcgggatttaaacaaggctaccctaaaggatgagtacccaatgccgattgctgatcagttggttgatgctgcttcagggcataagatattaagttttatggatggcaatgcaggttacaatcaaatctttatggcagaagaagatattcataagacagctttcaggtgtcttggtgcaatcggcttgtttgagtgggttgtgatgactttcagcttgaagagtgctggggctacatatcagcgggccatgaattacatattccatgatctgatcggctggttggttgaggtttatattgatgatgtggttgtcaagtcaaaggaaatagaaaatcacataaccgatttgaggaaggtttttgagagaactaggaagtatggcttgaagatgaacccaacaaaatgtgcttttggtgtatcagctggacagttcttgggatttcttgttcatgggagggggattgaggacaagaagaagttgcaggagttgatcggcaagataaatttcattagaaggtttatctctaatttatctggaagattagagccttttacacctttgttgagattgaaagccgatcaaaagttcacttggggggcagagcaacagaaggctttggataatatcaagaaatatcttagttccccgccagttttgatatctccacaaaagggggcaccgttcaagttatatttgtcggctgtgtgcactcatggttgtggtatcggcttggttatcatttcccctcagggggcaagtttcaagtttgcctatactattaagccatatgcaactaacaatcaggctgagtatgaagcagttctcaaggggttgcaattgcttaaggaagctgaagccgatgctatcaaaattatgggtgattctttgttggtgatcagtcaattagcaggagaatatgaatgtaagaatgatacattgatgaatgttgaagctaatgatttggctcagggggcatcagggttcaagccaatggtgaaggatgtcaaagtagaagtcgccacaatatcagccgatgattggaggtatgatgtgtatcaatatttgcagaatccatctcaagtggtttctcggaaattgcgctataaagctttgaaatataccttgttggatgatgagttatatcatcgaacggttgatggggtgctgcttaagtgtttgagtaccgatcaagccaaggttgcgataggcgagttcaccaagtgggtagaagctattcccttgaagaaggttgattcaggagatgctgtacaatttgtcaaagagcacataatctaccgatttgttcctccttataagctcgtttatggacatgaggcagttttaccttgggaaattagaatcagctcgagaaggacggagttacagaatgaattgacagctgatgaatattataacctcatggctgatgaaaaggaggacttggttcaatcaagattgagagctcttgcaaaggttaccagggataaggaaagggttgctcggcattataacaagaaagtggtgcctaaatctttttctgaaggggagcttgtttggaagttaactttgctgataggaactcgagataaaaaattcgacaagtggtcgccgaattgggaatga

SEQ ID NO: 97900 - DNA, 183 bp, Oryza sativa
  Clone ID: PAT_MRT4530_95858C.1
atgcggagtgggagcccagcggtcgctttcccggcgctgtgtttggagggagaagaagaggaggaggagagagaatcagaatatgcggctctccctcctccggattatgctatgccaatgccaaggcctcaagatggtgggaccctaaaaagacatcaactttcgctgtctcgtcactcctga

SEQ ID NO: 97901 - DNA, 5915 bp, Oryza sativa
  Clone ID: PAT_MRT4530_95859C.1
ttgcaggattaaatcaactggcacgctcacaaaactaaaggcaagattttcggacttgcactgaagttaagcagatcttccaagcctcgtgtttttcgcatcaacacgcttttggcacgctcggtgggtcacggcaagcatgtcagcagacaagcaacctttgccgtcgacgggcaagtcggcagatcttcaatccaagatcccgaagccgaatgcgtctgacgttaatgaagggaacattgttccagtcactatagacaagttatcgccagaacaaaagaaggatttcaaactaatgacgaagagcgctcaggagcaattcatgaagtctttcgcagaaacccgcgggaaagtttacgaaaaatacaaagtgaaagtagttgctgccgatgaagttgtctcaagctcatcccaaggcgataaaggtattacagatggctcaggcaataaaggcgacgactttcaggatggagtggttgaggatcttggtgaagatggcaatgaagtacaaccgcagtttaacaatttccaagatcggattgactatgcagtacaacatgctttgatcaaccaatcaggagtttagtcaataccttgacaaacatggtgaagtcattggttgatggtacgatagctgagcatcaagctacggggccagtctatttactaggtggtattttcccaaactatagacctttggtcacaggtaaccaacaaggtgtttccaatgtttccaatgtaccaccagttcagctgacagcaccggtttcggctcctgcaccagctgcaccatcgtcggcacaaaggcaaatgattaatcctcaattgttgactagagagaacagccacaacatgttgggcaaaatatcaatcggctgtcccaagagcaaattgcttcaatgtttttgccaacactgccgactggtggatccactcagcagatcctccttcgcctcatgtccaacaagggggattgcctcagcctcagtatgctcctcagttcaatcagtttgtgccgatacagtagcaagcgcaaagggtgcctcagcagagacaatgggccgatatgattgcagatgtgatgagggagcagtttgggcctaagccgaaggatcctggaaacttgtatcggtcttccgtaccctgagtggtttgagagggttccattacctaaccgatacaaagttccagatttttcaaaattctcaggacaagacaatgtttcaacttatgaacatgtcagccgattcttggcctaatgtggtgaggcatcggctgttgatgctttaagggttagattgtttcctttgtccttatccggatcggcatttacttggttttcttctttgccatacaactctatcaatagttgggctgatttggagaaacagtttcacaactatttctacagtgggatccatgagatgaaattatctgacctgacaacaatcagacaaaagcatgatgaatctgtgcaggattacattcagagattcagagagatgaggaataggtgctatagtttggctctgaccaattctcagctagccgatttggcatttcaatgtttgatagctccgatcaaggagaaattttcatctcaagaatttgaaagctggtctcatcttgcacagaaggtaaccctacatgaacaaaggtttgcagaagctaagaagaattttaaaaagatcaaccatgtgtaccctgacatgcatggttcccatgaagaggatgattccgaagtagcagcagccgagtaggtctggagcaagaaggttgtgccatgtccatgggtgagaagttctggaaaagtagaaagatttgactttgatatcaccaaggctgaaaagattatcgatttgttacttcgagagaaacagattcaacttcctgctggtcatataataccatcggccgaagagctaggcaaaagaaagtattgcaaatggcataattctggttctcacaataccaatgattgtaaggttttcagacagcagatccaggtggccattgaaggggggaagattaaatttgatgattcaaagaagccgatgaaggttgatggtaattttttccctgttaatatggtgcatacagctggaaggccagccgatcaaaggaaaattcgaggttctcagttgagttcaaccaggattatcaacaaatatcaaagaaggtatgacaagcagcaggagaggtattgtgaagaagatgatgagggtatgaggctgccatcgattgaggattgccctggatgtagtgacactgcagggggttcaagccgatcctataatagaggtaatcggatgagtcaaaagagggtacctgttcattggaggttgggtccagtaaaccaagattatcatcatgataaagatgaagataggaaaacacaatggtgtccaacaggcattttcaccaagaatcagaagagaaggaaaacaaaaaccaagcaggagtggcgcattaagagcacggtcacaacagccgatgaggttgaagccgataaagcgaaaaggttgctcaagggcaaggctactgcatctgcattggtaaacatggtttttatgctaccagcagaatttgaagccaggcaagccaatgttgatgaagttgaagaagcctctgctagattggttttgtcgccagaacaagcgatttttgagaagccagaggggacagagaatcgacatctcaagccgttgtatatcaatggatttgtcaacagggagccgatgtccaagatgatcgttgatgggggagccgctgtgaatttgatgccatatgctacattcagaaagttgggcagaaattcagatgatctcatcaaaactaacatggttctcaaggattttggtggcaatccatcggagactaaaggagttttgaatgtggaactaacagtcggcagcaagactgttcctacaactttttttgtcatcgatgggaagggttcctatagcttgttgctcggaagggattggattcatgctaattgttgtattctttcgaccatgcatcaatgcttgattcaatggcaaggcgacaagattgagatcgtgccagctgacagccaattcaagatggagagcccaaataattattttgagggcgtcgtggagggtccaaacgtctacaccaaggacacagtagatgatctcgatgacaagcaagggcagggttttatgtcggctggtgatttggaagaaatcgatataggtctagaatttagaaccaagttgatagagcttttaaaagaatatagagattgcttcgcttgggagtattatgagatgccaggacttagccgatcaattgttgaacatcggcttcctattaaaccgggggttagaccataccagcggccttgtttatatgatgctagttttattcatccatgccgatatgctgagtgggtttccaatatagttccagttatcaagaaaaatgatctaaacaaggctaccccaaaggatgagtacccaatgccggttgccgatcagttggttgatgctgcttcaggacataagatattaagttttgtggatggcaatgcaggttacaatcagatctttatggccgaagaagacatttataagacagctttcaggtgtcctggtgcaattggcttgtttgagtgggttgtgatgacttttggtttaaagagcgttggagctacatatcagagggccatgaattacatattccacgatctgattggctggttggtcgaagtttatattgatgatgtggtcgttaaatcaaaggaaatagagaaccacatagccgatttgaggaaggttttcgagaggaccagaaaatacggcctgaagatgaatccgacaaagtgtgctttcggtgtatcggctagtcagtttttgggatttcttgttcatgagagggggattgatgtcactaaaaggagtattaatacaattaagaaaattcaacctccggaggacaagaagaagttgcgggagttgatcggcaagacaaattttgttagaaggtttatctgcaatttgtctggaaggttagatccttttacacctttgttgagattgaaagccgatcaagaattcacttgggggcagaacaacagaaggctttggataatattaaagaatatcttagttctcctccagttttatatctgtcggccggtgagaagtcaattggctctgttttgatttaggagcttgaagggaaagagagagctgtgttttatttgagccgaaggctcttggatgcagagacaaggtattctcctgtggaaaagttgtgtttgtgcttatatttctcttgcacaaagttaaggcattatctattgtccaatgaatgcactgtgatatgtaaagccgatgtggttaagtacatgctatcggctccgattctaaaaggaagggttggaaagtggatatttgctttaacagaatttgatcttcggtatgagtcaccgaaggcaattaagggacaaattatagccgattttattgtggaccatcgtgatgactcaatcggcttagttgacatcatgtgccttggactttattttttgatggatccgtgtgcactcatggttgtggtatcagcttggttataattccccctcgagtggcaagttttgagtttgcccgtactattaaaccttatgcaactaacaatcaggctgaatatgaagcggttctcaaggggtttcaattgcttaaggaagttgaagccgatgctatcgagattatgggtgatttgttgttggtgatcaatcaattggcaggagaatatgaatgcaggaatgatacattgatgatctacaatgagaagtgccgagagttgatggatggatttcggctagtaactttaaagcatgtgtctcaagaacaaaatgttggagctaatgatttggctcaaggggcatcggggtacaagccgatgatgaaggatattaaagtataagtttccatgataacagccgatgattggaggtatgatccgtatcaatatttgcagaatccatctcaattggcttctcggaaattgcgttataaagctttgaaatacaccttgttggatgatgagttatattatcggacgattgacggggtgttgcttaaatgtttgagtaccgatcaagccaaggttgtgataggcgaggtacatgaaggaatttgtggtactcatcaatcggctcataagatgaagtggttgcttcgacgtgcaggatatttttggccgacaatgttggaggattgcttcagatattacaaaggatgtcaagattgtcagaagtttggaacgattcaacgatcaccaacatcggctatgaatcctattattaagccttggccattcagaggatggggtatggatatgatcggccaaattaatccaccttccagcaaggggcataaatttatattggttacaacggattatttcaccaagtgggtggaagctgttcctttgaagaaggttgattcaggggatgctatacagtttgtcaaagagcatataatataccgcttggtattccccagatcattacaaccgatcaaggcttgatctttgtgttcgatgagtttgttcagtttgccaatagcatgggcattaagttattaaattcttccccgtattatgcacaggccaatggacaagccgaggcgtctaacaagagtttgatcaagttggttaagagaaagatttctgattatcctcggcaatggcattctagattggcagaagcgttgtggtcttataggatggcttgtcatagatcgattcaagttcctccttataagattgtttatggacatgaggcagttttgccatgggaagttagaattggctcgagacgaatggatttactcaatggcaagtacttgaagaaatattatccaagtgtctgggtcaatgca

SEQ ID NO: 97902 - DNA, 554 bp, Oryza sativa
  Clone ID: PAT_MRT4530_9585C.1
aacttcctcagcctcctactcccttcccctggctgtagtgagaagccaccagtgttctcagtctatgattctgaggccctttctcctgcaagttaaggcttttttcctttcctttatcttttcacctaagtgaaatgagagggtctagctataggtggtgctctcttactccaaccatcatgacgtttcaccagtgccctcaagtgatgtccttccttcttctgattaaacctttccttccttaaaaaagagtttgggcaggttcacaatggctggctgccatgacctttccccaatcagcaccaaccagagtaaggggatttcttcagattctccccatcctctctgtgagagcctagtgcagttcctagaggaggaatcctgcaaaaagttgggaatcctactaagaccatggacccaggagcttcacacactcatacccacatatggcctccagcaatttaatcttggtactagttcatatagcatctggtgtcttcttccccagatatccaaatgttgaaaatcttcatctcgctgaagatgactctctt

SEQ ID NO: 97903 - DNA, 1158 bp, Oryza sativa
  Clone ID: PAT_MRT4530_95860C.1
gagtttgagagcttatcacatcttgcacagaaggtgactttacatgagcaaagatttgccgaagccaagaagaatttcaagaaaatcaatcatgtctatcctcacatgtatgattttgatgaagaaaatgattccgaagtagcagcagccgagtgggttagaagcaagaaggttgtgccatgccaatgggtgaggagttctggaaaagaagaaagaattgactttgatatcaccaaggctgacaagattttcgatctgttgcttcgggagaaacagattcaacttcctgatggtcatataatcccatcaaccgaagagctaggcgaaaggaggtattgcaaatggcataactctggttctcattctacaaatgactgcaaagttttcagacagcaaatccaggtagctattgaagggggaaagatcaaatttgatgactcaaagaagccgatgaaggttgatggtaatcctttctctgttaacatggcgatttttgagaagccagaggggacaaaaaatcggcatctcaagccgttgtatatcaatagatttgttaatgggaagccgatgtcaaagatgatgtttgatggaggagctgctgtgaatttgatgccatatgctacattcagaaagctgggcagaagcgcagatgatctcatcaagatgaacatggttctcaagaattttggtggcaatccatcggagactaagggagttttgaacgtggaactgacagtcggcaacaaaattgtgcccacaacattttttgtcatcgatgggaagggttcctatagcctgttgctcggaagagattggattcatgccaattgttgtattccttcaaccatgcatcaatgcttgattaaatggcaaggtgacaagattgagattgtgctagccgatagccaattgaagatggagagtccagattattattttgagggcgtcgtggagggttcaaacgtctacaccaaggatacagtagatgatctcgatgacaagcaaggaaagggtttcatgtcggctgatgatttggaggaaattgacataggtttaggagatagaccaaggccaacattcatcagtaagaacttatccccagaattcagaaccaagttgatagagcttctaaaagaatacagagattgctttgcttag

SEQ ID NO: 97904 - DNA, 580 bp, Oryza sativa
  Clone ID: PAT_MRT4530_95861C.1
ttttatttgagccgcaggctcttggatgcagagacaaggtattctcttgtggaaaagttgtgtttgtgcttatatttctcttgcacaaagttaaggcattatctattgtccaatgaatacactgtgatatgtaaagccgatgtggttaagtacatgctattggctcctattttgaatggaagggttggaaagtggatatttgctttaacggaatttgatcttcggtatgagtcaccaaaggcaattaaggggcaggctatagccgattttattgtggatcatcgtgatgactccatcggctcagttgacattgtgccttagactttattttttgatggatcactgtgcactcatggttgtggtatcggcttggttataatttcccctcgggggacaagttttgagtttacctatactattaagccctatgcaactaacaatcagtctgaatatgaagtggttctcaaggggttgcaattgcttaaggagttgaagccgatgctatcgaaattatgggtgattctttgttggtgatcagtcaattggcgggagaatatgaatgcaagaatgatacattgat

SEQ ID NO: 97905 - DNA, 1524 bp, Oryza sativa
  Clone ID: PAT_MRT4530_95862C.1
gtggatccccccggcggccggctcctccgctccttgcgccaagacgagtcgcggctcaacagcggagaggcggcgatctcccatctggcgagcagagcaggggagggccacggcgtcgtctcctccgctccttgcgccaagacgagtcgcggctcaacagcggagaggcggcgatctcccatctggcgagcagagcaggggaggggaagggatcttgttagagtggcatggctgctgaatgtggaagtggcaactgtgatgcttgggcagcgagagatccttcagggatcctctccccgtacaagttcaaccgcagggctgtacaaagtgacgatgtttccttgaggatcacacactgtggtgtttgttatgctgatgttgcatggacaaggaatatactcaacaattcgatgtaccctttagtccctgggcatgagatagcaggagttgtaactgaggttggtgcagacgtcaagagcttcaaagtgggtgaccatgtaggtgttggcacatacgtgaattcatgccgggactgtgagaactgcaatagctctctagagaactactgctcacaacatgtcgtcactttcaatggtgttgacactgatgggactgtcacaaagggaggatattctactcacatagtagtacatgagaggtattgctttaaaatacctgatggctaccctttggaaaaggcagcacctttactttgtgctggcatcactgtatatagtccgatgatgcggcataatatgaaccagccagggaagtcactcggcgtcattggacttggtggcttgggtcacatggcagtaaaatttgggaaagcctttggactgaaagtcacagttattagtactagtgaatcaaagagaaaagaagctattgaccttcttggtgcagataatttcgtggtgtcatcggatgaaaatcagatggagaccttgaaaagctctctgaacttcattattgacacagcctccggcgatcacccattcgatccttatctcacgcttctgaaagttggtggtgtaatggcactacttagcttcccaagtgaaatcaaagtgcatcctgcaaaccttaatctcggtgggcggagtttatctggtagtgtaactggaggtacgaaggacatccaggagatgataaacttctgtgcggcaaacaaaatctacccagatatcgagatgatcaagatagattacatcaacgaggctcttcagaggcttgttgaccgggatgtcagatttcgctttgtaatcgacattgagaactcgttcaagtagtatcttgatatcttcagtacaccattaatgatagaagtgtatgcaataataataagtttaaatgtcctacaagatgatgagaccatgagacagttccagaacaaaatgttccattttaagaagcaatttggttctgttttcagttattttcaggagtaaattgtattggtggtacacaaacttatttggtgggtgtaatttaatacataaacttgtttgttgggtgtaattt

SEQ ID NO: 97906 - DNA, 934 bp, Oryza sativa
  Clone ID: PAT_MRT4530_95863C.1
agcatgttggacaaaatatcaatcggttgacccacgagcaggttgctgcgatgtttctaccaaacccactggtggccaacccagcacagtcaatgccgattcagcaaacaccaccaagacagcagacggttctgccgattcaacagcagaatttgcagcatacatcggctgggctaggaacacctgacaatcggtagaggcaacatgttgtgaatcaagttatccctgaacacttggtccataatgttcaacaggatcaatcggtgttgccccaagttattcctgagcatttagtgcataatattcagccgaatttccagaattattatggaggtaatttgagctatcagtaccagcctccattgcctcatgttcagtatcagcaaagaggatcacctcagccccaatttgctcctcaatttaatcagttcgagccgattccacagcagatgcaaggagtaccccagcagagaccttgggccgacatgattgcagatgtgatgaggaagcagtttgggctcaagccaaaggactatggaaacctgtatcagcatccataccctgagtggtttgaaagggttccattgcctggctgatacaaggtaccagacttctcaaaattttcagggcaaaacaatgtttcaacttatgaacatgtcagccgattcttggttcaatgtggcgaggcatcggctattgacgccttgagagttaggttgtttcctttatctttgtccggatcggcgtttacatggttttcttctctaccatataactctgtcaatagttgggccgatttggagaaacagtttcacagctatttttacagtgaaattcatgaaatgaagctatcggacttgacggcaattaggcaaaagcatgatgagtctgtgcagcattacattcagagggtcaaggagatgaaggataatgc

SEQ ID NO: 97907 - DNA, 585 bp, Oryza sativa
  Clone ID: PAT_MRT4530_95864C.1
atggcgatcaatctatcccaatcacttgacttaaatatatatcgacttaaggattatgatcaaatcaattggcacgctcatgaacctcaaaggcaagatttttggacctgcactggagttaagcagatctcccaggcctcatgtttttcgcatcaacacgcttttggcaagcccagtgggaccaagttacgacaattttctctcatggctgaaaaaccaccacagtcaccatcatcagcaacaaagactgtggtccctcctcagaccaagattccaaagcctacgggaaccaatgaggctgagaacgcacaacaacaattcatgaattcattcacagagactcggcaagggagagttgttcaaaaatacaagttgaagctagttgctgatgtccctggaacaggtccttctaaagatggtgaggtgcaaaaaactcaagtcagcacagatgattcaggcagcaaaggtactacagatggattgggcgacaaaggtgatgggctccaagatggcttggttgaagatcttggtgaaaataagcacaaaagaccaattgcagttcaaccactttccaagattgaatag

SEQ ID NO: 97908 - DNA, 516 bp, Oryza sativa
  Clone ID: PAT_MRT4530_95865C.1
agattattacaatcttttctcttattggcttgcaacgaggtaaaagcttgggggattggtacgcggagttctgttggttctcgggggggctatggtgagcctgcgacgaccagctccatgtataccgccttgtcgagctttggcgagcagcaataggctatgatgacttactcactgccagactgtgaagcattgcggaggcgccaatgcgacggtcgcggcgcagccagcgctgcgcaagaccatgtatgggatgactggtggcggcgctcggcgcgcgtcaatcacgtctgctgcaggcgcggggcgctctatcacatgctgggaggcatctacatacagcctgggcgccaccgaggccaggctaccgatgggcgaggtgttacccgggtgccggagaggggacttgcagcccgcgccgggaagcctcctcgcgttctgcagcggggacatgcgcaatgcgcctggggggggctgcttctggcttgggtttcctaggaccccaagaaccggact

SEQ ID NO: 97909 - DNA, 537 bp, Oryza sativa
  Clone ID: PAT_MRT4530_95866C.1
aagggaacttagaaacccagtttgataattttcctatatacatatacatatacatatatacatgtatatgtatatacatatacatatatacatgtatatgtatatacgtatatatatatacatatatacatatatatacatatatacacatatatacatacatacatacatatacatatatatacatacatatatggacctattgctacatggttgattatatatatatatatatatatatatatatatatatatatatatatatatatatatatatatatattacaatacatatatatgcattgtaatatatatattatgcatgtatatatatacatatatatatatatatatgcctatgtatatatgtataaatacatatattacacacatatttataatttaaagcacttaacattttgtgtacatatatgttaccaaaatatatattgacactaaagtaaatatacgtacatatataaatatatatatatacatgcatgtatagtacaattcatttgctcgctagctatagct

SEQ ID NO: 97910 - DNA, 225 bp, Oryza sativa
  Clone ID: PAT_MRT4530_95867C.1
tttgttgacgctgcaacagtgtggaatactaaatggaaacaaagtaaagcagattatccaatcttacctgactttggtgattacaaacgcgtgcgagcctctgcaggtattgcattacaatggcaatcacctattggcccattatcattttcttatgcaaaaccaattaaaaaatatgcaggagatgaaatagaacaattccaatttacagttggcagcacattc

SEQ ID NO: 97911 - DNA, 1725 bp, Oryza sativa
  Clone ID: PAT_MRT4530_95868C.1
atggccatggccggcgccgacgggcccaccgccggcgccgcagcggcggtgcggtggcgaggcggcgagtccctcctcctgctgctgctgcggtggccgtcgtctgccgagctggtggcggcgtggggcgcggcgcgcgcgtcggccgtggcgccggcgctcgcggccgcgtccgccgcgtgcctggcgctctccgccatgctcctcgccgacgccgtgctcatggccgccgcctgcttcgcccgccgccgccccgaccggcggtaccgcgcgaccccgctcggcgccggcgccggcgccgacgacgacgacgacgacgaggaggccggccgcgtcgcctaccccatggtgctcgtccaaatccccatgtacaacgagagggaggtgtacaagctgtcgataggagcagcttgcggactatcgtggccgtcggataggctcatcgtgcaagttctggatgattctacggatccaacggtcaagacgtggtatgataggctgaggaaaacgctggtgcagcaagcacatcctgcacaggcggatatggatgtacatcaaagcacaaagagaaagaataaggaattgatgacaagagtgccgatattggagtgtgactccaaccatggtcttgcaagtattatctcaagctatttaattgcagtgggtctggtggagcttgaatgcaagtcttggggtaataaaggcaagaatgtaaaatatgaggtgagaaacacccggaaaggatacaaggctggtgcactgaaagaaggattgctgcgtgattatgtgcaacagtgcaattatgttgctatatttgatgctgatttccaaccggaacctgacttcctcctgagaacaattccatatcttgtgcgtaatccacagattggccttgttcaagcacattgggaatttggaactgctggtgtttggagaatttctgcccttgaagaagctgggggatggaaagatcgaaccacagttgaagacatggatttggcagtcagagctggtcttaaaggatggaaatttgtctatcttgcagatgtcaaggtaaaaagtgaacttccaagcaatctgaagacatatcgtcatcaacaacaccggtggacctgtggagcagcaaacttattccggaaggttggagcagaaatattattcactaaggaggtaccattttggtggaagttttatttgctctacagcttcttttttgtgaggaaggttgttgcccatgtggtacctttcatgctctactgtgtagtgatcccgttttcggtcctaatccccgaggtcactgttcctgtttggggagtggtttatgtcccaacaacaataacacttctacatgccattagaaacacaagttcaatccacttcataccattctggatcctctttgagaatgtcatgtcgtttcaccgaacaaaggcgatgttcatcggcttgctggagctgggtggtgtgaatgagtgggtggttactgagaagctcggcaatggcagcaacacaaagcctgcatctcaaatactggaacggcctccctgcaggttctgggacagatggacaatgtcggaaattctgttctccatcttccttttcttttgtgcgacctacaacttggcgtatggaggcgactactatttcgtttacatatacctacaggctatagcatttcttgtcgttggcatcggtttctgtggaactatcagctctaactcgtag

SEQ ID NO: 97912 - DNA, 1295 bp, Oryza sativa
  Clone ID: PAT_MRT4530_95869C.1
aaatagaatgtcactgatgattaagtggagggacgatgggtagaccattaagcatcacggtcacgatggcgggaccgcgagcggcggcgtcagcggcggtggcacactatccccgcgagcggcggcggcgcggtgccctcccctcgcgaacggcggcgtcggcggcagtggcgccctccccccgcgagcagcggcgtcggcgacggctcccccaccgagcatcggcggcgcggcgccctctccccagcgagcggcggcggcggtggcggcggcgggagggccggcgacgccctcccctccgctagatcgagggggaggagaggtgcggcggcgggtcggacggcgtggaggcggccggccggacctcgcctccgccacatccggcggcgctgcggctaggacggcgtggaggcggcgggccgggcctcgcctcctccagatccggtggcatggaggcggctgcggcccggcggggcgtgaggggcggcggcccggacagcgtggaggcgggcgatggtggcggtggcgccgagggcggatccggcggtggtggcatcggcgacgtccgcgggtggatcccgcggcggtggcggcagccgagggcggatccggtcgcgaaggacgccgtggcggagggcgaggacggcgacgcggtggccggcgaggaggaggaggaggagcggcggcggctaagcgaggaggagcagcggcggcggccgtgaccggccggtggagggcgccgaggccagtgcccggggcgaatggcaggaggtggggccctgtcggccaggctggcggcgcgccgtggtggaggggcgtggcggaggggcgaggacggtgacgcggtggcaggcgagggaggtccctagggtcgtcgggcggcgggggtggcggcgggttggcggcggacgcaggcggatccgaggatggtggcgacgtcgacggcagttgcgggcggatccggcggtagcggctccctccgccccctctcgcctttctcgcgcgcccggagctctccttccgcgggtggcaacgggcggcagcgcctctccgcccctcgcctcctctccctcgccatggggccgcgggagggctcacggtggcaggcggcggcggctcggtatcccagatccggcgtcctggatggctggatccagcgcgagcggaaggggaggggaggtggtggtggcctgggaacaaaaggatggtactgctcctgcagcaaacatcgaacagatcaagcaggcatcaacggcttcggccacggcggcggcgacaacctgcttctgggatga

SEQ ID NO: 97913 - DNA, 2706 bp, Oryza sativa
  Clone ID: PAT_MRT4530_9586C.1
gtcgtcctcccgtcgttcccggtcgtcgtcgtcgtcgtcctcccgtcgttccgggtcgtcgtggcgttcgtccctccgtaaagccgatcgcgttcgccgcccgtggttcatcaagcgagccgctccagccccgtcatcttcgtcctcgcctccgtgtcgccaagcgttgcgccggccgcgtctcgcccgtgtactggtgtcggtagtcgttcgcttgtgcgtgtagtgtccgtgttagtgtgcccgctcggtagccgcgtggtttccacgtgtgcagcccgtgtggtgtctagtggagtccatttgtcgaccgcttgcctcggttgacacacgggatccgcttccttcgacccgtggaacgtctctgtgtactcggttttctttttatgtattgttattgcttctttataggcttgtagctttgcttgtgtgcttcgcgtagcttctgtcgttccgaaggttctcgaagcgtggttcgcggtcgtcgccgaaggttcagaaggccgttctctctcccccctctattcaaaactcccaaaatggttttaggctgggctcgaggtgcagggttttgctagtagcacctcggccactataaggaccggttttcgggcctctgttgcaaagcactaccgtactaaccacatgtctaatgggtaaggcttaactcggtgctcagtctagtcctgaacaaaaggacacggatagagatggatgaagtcgttgcgacgatggatatctctgaggcaaatgaaggctacgcgagctgtggctcggtaatcgagatgtctaggcaaatgaaggctacacgggtcggtgcccgggctcaatcctggcctgcctgtcccgggataccggccgtaggcagggttggatcggtacttttgttcacggctaggatgggtaaagggttatgtcacgttttttatgatgggttccaattgcaatggaatgcagagtaaaggcgtgtcttgtgggttggcctgggttggcttgggacgagctgggacccaggtcgggttgccagttcggtccgaatcatcgtaggccttgggttaaggcagtactaggtggtcagctttgcgaagaagaagatgtcgtcaattgtctgccgaagctccgcaagactgttggatctgctagcgaagcgagggaagcagtgaagccagatgtgaagcaggagaaaaagtgtagctctgttaaggtcctatccttagtttctgatctgtctctcccctttgtttttcctctctccctctccaaaacctgcaacagatggcggataatgagaaaggcaataaggtcagaagtcaggaaatgggtacctcaagctcccgagtgaatgaagcaccagacaccaattgtgtggcagtggtccaacacttgattaaccagaacaaattgcttatagagatactacagcagcatcggatgccaattctgaacccgagtcagatgcaacctcaggcgcagttggaggcaatccaagcactcacaccacaagtcagcgcaccgccaacatcccagaaggcccctcatgccatgtcacatgttgactcaaaagaagcaagtatcattggttttatgtgtgatgaacaagggcactatgcaaggaactgtcctcagcagaaaagaaaagcaccaatgcgaaccgaagatgaagtccgtaagatgatcattaccagtacagaatggcctccaccaggaatgacaaaacgtcagagaagaaattccttccgaggtgcaccatagttgacagagcatcttttagctaatggaggtagagtgtctgatagtgaagattcagatcaagtctcctcagatgatgaagatgagaagtctccccaagggttcaaccagaataaaatggaacataaggcatgctctcattgtggagaaatcggtcatgttgccagctcatgtgccactacctgctttcattgtaaggaagaccatccacccggcgagtgccccatgagcaggatcacttgtttcttgtgtgaaggaactgatcatgtaccaaaagattgtcaactcagttttctgctgacgaagaagatggccaaccaacatgcccgttctaatggagagaagcatcaaggcaacaccaatcctcgccaagattacagtttcagcctaactccagtgccaggacagaggaatcaaaatgagaaaagaaaatactgagtccggaaagatatctgttgcttcaattgtcaagaaatgtgtcatttcactgacaagtgcccaaaaccgagaaacatagctaccagcacgtcagtccacgcaactccccacaatcagaagcttgctcctcagcgaattgtcatccatgcatcccgaagcattcctatagcccgcgttgcaacagctccaactccagtgattgcactaccacaaggtgtcaatgctcaatttcagccccagccaccagttgacaagacagaggccagtatttgcgttgtacctttggatgttccagcacagcagccaagaaatcaagtacaagatgaagaacccgagcgtaaaaaagttatagtctatttcaactgtagagaagaagggcattactcgagggactgtcccctaccaaggcaaaatcagcccccacattttcgccaatttacaggaagcagacataccaatcgccaagtggtcactggagcaaatgcagtacctgttaagcctagtgctagtcaaaagcaa

SEQ ID NO: 97914 - DNA, 864 bp, Oryza sativa
  Clone ID: PAT_MRT4530_95870C.1
atgcctccgcttcgccgccgtctcctcctcctctgcctctacgtggccgcggcgtcccgcctcgcgccgtgctccacggcggcggcattgccggacccggcgccgctcgacccggcgctgatcttcccctcggcgaccccggcgcagccagggagcgccacgatcccggcgttcccggagcagtcggacgccgcgtctgggacgtcgtcgacgtgcccgctgaccccgtccccgtcgctcctcccggccgtgacgtcctcctgcgtcgacggcggcggcgcgctgaccacgaggctgcgctgctgcccgccgctggccgcgtggctgtttgcggcctacgcgcccgcggcgctcgcgcagaggccggccaagtcggcggccgccgcggccgtggacatgcccgtgccgcccgacgactcggaggcgtgcgcgggcgccgcggaccgcgcgctgcgggcggagggggcggcgctgcctcgcccgccgggcgccaacgggacgtgcgacgtggcgttctgctactgcggggtgaggctgaggaggctgacgtgcggcccgccgccggcggaaggcgggcaatgggctccggcggacgcggcggcgaggaggctggagaaggactgcgcggagccaggcgtccccggctgctccaagtgcctccgcgccctgaccacgtcctgcacagtgaacaggcaacgccgatgttctcatcacgtatatattactataaaaatcatattagtcactcacgagagtgataatactcatttgagccatgactgcattgcgccgttgcttcttagcaatgctcttcttggagacatggcgtttaatgaaagccatggacaggaggggagccactag

SEQ ID NO: 97915 - DNA, 174 bp, Oryza sativa
  Clone ID: PAT_MRT4530_95871C.1
gggtggtttacaccccacaaatcattccttcattcattaacagtcaaataacaacaaaccaagaaccaacaaatgtcattatcaggcacaagctgtggctggttcttcctccccaagttcccaaccataccggaggtattccaacaaagaataaaaagacacgtggcacgaaaa

SEQ ID NO: 97916 - DNA, 462 bp, Oryza sativa
  Clone ID: PAT_MRT4530_95872C.1
atggctattccggtggccgtcagcgaggtccccacggagcacttcgtgagggacatcggcgcagccatgggggttcgcttcctggcgtgcgaggcgacctactacaatggggatctcgtaggtggagctcttatccccaaaccagcagccaaccatggggcaaactggatcccaagggatactgttttttgtttgataatgcatatgtcagcacgatatattttgttgaattcgttagaactgttcatggaaggtagggatggtggtggtggagcaggggggagggacagtttctcagcgaactctgcaagcacaagttcagccaagaaaagcagaatagataccagtatggtgtcctgggactggtaccggcatcttggttctgtaggagttggttgggaccgatttctacgacgcaccctctctgatgtcactgttaagtggtgccagagcggggtgtga

SEQ ID NO: 97917 - DNA, 1559 bp, Oryza sativa
  Clone ID: PAT_MRT4530_95873C.1
caccccctctcctctcacactatcaattgctcttgtcatctctgatctgcctgccgctgcgccagctgcctcctccgatctctctctcactctcacacacacgtactagctagcaagtgcacacagacaatgtgactctgtgagagatctatcgggcatggaggaggagagcagcacgctcatacggcgccggactagtttgccggcgaccacggtgatgatggtggtcctcctcctcctcctctgctgtaactgtggtgtcgaggtggtggtggctacggctgatgagtcgtctccggcgccggtcggcaaaggaggaagtgatcatggcagttgccccggcggcgacggcgacggcgaagggtacaggaagcagctgtgggtgtttggcgactcgtacgcggacacgggaaacctgggtaaccttgggagggagctgacccacgcctggtactacccctacggcatcaccttcccgcgacaccccaccggccgcttctccgacggccgcgtcctcaccgacttcgttgcttcggccgttggcatcgcgacgccggtggcgtacaagctgcggcggcgcggcgggcacggcggcgaggtggcgtcgcgcgggatgaacttcgcggtgggcgggtcgggcgtgctggacacgggctacttccagcgcaacatcagctcgcagatcgacctgttccagaagcagctgcgcggctgcggccccaccggcgtcgcgctcgtcgtcgtctccggcaacgactactccgccgtcgtagacaagaacaacggcacaagcgaggcggcgatcgcgtacatcccgacggtggtgagggggctgcgggagcaactccggcggctgcgcgacgaggtagggatgaagaaggtggtggtgaccaacctccaccccatgggctgcaccccgtacttcacgcggctgctcaactactccggctgcgacacgctggccaacgccgggtccgaccagcacaacgccgccctccgctccgtcctccacgacctcgaccccgccaacaccaccttcctcctcctcgacctccacacccccttcctcaacctcatcaccgccgccgccgacgacaagttcccggtgcggctgcggccgtgctgcgagacgttcacggcggacggccactgcgggcaggaggacgaagccggcaacaagcagtacacggtgtgcgacgacccggagcggcacttctactgggacgacgtgcaccccacgcaggccgcctgggccgccgtcgcccaagccttcacccccgccatccaccgcttcctctccacctgaacgaacgaatgaatactcaccaaccagctttctcatttccgacgaaattccgcgaaatttcgacgtttctatatggctcggaattaagtttcgattcgaatttcgaaggttaaacagtagatttgatcgaaattcagtagatttgctccttgcacttcttcttcttcttcttcttcgtcttcttgaacaactttttttggggcctatctaatttattattacctttggatgatgaaaaaaaaaaaaaaaaaaa

SEQ ID NO: 97918 - DNA, 230 bp, Oryza sativa
  Clone ID: PAT_MRT4530_95874C.1
gcacgaggcctcgtgccgaattttttttttaacaaatcagatgtatcttttgtatgcatgggaaatttattagtttctatcagtcgtttatctgatagaagcttgactgaacattgaacagttttagtctgctggggttatcagtcagttccattctcttggagctgcattttttcagtctgttttatctgtttgattatctgaactccagcagaaattgcattggttct

SEQ ID NO: 97919 - DNA, 339 bp, Oryza sativa
  Clone ID: PAT_MRT4530_95875C.1
atgtggctgacacggattgggagacgccgtggccggcgagctccggctgatgcggatcaggaggcggcacggtggagttgctttggtggtgatgcgatggatcccaacgatgatgctcataggtcgctggagagcgtgggaggggaatacacgaagccacggagtgatgagatgatgacctccacaacgcggcgccccgcctttctccccacgccgcactccctcaatggagacgaagtccgtgtgcccaattttgacttcatgtgcttcgtttggctccgcggggacgaggtggtcgctgctgatgttgacactcaacatagttgtcgtggcctctag

SEQ ID NO: 97920 - DNA, 1196 bp, Oryza sativa
  Clone ID: PAT_MRT4530_95876C.1
ttggaatctatgcatgtgacacatatgactttggtgattcattattgatcatacttcaagtggctaagtgtttttgatgccttgatgtttattgtttcaaaagccacttgagttagtattcatctagacatattagttggatgttataatttttcgtatgtctaaaaataagaaattttggtccaataatttgatacaccaagcatctggctataatatgaagaaaggagtattttttatactagaaaagtcggagtcaaaagaaaactagagaatccctttgaatagaatatttgaaagatcctagtcttagggttgatcggaaaattcggcggcaagtgttcaaatatactttgcttgatagagagttatatcgccgaaaaatagatggagtaattttgaagttcttagataatgatcaatctaaggttgctatgggagaagtacatgaagggatttgtggaactcataaatcggcccgtaagatggattagttgcttaggagagttggattctattggccaaaagtgattgatgattgtttcaagtactatagaggatgtgaagtttgtcaacggatcggcaatgttcaattagcgcttaccgctgtgttgaatcctatcattaaaccatggctgttccgaggttgggctttggattttattggtcaaatttatccttcgtcatcaaaggggcaccggttcgtgctaattgcgatgaattacttcaccaagtgggccgaagccgtgccgttcatgaattttatttacacggaggccaatggataagccgagtcgagtaataaatcattgttaaatttagtcaaagagaagattaaagaacgtcaaaagaagtggcatgaagtgctttcggaagcattataggctcataggatatctaagcatggtgctaccgaagtcactccttttgagttggtttctggacaaaagccattttgccagttgaggtaagtcttggctctcttcggtatttcaagtaagacgacttgtcggttgaagattaaagaccatgatgggaggtaattttgaagacgtcatcggtaagtgtttgaacactttgaaagagatggaggcactttaagatggtgttttcagagagcaattaataggaaatacttgaagaaatacttagcgtttggcaagatgcttaggaagtggataaggagacttggaggg

SEQ ID NO: 97921 - DNA, 549 bp, Oryza sativa
  Clone ID: PAT_MRT4530_95877C.1
atggcggcgcatctagctggcggtcatagtgcgcctccgtgtcgttcggcccaaacacccgacgcagaatattcgcctccacatcgatcacccgcggagccaaacgaagcacatgaagtcaaaattgggcacacggacttcgtctccattgagggagtgcggcgtggggagaaaggcggggcgccgcgttgtggagcgcaaaggcaacagaagggagagagaagcgatgacaagaaggcggcggaagggagaacgagagtggcgggcagaagtggagcctaccagcgacctatgagcatcatcgttgggatccatcgcatcaccaccaaagcaactccaccgtgccgcctcctgatccgcatcagccggagctcgccggccacggcgtctcccaatccgtgtcagccacatcgccccttaatccacgccgccaggagctcgctgggcgcaccacccctgggtccgtgccggccggagctcgacggccacgccgcccccctaagcgagacgggagaggtagtggtggccacttgcatcagccggccatga

SEQ ID NO: 97922 - DNA, 330 bp, Oryza sativa
  Clone ID: PAT_MRT4530_95878C.1
atgacgaagatgattgaagcactcggctttggagaacgtcctggggttgccctagggcatacactcctttgggctaagcccacgacacaattacaaggcccaaaactcaaaatcagattcggactggatgagcaattacgttctgttagttcaactagagctaaagagaattgttccactaaagctttaccatatgaccacataactgcaaagcaatcaagcattgaaagctctgtcaaaaggcctagaactaactgtgtggattcaattttaccacctgataaagccaaacaggtaagaaaacgtagggatacaagttctgcccagtag

SEQ ID NO: 97923 - DNA, 325 bp, Oryza sativa
  Clone ID: PAT_MRT4530_95879C.1
cccacgcgtccgacttgagttcttgaggatttggccaaatggatagaataccaccgatgaggctattgtggcatatatagtcaatcacccctgtctccaatcttattcagagaggatgtcacattctgagcatctagaacacatatatcctatacatgctgcacattctacaacagacatatctgctctggcaacatttacttggcgcgacaaattctggaggtcccagaattacatcttgcgtttattgatggtcccaatggaagagcatatttggtacatggagtgcggaatgatctaaatcctttgcatactaatgatccaa

SEQ ID NO: 97924 - DNA, 1374 bp, Oryza sativa
  Clone ID: PAT_MRT4530_9587C.1
atggggaagaaggcacgcctcggcttcgtcgccaccatagcctcactgttgtccgccgtcgctcgcttgcatcatccacccatgttcgctgccaccgccgggaaagaatgccttggcttcgtcgccgtcgggtcgagtgcctcagtcggcaagatgggagatgagcggagcggaggaggccacctcggccggcgtaatgatcggagtggaggtggcacaatggtgaggggggtgggcgcgatagcgagggaggctcgacggcgcatgactgtcgaggaggacgaggccggcgaggaagagcaaggatccaagccagcatctcagattgaaggaaaggagatggagtctctccctgtgccgagtgttcagtcaatggtggcggctgacggtggtgcccatgtgccacccaggtacatccgcccgagagacgaggcagttgctactgatggagagacagagatccctgtcattgacttccagaggctgcaactcggccatgacgaggagatggcacgtcttgacagggcctgccaggactggggctttttccagctaataaatcacagcgtcccagaagatgtggttgatgggatgaaggccaacgcccggggattctttgagctgccagcggaaaccaagaagcagtttgctcaggagcgagggcagcttgatggttatggccagctgtttgttgtctcggaagatcagaagctcgactgggctgacattctcttcctcaatacgctgccagtgcagaacaggaatttcagattctggcctaaccaacttgctaaattcagatcggcactggacaaatactctgctgctgtgaagagcatagtggatttcctcttggttacagtggcgaacaacttgggagtggatccagaggtgattgcgaacaaatgtggcactgatgggatccaggcggtgaggatgaactactaccctccgtgtgttcaggcggacaaagtcatcggcttctctcctcactctgactctgatctattgacccttgtcctccaagtgaatgaggtggatggcctgcagatcaagagaaacgagacctggtttcctgttaggcctttggaaggcgctttcattgtcaacgtgggagacattcttcagatattcacaaacgggaggtacaaaagtgctgagcaccgagctgttgtcgacatgaagaaagagcggctgtctatagcagccttccattctccaagtgtccatgctgtcattggtcctctgaaggagatggtggcgcatgaacatgaggctgtttacaggagcataggccatgatgagtttatgaagctcttcttctcctccaagctggaggggaagagcttcttggacaggatgaagaagctctaa

SEQ ID NO: 97925 - DNA, 299 bp, Oryza sativa
  Clone ID: PAT_MRT4530_95880C.1
gggaaacttaaactagtgagggatccttatcagctattagagaggtaaatatcatattttctcatcaatgtattgattgcatcctgcaaatagttcagggaataggtatcgttgaagtaaattcaatagttgtggctgctatggattctccatctaatgtataaagacctaagttggataaattgtcaaagttttatctgagcaatggcatttatagtctgttctctaatagcactgttatgtcacagattcttgtggagaaagaacgttagcttcgctatttccaggcattacagacg

SEQ ID NO: 97926 - DNA, 2232 bp, Oryza sativa
  Clone ID: PAT_MRT4530_95881C.1
gcttccattatttcaacagtttattacaagtgatagcatggtctcattctcatactctgattgtcaaattctcaacatgcttacaatttcttctaattatttgataaccaacctgcccggcctgccacgccgcgggacggcgccgccgcgggggcggtggagcgcgtccgcggcgtcggcggcgtcgcggggcgtggccgcgaaggcggcgaggagaggggtgagggagtacgtggaggcggcgcgggagatggtgcggcggccggacggcggcccggcgaggtggttctcgccgctggagtgcggcggcggcggagggcggctgcccggcgcgcccacgatgctctacttgcccggaattgatggagttggcttaggactgatccggcatcatgagagattagcaaagatgtttgatatgtggtgcttacatatacctgttgaagattgtacgtcctttgaaggactagttgagtatgtggagagtgcagtgaaatcagagggccagagagcaagagacagaccagtctatctagtcggagaatccgttggagcatgcattgctcttgccgtggcggcgcgaaatccagatatcgatttggtattgatcctagtcaacccaggaacatctttccataagtctcagctgcagtctctctcagtcttcttggatttggtccctgaaccgttccatttaaccacaccgcagttgctgaatttcctgacaggttcggttaacttctctatgagaatatttatgacttgtttgatggataaatgattttattttactcaactggggaagaaatgcagtctttgcttgatgttctgccaaaggaatctattgtttggaagttgaaaatgctgagaacagcgtcatcatttgtcaattcccgtttgcatgcagttaaagcgcagactttggtgcttgctagttggaatgatgaactgctaccaagccgagaagaagctgaaaggctacgtgacgctctagagaaatgcagaatccgtaatttcaaagacaacggtcacaaaatattgctggaagctgaatttgatctggcaacggccatcaaaggagctgggtactatcgccgctcgttggagacggactttgtttcggactatctgccactgactcctgatgaatttcagaaggcaactgatcacatcaggatgttgcagtacatagcaaacccagtgatgctatcaacactgcctgatggaaagattgtgaggggtttgtcaggcctacccaagcaaggtcctgcagtgattgttgggtaccacatgctgttggggtttgagctcggacctctggtgaccggagtgctgagaagctctgggatccacatcagaggcttggctcatcccttcatgtttgacaagaagaaggagaagatcatgccggatccgtcctactacgatatgcatcggatcatgggcgccgtgcctgtcaccgcaggcaatttttacaagcttctcgcggagaagcacttcgtgttgctgtacccgggaggcgcgcgagaagcgcttcatagaaagggagaggagtataagttgttttggccagagcagtctgaatttgtgaggatggcatcaaggtttggagcaacaataataccatttggagtagttggagaagatgatatatgtgatatgttgttagactacgacgatcttatgaagattccattctatgacatccttgacaggatgctaaatgaagatggtgtgaaactaaggactgattctaccggagaattaaaatatcaaagaatccatccagtagtggctgccccaaagataccagggaggttttatttcatctttgggaagccaattgaaacaagagggagagaaaaggaactaagagacaaagagaacgcccaacacctctacctgaatgttaagtccgaagttgagagctgcatgaagtatctaaaggagaaaagagagaaggacccttacaggaatatactcgccaggcttctctatcagatggttcatggtcttgatgcagaagttcccacatttgatccgtgagaactaagatggtcacttgcagaattagataggagtacattcaagtcaattgtttatattgtttcatgcatttttgtttcacatagttatcagtttttttctctcagcaattctgcttgtcaatttgacggcaatattcagaccatagaggttaataaaattcagtttacaaaaaaaaaaaaaaaa

SEQ ID NO: 97927 - DNA, 1173 bp, Oryza sativa
  Clone ID: PAT_MRT4530_95882C.1
atgaccatgatcctcaggctgcagcgggagaaggccgaggcgatgatggaggcgaggcagttcaggcggtacgccgaggagaagatgtcgcacgacgccgccgagctcgccgcgctcgaggacctcctcgccaagcgcgacgccgccctccgcgcgctccagtcgtcgtcctcctcccgcggcggtggcggtggccgcggcgtcggcggcggcagcggccgcgccaccccgtcgttcccgggctcctcgccgcaccactacccgtccacgccgacgccggcctccgccgcggcggccgcgaactacccgccgctgcggtgcttcatcgaccacccgccgacggcgtccgaggcggacgcgctcgacgcgcagaccccgcgcgagcacctcacccgcctcgcccaccgcgtccacatgctcgagcggggcgtccacccgatggcgaccaccaccaccaccaccccgatcatccgcgtcgcgcctggctccgccttcccgcgccccacgcgcgcctactccgacgccgacagcctcgaattctgcgacggcgagtacttccccgacgacgtcgactgcggcgccagcgaccgcgtctacaccgtcgacgccatccacggccgcccactggccgtccccgagggctcgtgcacgccgggcgggagctcatgctgcggcggcggcggcgtgccgtgggcggaggacgaggagatgcgccgcctcagcgcgcgcctccaggcgctggaggccgacagggagaccatgcgccaggccatcgtctccatgggcgccgagaaggcgcaggtcgtgctgctcaaggagatcgcgcagcagctctgcaaggaggccacgccgccgctgccgccgtctgcggtgaccgtcggccaccacctctacaagggcgccgccgcgccgccggccgtcaccgtcaagatgcggccgccgaggccgccggtggtgatgcacaggagggtgatcgacgcgccgccggctgcgaagacgtcctacattggtgctgtggccaagtggttcacatcgatcgtttcacggtataagaaaacaccccgcaccaagtacccaattggtcagtgtggcaacaacgtcggcttgctgctgctgctcgacaaggctcccaggccagggcacggccaccagaagatgcccaagaaaatttag

SEQ ID NO: 97928 - DNA, 711 bp, Oryza sativa
  unsure (1)..(711): unsure at all n locations
  Clone ID: PAT_MRT4530_95883C.1
ggcaacctggccagcgtggtggtggcggtggacgggagcgaggagagcatgaacgcgctgcggtgggcgctcgacaacctccgcctccgccccgacggcgcgctcgtcgtgctccacgtccagccgccgccgagcatcgccgccgggctcaaccccggacccatccccttcggcggcccgagcgaggtggaggtgccggcgttcacgcaggcgatcgaggcgcaccagcggcggatcacgcaggctatcctggatcacgcgctcaagatttgctccgagaagaatgtggaggtgaagacggatgtggtcgttggggatcctaaggagaagatctgcgaggtgacggcaaatctcaaggccgatctgctcgtcatggggtgccgtgcttttggccccctcaagagaatgttcttaggaagtgtgagcaactactgcatcaacaatgtggtctgtccagttgttgtaatcaaaggcacttgagccatcttcgatcagtattctttgctgcactttaagtcaagcctctgaggttgctactgcgctatcatccgtaatggtactgcatatttcacatttggagactagtttgttgtgcatctttttgtcacatggtggtatttacggatgatagttgtcgcgtgcatttgagcaaggnaaatatgtattgattgttcaattgtagaaataaatgtgccatgtagcacattgttt

SEQ ID NO: 97929 - DNA, 538 bp, Oryza sativa
  Clone ID: PAT_MRT4530_95884C.1
cgacgatcttatgaagattccattctatgacatccttgacaggatgctaaatgaagatggtgtgaaactaagaattctttggaagaaaaaatgatctgatctcagtttacctcttggtttcataggactgattctaccggagaattaaaatatcaaagaatccatccagtagtggctgccccaaagataccagggaggttttatttcatctttgggaagccaattgaaacaagagggagagaaaaggaactaagagacaaagagaacgcccaacacctctacctgaatgttaagtccgaagttgagagctgcatgaagtatctaaaggagaaaagagagaaggacccttacaggaatatactcgccaggcttctctatcagatggttcatggtcttgatgcagaagttcccacatttgatccgtgagaactaagatggtcacttgcagaattagataggagtacattcaagtcaattgtttatattgtttcatgcaattttgtttcacatagttatcaagttttttctctcagcaatt

SEQ ID NO: 97930 - DNA, 362 bp, Oryza sativa
  unsure (1)..(362): unsure at all n locations
  Clone ID: PAT_MRT4530_95885C.1
cgagtgcgcgcgcgcgcgagtgatcaaggagaagaccagaggcgccgccgtcaccgtacgtcgagccagccgcgcaaccacccatgccgatgccggcgacggtggcgggagcgccgcggcccctcctgcccggactgccacgccgcgggacggcgccgccgcgggggcggtggagcgcgtccgcggcgtcggcggcgtcgcggggcgtggccgcaaaggcggcgaggagaggggtgagggagtacgtggaggcggcgcgcccaccatgctctacttgcccggaattgatggagttggcttaggactgatccggcatcatgagagattagcanagatgtttgatatgtggtgcttacatatac

SEQ ID NO: 97931 - DNA, 526 bp, Oryza sativa
  Clone ID: PAT_MRT4530_95886C.1
ggtcaaaactaatctcttttctttttccatttcctatatagccttatttgtacatgtacaacattacattttctttagtttagatacaaaagttgcacggcaaccgggcagattttatgtacaacattcacccgggtgctccgattctgtggtcaagtatgaactatgaaccacgcatctctttatctaagtgttcctccatgtctagaatctaccctctcagtgagattatcatagcatatcctgcagaaaagaaagagatgtcgcattgtgatttagtatcattcatcaagagatgcaaaattaagcaggttccagccaacctgccaaaagatcagcatgaccatatcaacacgcctgaaaagagaatgaaaagaatacaattgctcatccataccatcaggaagattcacagcttgaatcgttctcagattttcttgaataagttctcacttttcttgagaattccttaactaatgaattatctgcaaacgtcaagggatccaattgctgaagagacacccga

SEQ ID NO: 97932 - DNA, 2164 bp, Oryza sativa
  unsure (1)..(2164): unsure at all n locations
  Clone ID: PAT_MRT4530_95887C.1
ggctgcaggaatcggcacgaggcattttcttcttactaccatttcaattcaaccatgaatgaaaaatgtgaaaattttgtgtcggtgaggtgtgtgatttagcaggagagagagatttggttgatttgtttgcaagaaagaaaagcaaaaaaattgtggggtgttgtggccgttgatggacaggcaagtttcaccacactcctcccgccttctttaaaccctcctcaccaaccatctcatctctctcaccatttcattttatttttcatttttcaccacaaatttttcaccattccaagcaccacaaaaaccttgttcctcctcctcatctctctccatttctccccatatcttgattgagcttgttgagattccccatgcacattcctccctccatttccaccaccaccccaaatcttgttgggtgatctatctatctatcatcttcttgtaggagtactagtggagtttgttgatcttcacccccaccaccattaatggctgcaaagcttcactagaggaggaggactagtagtataccatcttcttcttcttctagcttgatctggtgctccattggtggtgttggtgcatcttgatctgggattctggggagaggttgagtgaatctttgggcctccatggggacggcggcggtggcggcggcggagaggccgaagcagcggcggagcagccacctgtggaagaaggcgctgctccacttctccctctgcttcgtcatgggcttcttcaccggcttcgcgccctcgtcgtcgtcgtcgtggcgggccgggagcggtggcggtggcggtgtccagccgcgccaccagctcgcggcgtcccacgtcgcggtgaaccagcaggtgagcctggtgccggatgcggcggcggcggaggcggccggggtcgggaacggcgcggtggtggacgtgggcgacgacgaggggggcgagggggcgaggcggatgctgatagtggtgacgacgacgcggggggagcggcggcggcggcgcggcgagctgctgcggctggcgcacacgctgaggctggtgaggccgccggtggtgtgggtggtggtggagcccccggcggacgcggcggcgacggcggaggtgctgcgcggcacgggggtgatgtaccggcacctcgcgttccggcccgaggagaacttcaccaccgccgacgccgaggcgcacgcgcagcgcaacgccgcgctcgcccacgtcgagaagcaccgcctctccggcgtcgtccacttcgccgacgccgccggcgtctacgacgcccatttcttcgacgagatccgccagatcgaggcatttggcacatggccagtggcaacaatgtcggcaggcgagaagaaagtggtagtcgagggcccgctatgcagtgactccaaggttgtcggttggttctcgagggacttcaatgatgggaccacccgtgcagtgacatataacacagaggcggacttgaatcctgctggtgctgctggcacgcgagctcacacgattgacgtctcagggtttgcgttcaacagttctattttgtgggatcccgagcgttggggcaggccgacgtcattaccagacacttcacaggattccatcaagtttgtgcaagaggttgtattggaagacaggaccaagctaaaggggattccctcagattgctcccaaatcatggtttggcaatatactatgcccatgcaagttcatgcccaaacctctactccaaaaactcacaatagaaggtagggagagaacaagcaagaggattctccagaaagggaaaaaagtgggaagttgatgtaaatgtggtgaaaacaaaagaaaaggaagaaggttgtttacactgagtttttttccctttctttttctctcatttttgttttctttttagtttggggggccatgaattgtctgcggaaaatctccccccaagcaatagtatttattcagattcacttgtgattctttaactctgctcctctcatcttcatctcatctcatctcctgggtaatcttttgtgagggggatgttgcttcaaacaaattccccttgtggattgcaataatacactgtagaaatgtgggtgaaaatttggcaatgccatgagaattcagaagattaaaaaaaaaaaaaaaagaaaaaaaaananaaa

SEQ ID NO: 97933 - DNA, 346 bp, Oryza sativa
  Clone ID: PAT_MRT4530_95888C.1
ggacgagtcgcccaacggcgtgcaacaacggatgagatttgttgccatgggcatgtgcaccatgtactacacctgttcatacgcgctacggggactgctcacagagcgctacatctttctatacggagaccgcttacaacgcgtaccggcgttcatgctacttgctgttctacaccatcggtgggttctcaccactcgcggttctctgcttcgcgttagcgctcaccaccttcttctctgtagtgctctctacactaacctacttactattcttcagcgacttcttgatgaaccactacaggatcctgcgctactggctgtcgatgcactacatgtagatcggtaa

SEQ ID NO: 97934 - DNA, 417 bp, Oryza sativa
  Clone ID: PAT_MRT4530_95889C.1
atgccgatatggagcagtgtggacccggtggcgactgtggcccagatcgccggcgtggacgcctacggtctgatcagcatggtgacggagcgggcggagaaggtgcggcgcaacaagtacgagtgccggcagctggcggagcacgtggaaacggtcggggggctcctgcatcacgtggagagggacgacccgcggatcgccgccccgctggagaagctggaggggacgctccgggaggccgtcgtgctcgtctcctcctgcgaggccagcagctacttccgccgcttcttccgcggcgccaagatcgccgagcagttccagcgcatcaaggagaagatcgacttctacctccaggctccagctcttccccgtcatcacctgcatctacaccaccagcgtcttctcccggcgtcttga

SEQ ID NO: 97935 - DNA, 1724 bp, Oryza sativa
  Clone ID: PAT_MRT4530_9588C.1
taatcaacttgcagaataagcctaacatacatcataacagcaaaagacttagatctgttaaggtcctatccttagtttctaatctgtctctccccttcgttttccctctctccctctccaaacctttgcaacagatggctgacaatgagaaaggcaataaggtcaggagtcaggacattggtacctcaagctcccgagtgaatgaagcacaagacaccagttgtgcggcagtggtccaacacctgattaaccagaacaaattgcttatagagatactacagcagcatcggatgccaattttgaacccgagtcagatgcaacctcaggtgcagttggaggcagtccaagcactcacaccacaagtcagcgcaccgccaacatcccagaaggcccctcatgccatgccacatgttgacccaaaagaagcaagtatcatctgttttatgtgtgatgagcaagggcactacgcaaggaactgtcctcagcagaaaagaaaagcaccaatgcgaaccgaaggtgaagttcgtaagatgatcattaccagcacagaatggcctccaccaggaatgacaagacgtcagagaagaaacaccttccgaggtgcaccacagttgacagagcatcttttagctaatggaggtagagtgtctgatagtgaagattcagatcaagtctcctcagaagatgaagatgagaaatctccccaaggtttcaaccaggataaaatggaacgtaaggcatgctctcgttgtggagaaatcggacatgttgccagctcgtgtgcctctacatgcgttcattgtgaggaagaccatccacccgacaggtgtccaacgagcaggatcacttgtttcttttgtgaaggaactgatcatgtaccaaaagattgtcaattcagttttctgctgacgaagaagatggctaaccaacccgccggtttcaacggagagaagcatcaaggcaacaccaatcctcgccaagattacagtttcagcctaactccagtgccaggacagaggaatcaaaatgagaaaagaaaatgccgagtccgggaagatatctgttgcttcaattgtcaaggaatgggtcatttcgccgacaagtgcccaaaaccgagaaacatagctgccggcacgtcagtccacgcaactccctgcaatcagaagcttgctcctcaacgaatggtcatccatgcatcccgaagcagtcctatagcccgcgttgcaacagctccaattccaatgagtgcactaccacaaggtgtcaatgctcaatttcagccccagccaccagctgacaagacagatgccagtatctgcgttgtacctttagaagctccaatacagcagctgagaaatcaagtacaagatgaagaacccgagtgtacaaccattctctgcaacgacagcctcagcaaagaattgtcgtagatggaaggagttgtgtctctccccgacctactccaggccgagccaagggcaatcaacctccggagggcgataccaagcagaagaccgtcatccgctgcaaccaacaatcagaaggaagcttctcctgtgaatgatagcattatgcagtcctatcacatcatcacagaaccaatcaaggatgcagtcactagaacaatgccagctatatctctccagaatcaaaatgagcagccatgtttgtggttttcagtccgctacttatcatggtgtaatcgaaagtttgcagcaatcatg

SEQ ID NO: 97936 - DNA, 353 bp, Oryza sativa
  Clone ID: PAT_MRT4530_95890C.1
ctcgccgaggggtacgagcactggtaggagggggattccagccacgctgtcggttaggcccacggccgacgctaggaaagcaactacagccaggcacctcgccactagtggcgaactggcgtcgtcgctacatggggcgcgacatggccaccgcataagcccacctgcggcacacgaagggggactaccgcgaacttcccccaggaggagccgttgccacaggatacgacacgacggaaggctgcccggccggcgatcacagctgctgacgaacacgacgaagctaaggctgctgacgacggcggagaaggcggtgctcctgtcggcagcggagcgcgcctggctgacgctga

SEQ ID NO: 97937 - DNA, 305 bp, Oryza sativa
  Clone ID: PAT_MRT4530_95891C.1
ctgtccccccccccccggccccccacccaaccccgggagggggggaccgaaccgggaaaccggaccggaacctccgaggaaaccgggtatccctaaaggggggccaaatccacacggccaacaacaagggaaaaaggatccccaacacaaaaatggggaaccaacaaacctacacacaaaaatggaaacccgggcaaagaccggaaagccgggggggaacaaaagggggcctaccccaaaaaaaaggggttaaccccccgggccaagattccggagaaaaaaaagacacgccggatttcataaaa

SEQ ID NO: 97938 - DNA, 256 bp, Oryza sativa
  Clone ID: PAT_MRT4530_95892C.1
taaaaccagacaatcaattacttaaattactgacaatatttctaaagcggcccaagcacaaatgcatttcaccaaaccgcccattcaatgggccaaccgggacaccccggccagctggggaggactataacaagtactcatgggcctaaagaagccttttaagggcttacaaataaaggtggccttggcgaacatgggggcgacggtgtaagggcccatgttgaaccctcaccggctatcctagaagaaacccttg

SEQ ID NO: 97939 - DNA, 397 bp, Oryza sativa
  unsure (1)..(397): unsure at all n locations
  Clone ID: PAT_MRT4530_95893C.1
tctcttctcctcctctcgctccgctctctctcctgcccaagcaatggccgcccccctcattccttcttgctgcaggtgacgacctcctcctcacactctctgctgccgtgctagccgccgcccggcacgcgggccactgccgtcgccatactctcgctccctccgcctcatacgccaactaggaggccgggaccgccggatccggtgactccggcctcctcgccggcagatccggcccctctgaggcgaggggaaaccggnaaacgaccctctttacctctccctctccctctccctctccatcctcttcatttccggatcggtggacgccggcgattaggcggcttaaggctcatggtaacaaaagggaaaacatgtaatgcacttggaacagtcg

SEQ ID NO: 97940 - DNA, 1372 bp, Oryza sativa
  Clone ID: PAT_MRT4530_95894C.1
ctactctcctctcctcctcccaccccaccggcagcggcggctcacgtaggcagcggcggcggccccgacggcagcactcggcggcacggggcggcgggggagggggtggctcggctgcggcacggggtggcggtgctcggcaccggtgacaggagggtgggtcgggatccggtggcggcgttgctcggggctgtccttcacaaccgtgaaggaggtggatccggcggcggctgccacaatgacaacgatgtctaccgcgccgaggacggcaaccacgataacgatggcaaggctattccaaccccctcccctctacggtttggaataccgtggtgcgggcttcggtcgccgaagcaccgccgtcgtcgtcaagccgaaggacgccgccgcttcttcctcgacgccgtcgccgtccgttgatcttccgccgctactttggtcaccgattccgacgttcccggagagtccgattttacaggggaagattttgaagagtttcaaggccagcaaggcaagtcacacagatcccaaacaaccctttgagcatgttgatcatgaccggttcacgattttcggttgtgaaacatttaccgtgccaaccacaagccagcgtgggcaacggctttactttctgtatagtatggttcatagtagagcaccagactgtgaagtggcggagataagcccacgggggtcgctggggagtccataccttgtttataagggggtgattatgatccgggaacggtgcactgctttgaattgtgttatgcaggagttattatatcttgacaacatactcccaccaacagacgttggtctcgatctagtgttcacccctcgtatacacgtgtatactaaggagattgtcgatcggctggttagtgcggatcaggaagctggaggggatggcacgcccccgttttgcaacctccctctgcgaccgttggagagcacttgctatgctatcaagcaacccggcaaggggaaggggccaatggttgaagccatcagggcgccggcgtacaccttcccaaatatgtctgccatcatctggccacacctaggtgggttgcctaatgaacagaggagtagcttgcaagaatccattgccgagtacgacaggcaggcgaaagagagtgcagtggagatcgagcgccatttcaggatagttgttgacaagcagcatatgctatgtcagcgtgtaattgatgcgccacaagcaaacagagcagcagcaccccaacccattgtgcctcagcccgcccgatgccaagaagtcaaccggaggcaaagcaacgtgcaacccaccggcgccgaaaccaatcccaatgaagaggatgagcagcagcaatagcagctgcagcagcat

SEQ ID NO: 97941 - DNA, 261 bp, Oryza sativa
  unsure (1)..(261): unsure at all n locations
  Clone ID: PAT_MRT4530_95895C.1
gaggagaggagggcggaatctcgcgatccccaatccgtggaggggcgctccgattcgccgattcgggagnagnatcccgccgatcggggagctcccggggtgggattcgagctgcgggatttgggggcgctgagcttnagctcgggggaggcggggggtgggcccagggctgcaagcggcggcggcggcggcggaggcggggggtttggttgtgggttntggggttnggggtngatgctgtcggtnaggaggcggcaggag

SEQ ID NO: 97942 - DNA, 182 bp, Oryza sativa
  Clone ID: PAT_MRT4530_95896C.1
ggggggaggttaaggagatcactgatgaaccgaaaatcaagaggaagagcataggtaggagaggtggctgaacaggaagaccactgaaccaacacaaacgggacgcagccaagctggcgcggggactacggacaataatccaagcagatattgaccaaaaaagaaaggacggggggaaaagg

SEQ ID NO: 97943 - DNA, 258 bp, Oryza sativa
  Clone ID: PAT_MRT4530_95897C.1
catggcggacggcttcggcctcaccgcccgcgcccgcgaggctccgcgccgtgccgacgccccggctcacctgcccgatgtgacgcgcgttctcgatttggcgccgagagatgcgcaacgcagctcgaagtgtgactgtgaccgtgtgagcgtgtaatctggtgtggacatcgtatgcatcatgtgtgcatatggataattaaatatataaataatatttggatgtggatttcggctgaaaaaaaaaaaaaaaaaaaa

SEQ ID NO: 97944 - DNA, 189 bp, Oryza sativa
  Clone ID: PAT_MRT4530_95898C.1
gacggaggtagtaaaaagatgggtatgcaacttgagtacgtgcttgacataactgtgatgcagtccaagaacttgatcgcgaaggaccgagatcctctgagaagacctcagaggagccggatccgattggcgaatgctgccaacgatcctgacgttgttgacctgacctggcacgacaatgcaaatcca

SEQ ID NO: 97945 - DNA, 610 bp, Oryza sativa
  unsure (1)..(610): unsure at all n locations
  Clone ID: PAT_MRT4530_95899C.1
ngggcgctggcaagtgtagcggttcactgcgcgtaaccaccacacccgccgcgcttaatgcgccgctacagggcgcgtcccattcgccattcagntgcgcaactgttgggaagggcgatcggtgcgggcctcttcgctattacgccagctggcgaaagggggatgtgctgcaaggcgattaagttgggtaacgccagggttttcccagtcacgacgttgtaaaacgacggccagtgagcgcgcgtaatacgactcactatagggcgaattgggtaccgggccccccctcgaggtcgacccacgcgtnccgcgcgaagcgcaggcactggcgccgcaccaagcttgggttctgagcaggaggtagcaccggttgctgcctgcggaggctagggttactgagttatctgcatcattttgttttatggatgtttcagtgtttatgcaagcttaggatgtgattccaggatgctttttattaaggttttctgaaatgttaagtgtagttgtactctggtttactgaggataccatgctatgctgtgctgagtaaaggaaccattccaatatatgtcttttgangttatttcaaaaaaaaaaaaaaaaaaaaaaa

SEQ ID NO: 97946 - DNA, 4545 bp, Oryza sativa
  Clone ID: PAT_MRT4530_9589C.1
atgccgatctcagccggtccatcaatgaccggaaacgagaacgcagtggctgcaacccaaggcgactccatgtcgaaggaccctcccgccgaagcagggaatggaacatcgacaacacccgagcttgagaaggattctaatgcggccgaaccttgtctttccgacaagaaccacgagccgacgagaacagcttccgaagcgacaaggtcctggtgtcctatccacaaaaccaggaaacatactttgcaagcctgctgggtcttcctcaatgcccacgccgaaattcgcgcctgtagagagcgtggaattcagcgcgtttctccaactcgtgatgtctattgtcctattcacaagacaaagaatcacgacctctcaagctgcaaggtttttctcagcgccataaagatgtcatctcctaaggtccagccatcaagcgtatcccttagagaggaagacaagagacagggaacgacgctgacctcagatcgattcgttggtgcgattgacatcgactcccacgaaccatcagttctacatctactcaaggactatggctcgtcatcaacgagtacaccatgcgaggtattggctatcgatgggaccagcacgtcagcacgcgctaatgccgaggcggagaatcaagtagttacaccggctcagcgcatcagtacccttaacacaatactgagggaggcaccttacgatcccgttctgaacgacgatcttgcgtggtggcaggaacggctacgagaatcagtaaccaacctcagccacacgttcgaaggggctgctgctgatgcacacccggaacagccaccaactggcggcgtcgatggcgaaaaccccgaacagcgggagtcaccctaccgagcaaccccttcaccccgcggcactggcgacctccgcgatcacctgaacggccgccgagaagcacgtcgcacacagggcaacgggagccgctctcgacatcacatcccttcacggcatcacgataatgaagaacgaggaggccgctcgaacgaagaccgagaccgtgatgatcgcgacaatcgtgagcggcgggcgccgggcaataccagtcgaggacgccgccataatggcgaagacgacagagatcggccccgggacaacgacggagggcgacgatgggattctcgagaacccggccgatgtcctcgtaatcctacaccagaaccaagcgattcttcgtcatcgtcatcctcttcttcatcctcatcgtcagatagacatccacgaaggacacacgatcgccgacaacccactgcccccagcgctgggtgtagagctttcggtcgttccctgcgtgatgtccgatggcctgagagattccgacccggaacaatagagaagtacgatgggagtactaacccagaagaatttcttcaagtctactccatagtactttacgctgccggagcagatgacaacgcattggcaaattatttgccgactgcgttaaaaggctctgcacgttcatggctgatgcatctaccgccctactcgatttcttcatgggcagacctgtggcagcaattcgtcgccaacttccaaggaacttacaagcgccatgcgatcgaagacgacctacatgcgttgacacagaactcgggtgaatccttgagggaatatgttcggcgcttcaacgagtgcagaaatacaatccccaagatcaccgacgcttctgtaatttgcgccttcaagtctggcgtcagagatcactatactacccaggagttagcgacaagacgcatcacaactactcggagattattcgagattgttgagcgatgcgcccacgtggacgatgcgctgaggcgcaagaacgataagccgaagaccgggggcgagaagaaaacagccacggacgcacctgagttaagcaagaagaaaaaccgcaagagtgcgaaaaggaaggctcaagcggaagttctcgcagcagaatacgctaacccatccaagcgcccagacccacagggtagcgacgcaaggaaagcatggtgccccatacacaagacggacagacattctttagaagattgcctcgtttttaaaaagtcgctcgagaagcacatggcattggaaaaaggcaagcgaggggctgcacctaatatgaagtggtctgaacagaagatagaattttcggaagaagagcatcccaagactgccgttatcccaggacgctatccgatcgtggtcgagcccactattcggaacatcaaggtcgcgcgggttctcattgacggtggcagctcaatcaaccttctcttcgccagcactttggatgcgatgggggtcccacgaagcgagttgacgcctaccaatcaacccttccatggaattactccccagtcctcgtccaaaccattgggcaaaattacgttgcctgtgactttcggccaagcaaacaacttccgaaaggagcagatcacctttgatgtcgctgaattcgatacagcgtataacgccatcatcgggagaactgcacttgcgaagttcatggccgcatctcactacgcgtatcaagtgctcaagatgccgggaccgaagggaataatcaccattcaagggaacgcaaagctggcggtacaatgcgacaagcggagcctcgatatggtcgagcaaacgcccaacccacccgccacaactgagcctcccaagaaactgtccgacatgccgggggtccccagggaggtgattgagcacaaactcatggtgcgacccgatgccaagccagtaaagcaaaaactgcggagatttgcaccagaccgaaaacaagccatacgagaagagctcgacaaacttctcaaagctggctttatcagagaagttcttcatccagagtggctagccaatccagtcatggtgcggaaggccaacgggaaatggaggatgtgcgtcgatttcatcgacctcaacaaggcgtgtcccaaggatcacttccctcttcctcgaatagatcaactggtggactcgacagccggctgtgaactgttgagctttctcgacgcttactccggctatcaccaaattagcatggtgaaagagaacgaagagaagacagcattcatcacgccgttcggggtattttgctacgttaagatgcctttcggactgataacagcagggaatactttccagcgcacggtccagggcgcacttagtgaccagctcggcaacaatgtcgaggcatacgtcgacgacattgttgtcaagaccaagacaagcgactcattgattgacgatctgcgggagacattcgacaacctacgacgatatcgcctcatgcttaatccagagaagtgcacgttcggagtaccgtcgggcaaactgctcggtttcctcgtctctggcagaggaatagaagcaaatcccgagaagatcaaagcaatcgagaacatgaagtcgccacaagactcaaagaaacaaccaaatcgacaacgaaacgtggacaatggcgttcgatggtgcactcaacagccaaggagcaggggcaggattcatcttgacatctccttctggagatcaattcaagcacgcaatccacctcaacttcagggcaaccaacaacacggccgagtaagaaggactactcgccaggataagagccgcaaccgcatttggggtcaaacgactgatcgtgaaaggggactccgaactagtcgcgaaccagaagttaggaagcaggagaaaaggttcgatgggatcaaggtccgacacgtataccgcaaagaaaacgtcgagccagacgagctagcacgacgcacgtccagacgagaaccactcgaacccggcacttttctggacatcctggcaaagccatcggtaaaagaggtcagcggcgaagttaacccagacacccccgacatcagctcggaggccacagaggcagaacgcgccgttgccgatatcaaaaccacagacgactggcgcaccccactgatcaaattcatcaacagcgacgagttgctcgaggacgatgcagaggccaagaaaataacccgtaaagcaaaaatctatggcacgatcggcaatgatctatacaagaaagcgccaaacgggggcggctataggttcctattcgtggcgatagacaaattcacaaaatggatcgaggcgatgcccacgggagaaatcaaggccgacaacgccatcaaatttatcaaagggatattttgcagatacggactaccacatcgcatcatcactgacaacggctcccagttcatcagcgccgatttccaagattattacatcaggctgggagtcaagatatgcttcgcttcagtctctcatcctcaaagcaacgggcaagtcgagagggcaaatggcatagtgctacaagggatcaagacccgtgtctacgacaggctcatgtcacacgacaagaaatgggtcgaagaactcccatcagtactatgggccgtacgcaccacaccgacaacgtctaacaaggaaacacccttcttcctcatgtacggctctgaggccatgctccccagtgagctacgacatcaaagtacatga

SEQ ID NO: 97947 - DNA, 1392 bp, Oryza sativa
  Clone ID: PAT_MRT4530_958C.1
atggagaaacagaatattgacttcggcaaaattctcggagaaattcaggaatcgctggtgtctctcaatagtcaataccaagcaatcggagactcaagcggctgtatcgaagttggatgtagggatttgcatgaagaggttggagatcttcgtcagcaactcgacctcatcggcaaatccaagcaggctgcttcgagcgcgtcttccccttgtgtctcattggcgggtgaggaaaggaaggaggctgctccgagcacgtctttccctcgggtcccgttgacgggcgaggaaaggaaggcgccattgctgccgatgccgccactgacaactcatttggccgcggcggagggtgggagcaaatgggcaatcggccaccacgttcaacctaatttccggggaaagacaccgggggccttagcgaccctgggtcaaaccccgggcaagggtacgtatgactcgaatcactttcagttccagaagtttgagcattcggggtttgatggtggggaatttgattctgattttggggagcgacaatacaattatagagtgccgaaattggattttcctaagtttgatggttctaaccctcaggattggcgaatgaaatgcgagcactattttgatgtgaataatacctttccggggctatgggtgaggatttcgatcatttatttcatgggtagagcagcatcatggctaagatcttctagggcgcatttgagatttccaatgtgggaagatttttgcactgcagtttctgaaaaattcgatagagaccagcatgaggctttgattaggcaaatggatagtataaaacaaactggaatggaagaggtgctggagaatcctcaaaactctagcatcaaggacataaagaagtctgaaggaaattcagcttataagtctgctgtgaagggggcatggccattaccactaccaccaggaaaaggaggagttccaattgttggccgttctgaagacaagaggagcactaacagtgttcgtaatccgagaacaatgtctgataaggtggcagcattgaaaacttacaggcgggctcaagggttatgctatgtttgtgctgagaagtggtctccaagtcgtaaagaattgctgattttagtggactcagggagttcggtcagttttgtcagtacgcagttagcttctggattgacaggattgcaaccattggcacaccagttaattgtcagggttgctaatgggagcaagctgaaatgtgaagcagtaattcctaactgtatggactggttgaaggaacatagtccaatgtcaattgattggtttaagaagattattgctctcagcttacaaggaactcaagtgacaatacaagggtgtagtccgaactggctaagtgtaatatga

SEQ ID NO: 97948 - DNA, 327 bp, Oryza sativa
  Clone ID: PAT_MRT4530_95900C.1
atggatgaggtcgccgaggggttcgtcccccgggagatgcggcggctacccggaggtggcggcggcgacctcggaggcggtagatccggcgcgtccgccgcctccagctctggcaagggtggaaagggaatatgggtgtggggagcggtgtccacaagcaacgacgcgcacaacatggctccttgcctggttgctctgccaaaagtcgccgaggggcgtgtccctctgggagaaaacgcgcgtctcgcctggggcacggctcagatgcaaaagttgatggccgtttgcgaggggacgggtcgaaggcacccattgctgatggcctaa

SEQ ID NO: 97949 - DNA, 672 bp, Oryza sativa
  unsure (1)..(672): unsure at all n locations
  Clone ID: PAT_MRT4530_95901C.1
atcggtgcggccctcttcgctattacccagctggcgaaagggggatgtgctgcaaggcgattaagttgggtaacgccagggttttcccagtcacgacgttgtaaaacgacggccngtgagcgcgcgtaatacgactcactatagggcgaattgggtaccgggccccccctcgaggtcgacccacgcgtccgctagggtttcgccgccgcctcttcgtccccgccgcgacgatgccgtcccacaagaccttccgcatcaagaagaagctggcgaagaagatgcgccagaaccgccccatcccctactggatccgcatgcggaccgacaacaccatcaggtataacgcgaagcgcaggcactggcgccgcaccaagcttgggttctgagcaggaggtggcaccggctgctgcctgcggattttgttttatggatgtttcagtgtttatgcaagcttaggatgtgattccatgatgctttttattaaggttttctgaaatgttaagggtagtagtactctggtttactgaggataccatgctatgctgtgctgagtaaaagaaccattctaatatatctgccttgttgaagttatttctcaggcttattctgtttcaaaaaaaaaaaaaaaaaaaaaaaaaaaaaaaaaaaaaaaaaaaaaaaaaaaaaaaaaaa

SEQ ID NO: 97950 - DNA, 1479 bp, Oryza sativa
  Clone ID: PAT_MRT4530_95902C.1
atggccgggttggtgatgagctgttgcaaccctatccctaacgtcaccaatgacggcgctggaaacccggaagctctcgccgcccaaaccatatacaccgtcaacgagattgaagccttgtatgagcttttcaagaggatcgatggtgccgtcatcgaagatggcaagatcaacatggaagagttcaacttgagagtatttggtcctgaaaaaggaggcacctgtttgctgatcagagtttgtagtagctttatccatcttccatctgatgctcccattgaggacaagattaatttggctgtcagatatggccgggttggtgatgagttgctgcaaccctacaaggtgataaaccccgatgttgggaggaaatctagactaaactgtggaaaatcagctgtggctaaagcagaagcccatttggttagaacagctgtgaaactgtatgttgtagaagaaatacctgtaatacccctaaagatcagagtgatgtgttacttccaaggcaatcttccactaaacaggatgcatcatccaaggagactcattgaagcagaacaaggcaaaggcaccaaactggcgagaggctgctgctcgacttccagcgacttcgcccagaagctgctgctcgacctccggcgccgccgcgagaggctcggcttcaactcgccggcgccgccgcagagcacatcgtcgtccaatgccgccgctcttcttcgttgtccaacgctgccgcggaaggggcgggcagcatcgaacaccttctccgattgcacgccgccgccgccgaggcggccgtctcggcgaggctgcttgagctggcgaccgacgatgacgcggcgggcctcgggaagctccttgcggcgtgcccctcccccgccaacgagcccgcgccatggagcttctgaccccgctcagcctcgacatcaagaacgacgcctagcctctgaccactacagctgtgtgccgagctcggagttcgaccacgccatcgctgccgctattgccgccgccgtctaccacctcacctccatccgcaagcagccgcaccaccacccgtgcctctcgcccgaggcggctgccgcagcgaggaggtgcgtggaacgggaggtcgccgcgctccgccacatgcatggccacccgcacgtggtggggctcctcgacgtcctcgccacccgctccaccgtgtacctcgtcctcaagctcgcccgcggcggcggcggcgtcatcgcgacctccgtctccccctttcccctttccccgcaacgggcgaggaggaggaggaggaggagcagcggcggcggctcggtgaggaagaggagcggcgcacagtggagaagcggttcggcgaggaggaggagcggcggcggaggctcggtgaggaagaggagctgcgcgcagtggaggagtggctcggcgaggagtggcggcggcggggcagctcggcgaggaggaggagcggcggcggcggctcggtga

SEQ ID NO: 97951 - DNA, 658 bp, Oryza sativa
  Clone ID: PAT_MRT4530_95903C.1
atgatcgccagcgactgcctgtctgcctgtgccggtgagaagaatgagataatggacggctccggaaattgcggtccgggcatacatatagctgggtttgtagatgatacggagtcggttgttattcaactgccagttgctaagtacctcactgtcgacggccacacacttcttccacacttcacgcacctagggtttcgccgccgccgccgccgcttcttcgtccccgccgcgacgatgccgtcccacaagaccttccgcatcaagaagaagctggcgaagaagatgcgccagaaccgccccatcccctactggatccgcatgcggaccgacaacaccatcaggtacaacgcgaagcgcaggcactggcgccgcaccaagcttgggttctgagcaggaggtagcaccggttgctgcctgcggaggctagggttactgagttatctgcatcattttgttttatggatgtttcagtgtttatgcaagcttaggatgtgattccaggatgctttttattaaggttttctgaaatgttaagtgtagttgtactctggtttactgaggataccatgctatgctgtgctgagtaaaggaaccattccaatatatgtcttttgaagttatttcacaggctaaaaaaaaaaaaaaaaaagcggcc

SEQ ID NO: 97952 - DNA, 736 bp, Oryza sativa
  unsure (1)..(736): unsure at all n locations
  Clone ID: PAT_MRT4530_95904C.1
tttttttttttttttatatagatgtgcctttttatatatacaattggcacgtttttaccctggcaaaagttgtaaatatggtggaatgcattcatattaacaaccacttaatttgcatctcaatctgtaatctcttcttgctaacaaaaacgaaaaaaagaagaggcaaattttcgatgcctaatttctgttcaaactgacaatatggtctggctacttagaggtgtcaaaaatgccaggccgtttgctgcctaagtgctctagctagctggagtattatatcatggttcagctcgctgacacatgcagtcaggcattgggagggtgtatatggaaatggaaccatttggtttcctgactccgaaacccttcgactcgctgtgccgatgtatgtcctgcatttggcgcttgaaccgatcccatcggntatttgcggacgcgtgggtcgacctcgagggggggcccggtacccaattcgccctatagtgagtcgtattacgcgcgctcactggccgtcgttttacaacgtcgtgactgggaaaaccctggcgttacccaacttaatcgccttgcagcacatccccctttcgccagctggcgtaatagcgaagaggcccgcaccggatcgcccttcccaacagncaaattgaacgcccctttaacgggcctataaccggggcgggggatgtgggttaccgcccggtgaacgattacattggcaacgctctaacgcacg

SEQ ID NO: 97953 - DNA, 540 bp, Oryza sativa
  Clone ID: PAT_MRT4530_95905C.1
atggcagatgcggctgagaggatgagacctcattcccgatctagctgcaagctgcatgtggctgatgcaatctcctccgcatccgtttgctgcgtctccggccctccgcagcccgcccatgcaactttggcgcatggtactctggcagccacaacaattaatttgcgtcgctcagtggtgatgactgacgaggggtcagattgtcaaggagaactttgcaaagaagcatatgactacaatgtgctgctgctcaggagatgccatgaacttaacacaagcctggcaagctctcatgaacttaacacaagaaagtctgctcctgatgtagggacattgggtgcagatcttcctaggctacttcagcatgagcaagcagtcaatcaacaacgccggcaacaagcgcaagctggatattgtgactgtcttaatctaattaaatcaaaattagttatttctctgccatttatttggtgttaacataaatagttctgatgtatgtccttttgtatgcttgtaaaaaagagatgccatgttatcagg

SEQ ID NO: 97954 - DNA, 522 bp, Oryza sativa
  Clone ID: PAT_MRT4530_95906C.1
aaaaaaaaaggaaaaaaattatgagggggggaaaatttcccaaaaacggacatatatacgggcggggaaaaattaataaagaaaagaaattaaaagccccccggccggaaaggcccatttggcgagcatgtggaggcactccttgggggggaaccccggggggggggggccaccccccttgacgggggaaaaggggaggttggggcccaaaacggggggaaacccccaaacccgggggggggagaaccacggcccccaggggggcaccacgttgaaacccaagggccggacccactggtgggggccaacaaacgtaatgtccaggtggggggccccgtttaacaccaaccccctgtaccccccctggggaagccccccggggaaggggagggggcttcccacctcttcccgaaaaaagggaaaccccctgcaacggttccaggagggaatggacccctcggggatgcccaggggggggcccaccttcggggtgtccccccacaggtacaaaaaccgggagcc

SEQ ID NO: 97955 - DNA, 671 bp, Oryza sativa
  unsure (1)..(671): unsure at all n locations
  Clone ID: PAT_MRT4530_95907C.1
ccctctttcacctccacctccacctgggtgggacgcggncccgcagtagtcgcggagaaaagaaaccgaaaagaaaaaaaaaaatctagctacgcatctcggcccggcccccccgccgccgcgcgctcggatcccccgacggctcgccgccacggcgccgccgccgccatgagcctcgcctcggtggcccgcgcgctctcccgccgctccgcgccctcctcctcccgcgcgcgccagggtttctccctcggtgggctaggtgggaccaccaggtcgccgccgccgccgtcgtcgccgctcccatcgctccatggcggggagggcggtgggctgggattgggattcgtccgcgggtacctgacggcggcgctggggaggcccgccgcggtgaaggctgggacagactggaggtccatcctcgcgaacccgcagttccgggggctcttctctgacgggtccnngaagaattacgagaactactaccccaagggcaggaaggaggcgccgaagggggatggggagtaacaggtctgattcgaagccagattcaagtgcggacgatcaatggaatttccaagagactgcctcaaagcaattgcaaaattttctgggccctgtactggttgttggactgatgctttcgtccttgtcggcgggctcgtcggaccaaa

SEQ ID NO: 97956 - DNA, 412 bp, Oryza sativa
  Clone ID: PAT_MRT4530_95908C.1
gactcacacttattagggaaatactgggtacagcctcgcaaggtgacacacggtcccggaattgcaccaggcgtgcaggacaccacgcggtgcgaccggaagactgtccaattgtgtgtggtgtgggtgggtgtctgtggtgggtggaagtggatttgttgagcagattgttccgaggattgcgagagagcgtggagggatggtgttaatgtggggcgtgaactgctccacagaaaattaggggtgatttaaactgcccccgatggcagcttgcttccacatgagaaaaaagttggaaaacgtgttgtgacttggaactgagcatgcagatgggtggtggagttggggggtgagggttttatgttgggaacttaatgagatttttttttttcaaaaaaaaaaaaaaaaaaaa

SEQ ID NO: 97957 - DNA, 358 bp, Oryza sativa
  Clone ID: PAT_MRT4530_95909C.1
cttgggggaaacgactgaaatatccccctccccccccctataaaaggggggcaaaccccaagtgccacccccttttaaaaaaaacaacaaaggcttaaatacctcaaacacaaaagggggtgcccaaaaaacccgggtcaaaaacccttttgacaaaaaaattagggggggtgttatttggccaccccaaaattcccccaaaacttgttttctctagaaaaggcctttttgggaataaaacgcacggaaaatgggccagggggggccctctgagagcccctcaacacccccccggggggggggaaaatgatttcaaccccaaaaaaaaaaacctttttgaggaaccaaagcccccggg

SEQ ID NO: 97958 - DNA, 1215 bp, Oryza sativa
  Clone ID: PAT_MRT4530_9590C.1
cctggacacattggaattgttggattattgtggaattggattcacacctctccctctattcaaaatccccaaaatggttttaggctgggctcggggtgcatggttttgatagtagcacctcggccatataaggaccggtcttcgggcctctgttgcaaatcactaccgtacttccacatgtctaatgggtaaggcttagtttgtggctcagtttctctccctctccttctctccctccttctcttgggcccctcttcccctcccggcccactgcctccccctcctctctctcccgggccgtttcctcccccctcctctcctcctgggccgtgtcccggcccaagccgcacccccccctccaggccgatccgcgcccccgcccgtgctgcgcacgtgcgcgcgctgacgacgcgcgcccgaccgcgtggggcccacgcgtcaggccgccgtcgccttcttcctccagccgccgcccggcttctctctctcccgtgaaccctaatccttccctccctcaaatccgtgtgattcgctcttgggattccaaaattaaataggggaaattaatccccattgaatcctcttcaatcccccccaatttcccccttgaatggcgcccccaatcgccgggaacgcccgcgtcttcctcggccgccctccattgccgccggccgccattcccgtcgccgttccgccctctcccgtgcccggctccctcccccatcctataaaatgcaaccccctccgtgcgttctctcgttttagccccttcccgagctcccccacggccgcagcacctctccccgccgtcctcctctctctcccttgccgccggccgtctccagccgccggtgccgcctcgaccgtgcgccggccggccgcgccgtcgcctcctccagcgtcgccgccacctcctccaccccggcttgccctccgtttcgcgaggtgacctccgggagtgcctccccgccggcaaccgtggtgttgccgccacgatttcgcctccggccgcctctgccgcgtccccggagcgccggccgacgtcgccatcacctttcccggcaccggagtgccgtcctctttcccggccaagccacggcgtcgcccgaatatcgccggaacgccgttgcccgcgccggtctcaccttcctcctcgtcgacatctcctccggcagcccccttccgccgcgcccgtgcatcagccggcgctgccat

SEQ ID NO: 97959 - DNA, 208 bp, Oryza sativa
  Clone ID: PAT_MRT4530_95910C.1
gcacgaggaggctatccactcatctcgcgcccaggccgtcatctacctcgccggcggcgcctcgcaggtaaccccccttcgcctcgccgctgccccccacttgcgcgccgccgcgccgtgattcgccggcagattcgatccgatatggtagtactgtttggcgcctagactatagcaaagcgcgcattcgccgcaggcgctcgggtgg

SEQ ID NO: 97960 - DNA, 482 bp, Oryza sativa
  unsure (1)..(482): unsure at all n locations
  Clone ID: PAT_MRT4530_95911C.1
aaaaaaaaaaaagggaggggataaatgggggggaccccccggggtcacaaacccttccaaaaacttaaaaaaaggttttttggtccgggaagggggcaaaaaacccgccccatcaaaccacaggaattttttggggtcccccccccccccggattttaaaacccccgggcccaataacggatatttcccccccccagggggggtttaaaatttttttttaaaaaacgggttttttggcccctttttggaaaaagggcttcctttaaaaacggcccggagagtttccttggaaaaaaacccttccttgtcttgggggggggggaaaaattctttcccctggggggagccccccaaccccccttggaaatttttaggcccccgggggggggggggaaaccccttagccttttgggcgggnaggggaacaggccggggggggaaaggcccagggaaatttcccggaagtttggggggaaaaacct

SEQ ID NO: 97961 - DNA, 476 bp, Oryza sativa
  Clone ID: PAT_MRT4530_95912C.1
cgccttgatttgttttttttaccttatttttgttttttttttttttttttttttctttttgaaacgggggagaaaatttttcatcccttttttctcccttttggattccccaagaagaccccttgtttgggggaaaaggattaaaaaagactttttaccgtgcggaccccgtcggccgtaacccccccctgccgggttgggaaaattttaccccgtttccttttggggccccccgcgtggccgccctttttgccgggttaccccctccctttaggatcgcttaacccatggccagggccctttcaaagggaccttttttctttttgggctttaaaggttttatttggaattttggctacacccaccaagatttgcaccgccggccgttccccccgggttcgcccccgggtttttgggggggccgccgccccttcttacttatgggggaagggccctcccccaaatgcccggggggg

SEQ ID NO: 97962 - DNA, 564 bp, Oryza sativa
  unsure (1)..(564): unsure at all n locations
  Clone ID: PAT_MRT4530_95913C.1
tttttttttttttccctgttaagaanttttccatttttttatggtcgacgaatttatcagatatgctctagatacatatcttgtgtgtatatagccggagctttgctttcacatatcctcacccaacgatagttgtagtactcttacaataataaccgatcggagagggagggaagagattattacagtatgtgttaagagcagaggccattgagatggtacataaccaaactgtaaaataaaaatatatagcatattatatatttgatatatcatcaacatagcccaaaacaaagctgcatactattattataggcagcaatccaccagcgcgatgcttgatcttagcttagttgccaccagactcctcgcaacctgggggcttgtaggcgatgaagctaatcaactgcacctgcctgacgttgtcgaagccgatgatacggacaaaggcatcgcggacgcgtgggtcgacccgggaattccggaccggtacctgcagggcgtaacagctttccctatagtgagtcgtattanagcttggccgtaaatccatgggtcatagac

SEQ ID NO: 97963 - DNA, 1425 bp, Oryza sativa
  Clone ID: PAT_MRT4530_95914C.1
atgccggggcggggggctcgccgtcgcccggatctcaccctcccgatgccgcagcgcgacgcgccgacgtcgctcgccgtgccgctcccgctcccgccggcggggacgacgacgacgtccgcgcctcccgcgggaggggcgatgcacccactggccccggcgggggccgcgccgccgccgccgctggaggagctggaacgggtgaggcgggtggggagcggggcaggggggacggtgtggatggtgcgccaccgcggcacgggcaaggagtacgcgctcaaggtgctctacggcaaccacgacgacgcggtgcggcgccagatcgcgcgcgagatcgccatcctccgcaccgccgagcacccggcggtggtgcggtgccacgacatgtacgagcgcggcggcgagctgcagatcctgctcgagtacatggacggcgggtccctcgacggccgccgcatcgccgacgagcggttcctcgccgacgtcgcgcgccaggtgctctccgggatcgcctacctccaccgccgccacatcgtccaccgcgacatcaagccgtccaacctcctcatcgactccgcgcgccgcgtcaagatcgccgacttcggcgtcggccgcatcctcaaccagaccatggatccctgcaactcctccgtcggcaccatcgcctacatgagccccgagcgcatcaacaccgacctcaacgacggcgcctacgatggctacgccggcgacatctggagcttcggcctcagcatcctagagttttacatgggaaaattccccttcggtgagaatcttggcaagcagggtgactgggccgcgctcatgtgcgccatctgctattccgaccctcccgagccgcccgccgccgtctcgccggagttcagaagcttcgtcggctactgccttcagaagaatccggcgaagcggccgtccgccgcgcagctgatgcagcacccgttcgtcgccggaccgcagccacagccactcgccgccccgccgccatcgtcgtgactgccaattccatccggtcatcgtgtcaaactccatttccatctcatcaagttcttcatagccaatccattttcgagtgttcttcaaacaccatgatcgttttcatccaatgctgctgccccaactcaaggttcttcctctctactgttctttgatggtgttttattcacaatgatgatcaaatattgagtaaatctggtttgtacaaaggatttttttttctacgagatcaagtacagacataatcccacttgttagccaatttgccataaaattcccttagaaacgaaaatttccactgtacaagtagcagattttttttactccatttccacgatattttgcttgttagtggtaagctgcttaatgatgatagtgtgcaagttgccactcttcaaagtggttctttgg

SEQ ID NO: 97964 - DNA, 475 bp, Oryza sativa
  Clone ID: PAT_MRT4530_95915C.1
tctacaatctcctccactcccattccctccatctcccccccacgctcgcgagcttcgcggagtcgggagatcgaccgccgcctcccccaccacacatccgcccgcggcggcgggttgcgcctgcgccggccttctcggagtcccgcctctccactccggctcactctctccgggctagcccaaaggatttaaaatggtagagaatggcgttctggagcaaccaaagggggtgtctcgaaataggccacgtgctcagtcgaatgatcatccagttgatcctggatacctcccagagttgacatgggaacacaagcttagcaatattggctatgatttgccatccttcagacttacatggagagagacattccagttggctggccttggtcttcgtcttggccgacacatccttgaagaaacatcaaaaggacgtgctgctgtgattgatcccatgaagaagcgcattgcaaaatct

SEQ ID NO: 97965 - DNA, 384 bp, Oryza sativa
  Clone ID: PAT_MRT4530_95916C.1
tttcgctgccacttccatgactctcgaatgttcgtctcacgcccaggggcctattgagcgagtacttacaccgggaggcagacgatccagaaggagaaggggctagggccctccaaggtagacgactccgacgggcacgctttttttgaccttgataatgaggaccagcatctaaagagcaagctgaaggacctgaacatcatcaatgcaaaccatatggatattgccggaaccaggaaggctgtggtgaatgaccacccgcaccatgagctgatggcattcaagataattcaagtcaaggtcgtcaaggagaggattaaaaataacatgggaaaggtatgcatgaagtgttgaacaaggaagattgagaggccacccatgaaa

SEQ ID NO: 97966 - DNA, 394 bp, Oryza sativa
  Clone ID: PAT_MRT4530_95917C.1
atggcggcgcgcggccatggcggcgcgcggccagggcggcgcggcgtggcagcggtcgggtcgaagcaggcggtgcggcgtgagcgcgacgacgtgggtggccgatgcggcggctgttcgggcggtgcggccctacggccgtgcagcgccgtgcgggacgcggctgacggctattgtgcggcgacacacggcacatcgccgtacggggcgacagccgtgcgggggcgcatggggcgcatggggcgcccggggtgaggccgtgtggaggcggcacgagtgtggcatcctcggcgtgggcgcaagcgcgcagcggtggtgctgctcgggtgcggctgccgtgctcacagaagaggatgcttgtttacctccgttggatggcgatcgaacagtgtag

SEQ ID NO: 97967 - DNA, 485 bp, Oryza sativa
  Clone ID: PAT_MRT4530_95918C.1
cccaattcggaggaacagagatttggttttcaccagccaccatttaatagtgttgatcaccttcatcttcactgcttggcattgccatttacgcccagctggaggcaagtaaaatatacacctcttggtccccttggagggtttattgaagctgagagtctattggaaagaatacgcccatagtctaccgttatcacaactaccggtacaagctattcttgcttaacttttgttgtattgtcatttgtacgtgattcattgtacattcacaacacatggtctgaaattgtagactaaatcagacccactctttctggatgttgagctgcattgagttgataaatgcctgctgtatgaatttcttttcatggtggacagccttagcttacaaacaaaggaataataaccacctatggaccttttatggccttttgattagcagtcaaacatttaggcagtttgcaattatgatatgattttctcct

SEQ ID NO: 97968 - DNA, 387 bp, Oryza sativa
  Clone ID: PAT_MRT4530_95919C.1
atgcgtgccgcgccggatgccgccaccgaccatcgggtgcctgggctgtatctggtaacgtacttacgtgtatgtcgctactaccagctcagctcgcagaagcagttccgtgcacccccggccctgggatgccctttccgggtggcggttgcggacggtgacgcgcgcgccgggcggctgctgcgatcgaaacttccgcccgcggcacgaaacctccccgcgcatttcagcgaaaatcggacggacttattacgggcgagtggggcgacacgacgacacgcgacgactggaaagggaaatccaggcgttttttccagcggccaagccaagatgttcccgcacggtttcgcccaaaatggaacgaggtttcgactcgactacctgtaa

SEQ ID NO: 97969 - DNA, 317 bp, Oryza sativa
  unsure (1)..(317): unsure at all n locations
  Clone ID: PAT_MRT4530_9591C.1
ggggaggcaagaacaccagcagctgaaagtgagtnctggtttgagctgcctgggcgggaaagagaggaggcgaccgcgaagaagaagaagaagnnagagagaaaaaggagcaaaaaaggaggcgtttttggattcttgctgcgatttctacgactcgagntctcatctcgtcaaaagcagtggcctttttccctcctcctcctttcttgggcatggtgtcattcatggtgatgctgctgtctgacttcagtgatccaaaccatgctttttgatggtgntgnaagccaagtntcactattgatgctttgattgctgat

SEQ ID NO: 97970 - DNA, 989 bp, Oryza sativa
  Clone ID: PAT_MRT4530_95920C.1
tcactggacgattagccagtgcgccaccggccaccggatcgataccggcggcggcggcggtggcggtatcccacccgcgagcacgagcacgagcacggcgctccacgcgggcgccgagggtgccatgaagaagctgttctgcttccgcggcggcaccgtggcgaggaggtcggagagggccccgatggctgaatggtgcgtgttctgccccatcgcccgccgcgaccccgcttgcaacaccgtcctcctctactccgatgacagggtcatggcgttcaaggacatcaacccgtcggctttcaggcactatcttgtcatacccattgaacatatacctactgtcaataatctccaaagaaccaccgaagatcaccagttagttagtcacatgttggcagtaggaagagatttactcaatcgggatgctcccaattcggaggaacagagatttggttttcaccagccaccatttaatagtgttgatcaccttcatcttcactgcttggcattgccatttacgcccagctggaggcaagtaaaatatacacctcttggtccccttggagggtttattgaagctgagagtctattggaaagaatacgcccatagtctaccgttatcacaactaccggtacacactattcatgctgtacctccgccgttttcgcgttggccccggattcccgctgcctgcgcgccgcaggctctgttggtgtgggcttgtcccggcccgctctgtcgcgtgcgccagctgcattgagttgataaatgcctgctgtatgaatttcttttcatggtggacagccttagcttacaaacaaaggaataataaccacctatggaccttttatggccttttgattagcagtcaaacatttaggcagtttgcaattatgatatgattttctcctatttagctctcgccgttacagttactcttaggctcgttaagaaatgtacgccctccgggctaataatacttgtcgtt

SEQ ID NO: 97971 - DNA, 270 bp, Oryza sativa
  Clone ID: PAT_MRT4530_95921C.1
atgggagggagggtgaggcagcggcagtcggagtggtggtggagtactgggcaaaatggagagtggtttgtaggtgatcgggggtggcagcgaacccagcaacatatgcctacagagacggagagcaagaggcggcatgagaaagctgaaaaatatgcaatcctcctggctgagaaagcccctttgaattggaggaaaaacataggaattttagaggattacaatcctataggaaaatttcctatgaagccctttgaaacaaaggattga

SEQ ID NO: 97972 - DNA, 170 bp, Oryza sativa
  Clone ID: PAT_MRT4530_95922C.1
cgcgtccgccacattctactccaccactccactccccaatccaaccaccccccgaacaaccggagaagagaggctgcactccactcgcggccggcgacggctcgtgatgcatcgccgcacgcaaggggcggcgctcgctagaggtggtctagcgcgcggtgaggcggtta

SEQ ID NO: 97973 - DNA, 464 bp, Oryza sativa
  Clone ID: PAT_MRT4530_95923C.1
ccctcttgttcattgctcagtatgtatcatcgagaagggtcagttgtattgtcaggtgcggattcccaataaactgatgttgggtgatctaataactgaaggcaaaatgaagtaatataatcgcatcaatttgtaatgttgtggggagttgattttgtttttgattatctgaactgatgaggtgcaggctagcagcgcccgccaaccgacactgaggtaaggagttccacaacctcagcactcagatgcaaatcatgggcattgcctctgtctaagctactaatcagagaatcacactgcaaataagagctgattgagctgagagctgccaatctctgtcttctctttttgttgcattgcaatttttgattttagattgaatttttgagagaatgcataggaaagggaaaggacacgggacagggatgcctttacattgcacttatgttgtcttacgataccta

SEQ ID NO: 97974 - DNA, 1185 bp, Oryza sativa
  Clone ID: PAT_MRT4530_95924C.1
atggtgtcggactcggagctggtggagcggctgcgggaggtgctgcggtcgtccgacctcaacaccaccaccaccgccatcctgcgccgccgcctcgaggaggacttcggcgtcgacctctccgacaagaagctcttcatccgcgagcaggtcgacctcctcctctccgaggtcgccggcaaggccgagcaggaggaggcggaggtgcccaaggaggaggagcccgagaccggggcggaggcagcgggtggagagccagggggcgctgaaggggagggggaagaagaggaggaggaagaggaagaggaggaggaggaggaggaggaggaagacagtagcggcagccggaagaagcggcgatcagatggagccaatactgatggcaagagaaaaggtggtggcttcaccaaattatgtagcatttccccaacgcttcaagagtttgttggtgcctctgagttagctaggacagaggtagtcaagaagctttgggcatatatccgagaaaataacttgcaagacccaagcaataagaggaagattctgataaaatttctgatcactgatgaatacactacaacacagaattgtgcgcgggcactgcagtacataataaggtttttgaaatctgagcatggaggtcctgtgacctctgcctcacctgagagatcaacacccaaagagaagcctcaaaagagagaaagaaatgaagggaagaagcaaaaaggtggttcttctgggtctggatctggttttcttgtgccccttcaactttcggatgatttagtgaaattcattggcactggtgagagtatgctttcgcgatctgatgttgtgaaaagaatgtgggactatataaaagagaataaattacaggatccttctgaccggaggaaaataatatgtgacgagaagctgaaggatctattgcaagttgaatcattcaatggctttactgtttcgaagctgcttgctccccatttcaccaagacaaagtagtgacttgcaccatccagatctgccaaacccagaaggatgggtaattttgttttgcagaatgtgtaacatgaaactgttagggaactatgtgagaaatgtggaattttaacttgtgggtgggatctccttccgaaatcaacagtaggttcctaaaaatctaatgaagtttgcatctgttgactaacc

SEQ ID NO: 97975 - DNA, 339 bp, Oryza sativa
  Clone ID: PAT_MRT4530_95925C.1
tttcgctcgccgccgatcggatcgcgtggggggatcattacatctctgcagagatgaaagagatcctgcacatccaaggcgggcaatgcggcaaccagatctgtgccaaattttgggaggtggtgtgtgatgagcactggattgacccttccgggcgttacacatggcactcatatctgcagttggagcgtgtcaatgcttacctaaatgaggccctatgcggtcgtttttgtgccttgtgctgttctcatggacctttagcccttttactatggacagtgtcccaactggaccttatggccagaacttccccccatgaaactttttgttcgggcaatc

SEQ ID NO: 97976 - DNA, 576 bp, Oryza sativa
  Clone ID: PAT_MRT4530_95926C.1
atggtctcctcccatggcatcgtcaatgcattcttcctcttcgccgtcgccctcgtcgcggcgtctcaagctcaacacgccgccaacgctgactctttcatgtccggcgcatgcaagatcgtcgctggcagcagcagcggcgtcatcagcgtcacgttctgcatggacgcgctcggttccgacagccggagcctcagcgccagctactacagtgacctcgccatcatcgccatcgacctcctgacatccaacacgacgagcaccaaggccaagatagacaacatccttaaggacgacggcaacggcttgaaacccggcgacgccacgacggtgtgcttccagtcgtgccaggcagcatacgccagcgtgctacagggtcagcttggcatcttctacaacgtgcaggctggcaggtttccggaggcgatgtcggcgttggagaaggcagccaacatggtggaggaatgcgagaaagggttcgggaagagtaatgtcaagtcattgctcaccacagagaaccacgacagctttgagctcgccaagcttggcgctttgttactcaatgaggaacactga

SEQ ID NO: 97977 - DNA, 992 bp, Oryza sativa
  Clone ID: PAT_MRT4530_95927C.1
agttctagaaacgcagcgacattgcactcaccatctcagaaattgcatccaacagcagctgccatagttgcaagtgagctagagctcagagaagaggaggaagaagaaggcgtcaatggcgaccaccatagctgcgatggccatgcttaagccgtccaagatcgtggcgcggtcatcgccggcgccgtcggggagcggcagggtgcctagcatctcgctcaagagcctggccaagaagggcatgtcggtgtcgtcgtcgtcggcggcggcggcgcccgtggcggcggcggcgatggcgggcgcgttcttctcggcgctggcgtcgacggacgcggcgctcgcggcgcagcagatcgcggacgtcgccgcggcggcggcgggtgccgacgacaaccgcgggctggcgttgctgctgccgatcgcgccggccatcgcgtgggtgctctacaacatcctccagccggcgctgaaccagctgaaccgcatgcggtcggagcaggtgctcgtcgccgggctcggcctgggcgcggcggcgggtgccgggctcgcgttcccgcccgagggcgtcggcaggcgcaggaggtggcgaggctggcggcggaggcggcggcggcggagggcggcgacaaccgcggcctgctgctgctgttcgtggtggcccaggcagatcagcctgggttctctacaacatcctgcaggccggcggttgaaccagctaaaccgcatgcaggtcagactgagagcttgagcttgaagattgcatccagtacatgtgtgtacgtggtgtgttttgagggtggtggagtggagtggagtggtagtgacgtggaatgtggtgtacttatgccttaattaatcctgttcctaatcctctcttcccctgaacaaaaattcagtacagctcttcttcttatttgaattcatctagttaatttatttgtcttattgatcaatgtttgtttttgtttccccaaaaaaaaaaaaaaaaaaaa

SEQ ID NO: 97978 - DNA, 494 bp, Oryza sativa
  Clone ID: PAT_MRT4530_95928C.1
gtccggtcaaattttgaagggctctaaaaaaaaaaaaaaaaacacaaatttttttttaaaaaaaaaaaaaaaaaaaaagagggggaaaaaaaaaaggggggggtggggataaagcggcgtcccttctaatgtttccacgcttccgtcccctttcttgcgccccattaactttcctttggtgcccccaaattccatttttttgccctttgtttcacactcattcaccctggaaaaaccctaattttccccaatttaatactctcgcaccacacccccttttctccatttgaaccattcccaatttgcccccctcccctcccctttcccaacttttgccccgcctcctttccaaatggtaccccccctctacccgctaattaacccccccccttgaccggtttccccacaccggcccccttacacttcccccccccttatccccctttctcttcttttttttccattccttttcccccacttgccccggttttccc

SEQ ID NO: 97979 - DNA, 513 bp, Oryza sativa
  Clone ID: PAT_MRT4530_95929C.1
atggcgacgacagcggcgaagatgagcaaaggtgtcgccggcttgccgggattactgctcaggagacggcgacgcctccgcaaaataattgagacaggcaagacgaggtgccctcttggcaagattatttggaagtctcgtgcgccggtgagatgtaagttctttatgtttcttgccgtgcacaatgcttgcctcactgccgacaacctacaacgccgtggatggaagctttctccggtgtgccatctctgctccaacgacggggaaacctgtcagcacatcttcatgggctactcttacacccagcagatttggggtcgggtgcgcacacgcctgggcctttcgtgctcctcgccgtcggctgattttgctgtttggtggcttgcagcccggaaatctgttgctaaggttgaccgcaaaacgttcgatgcgagggtgatccttgtaacctggttgatttggaaagagcgaaacgcaagggtgttcgaagggatcgcggcaacgattccctag

SEQ ID NO: 97980 - DNA, 960 bp, Oryza sativa
  Clone ID: PAT_MRT4530_9592C.1
atggcagccgcggggcgcgcccgaaggcggcctcgccggcacggccgacgggaggcggtgcgcccgcgccccgatggtcgccgccggcgaccaccggcgcgacggagcggcgcccgagagaggggagggaagggggaagcgaaatggcggtcctcggctcaccccgggtcgacggcgacgacgggaacggcgaccgaagcggagagaggcggcggcgcggctcgggtcgacgaggacggcggcgttccggcggtcggcgggcgaaacgaaggggtggacgaggtcggcgaggacgcggcgaagccgaaggaggcgatgccgaagcgggaggaggtccggggcgacgacggcggcggaccgaagctcggcggcgatggcggagagagaggacgacggcgcgagctcgattccgacggggagagagagcggcgagcggcggaaacggaggagggaggcacggggagcgtttatatagtgttgggagcagcgggattcgcggcggcggcggcgctagggcacgggcgaggcggcgggagcggcgggaggacagggatgacaggtgggccccacccgtcagcgagggtggcgggcgggcccgcccgtcagcggcacgcgggcggggaggaggccgattggcccgcgggggagaggagagagagggagggagcgcgtgcctccaccccgccgcccgttgacggccgcccaggtgctccctcgccgcatgcgcactactctttctccatcgctcgccgcctaagcgcctgcctccaccccgctgcctgtcgccggccgcccaggtgctcccccgcctcctgcgcactactcctcctccgtcgcctgccgtcgctggccaccttgtcccacctcgccccaccgaggcgccgtcgctgccctgtcccacctcaccccaccaaggagaaaactgagagagagaaggaaggagagaagaagaggatgaaa

SEQ ID NO: 97981 - DNA, 264 bp, Oryza sativa
  Clone ID: PAT_MRT4530_95930C.1
cccacgcgtgcgttcacacgtacgaccacgcgtacgcaagatgacatgggtaacagccaggctactaagggaagattactcgtcacaatatgcattgagctcatatgacaagttatgatcattctacacgtctgataggatgatgcgcaccattattcatagcaatacattagcaaattaggctgcggagcgtgctgcttaggatgatggacaaaaaatagacatacagcgtcataaagcatactatggatgatctattttatc

SEQ ID NO: 97982 - DNA, 1290 bp, Oryza sativa
  Clone ID: PAT_MRT4530_95931C.1
atggtgagcaccaatgccggcggtattgcgagcaagcaggcgtcgtccatggcccccaacccgggcaaggccacgatcctcgccctcggccacgccttcccgcagcagctggtcatgcaggactacgtcgtcgacggcttcatgaggaacaccaactgcgacgacccggagctcaaggagaagctcaccagactctgtaccgtacctgatccaaatctgatcatttgcagttacaaatatatatactccactattatcgaacttgcgtgcaagacgacgacggtgaagacgaggtacgtggtgatgtcggaggagatcctcaagagctacccggagctggcgcaggagggccagccgacgatgaagcagcggctggacatctccaacaaggcggtgacgcagatggcgacggaggcgtcgctcgcctgcgtccgctcctggggcggcgcgctctcggagatcacccaccttgtctacgtctcctccagcgaggcgcggttccccggcggagacctccacctggcgcgcgcgctgggcctcagcccggacgtccgccgcgtcatgctggcgttcaccggctgctcgggcggcgtcgcgggcctccgcgtcgccaagggcctcgccgagagctgcccgggtgcgcgcgtcctcctcgccacctccgagaccaccatcgtcgggttccgcccgcccagccccgaccgcccctacgacctcgtcggcgtcgccctcttcggcgacggcgccggcgcggccgtggtcggcgccgacccgacaccggtggagcgcccgctgttcgagctccactcggcgctgcagcggttcctccccgacaccgacaagaccatcgacgggcggctgacggaggagggcatcaagttccagctcggccgcgaactcccccacatcatcgaggccaacgtggaggccttctgccagaagctgatgcaggagcaccctcaggcggcggacaagctcacctacggcgacatgttctgggcggtgcaccccggcgggccggcgatcctgaccaagatggagggcaggctggggctggacggcgggaagctccgcgccagccggagcgcgctccgggacttcgggaacgcgagcagcaacaccatcgtgtacgtgctggagaacatggtggaggagacccggcagaggagggaggaggcggcggaagaggaggattgcgagtgggggctcatactggcgttcgggccggggatcacgttcgaggggatcctggccagaaatctgcaggcgcgcgcgcgcgcgcgcgactga

SEQ ID NO: 97983 - DNA, 6180 bp, Oryza sativa
  Clone ID: PAT_MRT4530_95932C.1
ttagaagatgtgatgcaacttctgctgttgtgatgagttgcccatcctactgacaatggcgtagttccaccgctgctggacgaacaccgcgccagcgagcgagacggcggcgagcggcatcaccacgtcgccggccctggggaagaagccctcccggctgatggcgctcgctgtcgctgacgcgtggacgtcgtcggagaacacgtccgccaccggcgtggggcgcacgaggtcgtacacgcgcgggagcaggcgcgcggcggtgatgccgacgtaaaagctccccgcgaggggcttgcagttgacgctccacgcggcgttgccgatcacctgcgggaggaggaacatgtcctgcatcagcccaacgtgctgctcgacggtggcgtcgcggctgctgttcagcgcgaggacgaccacgaacagggccaggtgcgcgctggagcagtagacgaacaccttgccgtcgctcggcacgcgcgccgcctcgcccggcgagcgggccagcaggcgcgccctcgaccgccgcaccttccacgcgatgcacagggtgagcaagaactcggcgacggcgaggatcttcgccgtccggtcgacggcctggtacggcgggttgtaatcgagcatgtaggaggaacccgggggaggcagcggcctggtggtgtcaagctccggctgcacggtgacccgtgccagtagcgcctccatgccggcgaagagcggcatgacgagcccgagagcttggacgccgagcatgacgagggagacgtacggcgcgacgtcggcgtggtgcttgaggtggtgcagctgacagagcgcggcggcgatggtggccgtcagcaacacgacacaaaggacactgtcgacgattgctctggagacgaagtccggccaccgccgcggatatcggaccggctgggccctgagcttcaccgtatcgaagtgcagcgggtcgtcgccggcgacccttgtgctcgcgatctgaaccctcgccgtcgacctgacgaaccagtgcgtcgtcggcggcgggtactccactttcacctcgatcgaacagtccattccttcttcgagctcgagttccacgccctccagcgacatcgcagagctcgcaacacgaaggtcgccgaagatggtgagctccgccgacacgttcagtagccgctgctcttgcaagcagggctcatcgccgggtattgcgcttgatctcgtggtggcatcgtcggatgctggcatgaatcgttcgatcagctggccgaggaagaagacctcgaggtgaaggaccggccgctccatccatccaggaggggagaacaagcttggcatcgccgtaaaccggagcgtgagcctgtcggcgaggtcggccaggcttctcttgccatcgccattgccgccgcagtttggatagctcaagggtagagacctcgcaatgatctccctcaagtcggacggcgacgagttcctccggagaaactcgccggcgagcttgaccttcgtgtagttgtacctgtataccactggcagtataccggagacgcatctctgcagccgtggcggaggcatgcgctgccggaacgacagcgaggagcgtgcgccgccgccggtttcgttgacgtcgacggtggttatctctccgagcatcatgtcgcggccggtgatggagaacgtcgccgggaaggacaggcacacccggaagtggcacgccttgccgccgatgccgcggcatgccaccatggacacctcccctgccgacgcgttccacacgccctcggccgacagcgtcgccccgctcagcgccgtgcgctgcaccgccgtgtaccagtgctcccgtggagacagggcgcggaacacgacggacaccttcacgcccccggggttgccggccatgtcgaggtcgtaccccaggcaccggaggtcgtgcagtacgatgccgacgatggcggcgtcctctgcgcggtccatctcgaacgggcacggcgcgcccgtcgccgtcgagttgcagtggcgccaggttgggcgcgcggtgatcacgccatggatgtagcgttccaggacgtcgcacagatgcctgcccttgtacagatccctcgcgcggttgccgccgtcgtcgctcgaggtgagcggcctgcacgtcccggcggccgcagcaagctcctcggggcgccggaactcgtactggcggttccaggtgggcccggacacgagcttcaccgtgtcgaagtaggcggcgtccgacatggcgcgcgtgctcctcatctcgccgaccaccgctcgggtcgtcagtgtaagctccttcgggtaacgtagcacgagcagcatgctctcgtcggtggcgaccggcggctggaagccagcacggccggagttcttggcccagccccacggatcggcaccgtcggcgccgcgcgttgggagaacgccggccccgaccatgcacaacaccctctcgccgccgccattgccggacctcgctgcctccgtgtacacgccttcaaacacaatcctgagcttggtgctgccgggcaaaagctcgaacaccggcgaggacacgaccggcacgtggtacccgatctccggtgaagcgctcgtccgggagatcgtgaggacgaggaggccactgacgttgacagcattgcgcgcacggcgctcgtcatcgtcgtcgacatgcgtgaccacgaacgtggcgagacggagcgggtccagcggcggccggcggccatcctccgccgcgtcgccgccgtcgaatggcaccagcggatccgtgccggcgtcctggcgccagtcgcccttctcgaaggatagctcacgcttcacgcgtttgacccggtacgcgttatcggcgagctcggacgccgaggtgagcacggaccggcattgccgcttgacatcggcaaagcgaagatagctgtgctcccgaggacggcgacggcgacggcggcggcataggacgggcgcgacggtggtgggggatgggcgcggcggcgacggcggcggcgacgggggacggacgccgcagcggcggcgggggacagcgacggcgtcgacgggggacgggcgtggcggcggcggcggacgagcacggcggcggcggaggaggcgacggggacgggcgcggcagcggtgggggacggcgacggcggcaagtgagtgtatggataagaatcgcgtgtggagaggagctatcccgttggagaacggtatcccgtccccaacaatcttgtagttccagcgttgctgcacgtagatcaacaaggcgagcgccacagcaacgaccggcaccaccacgtcggtggccttctcgtagaaggccatggcgtcgtcctgcacctcgggccggtagatgtacacctccggcggccggagatagcggtagacgtgtggcagcatccacacggcggtgacgccgccgtagtacgcgttcctgaggggcttgcagttgacgcgccacacggcgttgccgatcacctgcggcagcaggaaccactccttcacgaggccgacgtagcgctccacgacggcgcccctcgtgcgcatgcacgacggcggcgcgtgcgacgccgctgccgccttctgttcaacgaagaacacctcctgcttcgacgtcgagctggtgtgcgtggccacggcatggacggcgaggacgaagacgaggccggcaaggtagacgccggagctgcgcaggagcacggcgccgtcgctcgggacgcgccccggctcggccggcgaccgcgcgcgcgcccgggccctcgaccgccgcaccttctgcgcgaggcgcagcgtgaggaggagcgcggcgagggtgagggccttcacggtggagtccatgttccagtggaggtggccgacgtacatccggtagttgtacgtcggccacgccgggagcatcttggcgtcggtgaccagcgtcgcggtgtagccgacggcctggacgccgagcgcgacgagggagacgtacggcgcgacgtccgggtgggacgcgatgtagcgcagctggccgacggcggcggcgatggtgcccgacagcatggcgatgcagacgagcccctcgatggtctgctccgtgagtgtgtccggcggcgcgtcgcggcgcccgccgcggtaagagatcggcgtcgtgcgcagctcggtcgtgttgaaatgcagcgggtcgccggcgtccctcgtgctggagatgcacgccgtcgccgtcgggattcggccgtcctcctggttgtacacgccctccagcgacatcaccggactccagccgaacatcttcccggacaagctcaacacggcggacacgttcagaagctgatgctgctgttgctccacgccgccgtcaatctcagcccgtgccaccgtcgtactaggcaatgtccgcaacggcggcgagtagcttccgacgagcggcccgacagagagcatatcgaggtgtaacgccggccattgcggccacactttctgctccggcaagaacggcagccttggaccgggttggaagtggaggctcaggtcgtcggcgaggtcggagagactcatcatctcatcggcggcggcggcggcggcgccggctttccttggatagcttactagtgcttttgcaatggagctgctccggaatccggacggctcgctcctccggaggagctcgccggcgttctcgaccttcgtgtagtcgtacgccacgcgcagcgacgcctcggagcggccgaaccggttccatggatgtttgggaggcacgctctggtggaacgagagcgggaagtggctgccgtcgccggcggtgatctgtcccacgatgatgctgcggcggcggatcgagaacgtcgtcgggacgtggagcgagacgcggtagtggcacgcctcgtcgccgacggcggcggcgtcgatgacgccgaggcaccccgtcatgcagagctgccccgtcgacgccctccacacgccctccgccgacagcgtcgcgccgcccagaccggtccgcctcaccgccagctgctggtcctcccacggcgacacggcacggaacacggccgacaccctcgcggccggcttctcgccgccgtgcggctcgcaccggaggtcctgcatcgcgatggcgaagccggtgagcatcctgtccgtcgtgttcgtggctccgccgccagtctggaacggccctagctggctgcagaactcgtcggtggagttgcagttccagtttgggacgacggcgagcacgccatggtcaccgggagataactcggtgaggatgtcacagaacgaggcgcctccgtgcaggtcgccggcgcagttgccctcgacgccgtcgtcacagacgaagggacgcgtcgtgctggtgctgcacccgttggccgcgagctcgccgtgttctggccggaacaggtagctggagtactggccaatccgcgacaccagccggactgcgtcgaagtaagcattgtgcgaggcggcgctcgtgctcgtcagctcgccacgcaccgctcgggtcgttaacgtgtgcaccttcgggtaccgtagcatgagcaccatgttgccgtcggccatgaccggcggttcgaagctgccgtcgccggcattcctcgcccaggcccacgggtccgcgctgtcgccgccgcgcatggggagaacaccgttcccgaccatgcacagcaccctctcgccgccgccgatgtcgtcgtcgttacccggcgacctcgtctcggtgtacacgccctcgaacagtatagtgagcctcgaagcgccgggaaggagcttgaactccggcgacacttgccggtgcggcaccgcatactccgacgagcagcagcagttgcgggtgattgtgaagctgagcaccccgctgacgttgacggcggacatcgcgggccgccgccgccgcaacgcgtcggtgtcgatgtgcgtgacggcgaaggtcgcgaggcggaggaacggcgagtcgccaccttgcgacggcatcagcggcgcgcggccggcgtcctggccccagtcgccattggcgaaggacagatcgcgagccagcacgccggcgccgacgggatcgaacggcgacagctcgtcggcgtagcgggcgtagtcgcgtgggatgaacgacgtctccagcaacatgtccggatagtacgcggcggcggacgcggcgaggcagagatggagcaaacacaagccaagaatctgcaagttggcgaccaccttggcagccgccat

SEQ ID NO: 97984 - DNA, 765 bp, Oryza sativa
  Clone ID: PAT_MRT4530_95933C.1
atggccgcaattcttcggaataccatcgttgtcgccatgggcgccggggctctgggcggaccggacgcgctgaggctcttgctcgggttcgccgggcggagccccctcgtcgacatcctcgtcgtcgtcttcgtcatcgccgcggtcaccgcgcccgccctcggcaccattcttctcgcgcgtttcttccgcaagccgcgcgctggggccggcggaacgggtgcggcggtcgatgacccgttcgccaagatgacgctggcggtgtccctggccgtggccgtcctcgtctccgccaccctgatcctcctgccgctgttccagtccgggggcctcggcgcgctcgccttcgccggagccgcgctcgtcgtgggcgcctgcgccgcgcgcgcgcgcggcgtgcttcttgcgaatgcccacggcggcgcccccgccaccgagcgcttcgccaaggcgaccctgatggtgtccctcgccgccgtcttctccctcctcgtcctttgcatcgcggtcggcatcctcgacgcgcctgcgcagcgcctccttgccttcgccttcaagaacccacccgccaccgtggccgtctgcgtcgccacagccaccatcatcggcgccacagttgtcaccttgttcttccgcaaggcgaaaaatgcggatgccgccgccgccgccgccccaacggcgatggccatggcgctcttccacaaccacaagatgatcttggtgatggttacgcccttcgtcgtcatcttcttcctttgttcatag

SEQ ID NO: 97985 - DNA, 799 bp, Oryza sativa
  unsure (1)..(799): unsure at all n locations
  Clone ID: PAT_MRT4530_95934C.1
gcccggcgaatnttggtctnnganccncnngacccggtggagnngatggcatatctcantnaacgganactnggcantctgttcatgtncngncngtatgcttggtagatcnacacaanctcaacgtatttcacnngatggancnggngaaaagacacaaacctccnacnatcactntgnacaaagcagaacacnccncttnagtgnnaaccgctgattagcngnaaaagtgtccncgatatgcnnggacttgacggtgagcatcaatcttannccnngntggtaagnacgaccctacccaananacgcctanccaganacacatncnccatcacangcnncccaatttttttttnttgtgcccctccgcgaanngaaccnncaaaagancaccgcacaccnttgacccntantacccacccntgctnnnaanttnattccnccttnnnaatttcccctctcntnccctcaatncncttctcngntttcccnccnttcctccnnttnttttntnttccctctcttantccccncccctttttctcctctcntcntccncanntttactntcctttctttnnanaactccntcattcntnccattcctncncntcnnntntcncggcntccccntctnnntnccacatcntcttcntnactntctgctancttgtatantnctccntncctccttncntcctcntctnntnnctncttnttctcctcccctctcntatnatanatatcttncgtncgcntcannacncntctcccacactntctnnacccccntttccag

SEQ ID NO: 97986 - DNA, 806 bp, Oryza sativa
  unsure (1)..(806): unsure at all n locations
  Clone ID: PAT_MRT4530_95935C.1
ccggnnttcccggcgtcgccccgcgtccggcagcacggcgagaaacanngaaaaatgaggataaaggagacctcacctggcgtgaccgatcgatatcaagccgcgaataaaacggaggaagccgtagtgaagcgaacaccaccaccacccacgcggaggaggagaagaaacatcacgcgagagtacgagacgaatcgaacccgcgatcaccacttggggggcgggttctgcctcgcattctgggctcctcctcgtctcgcggcggcggcggcgtcggttggctcctccgatcctacgtcgccgatcggacgttcgtgccagtggccacccaaccttaccctggtggtgataggtgatgtacacggcgccggggaggcgatgagtggcagcgtggggaggaggacgtcaccggcggcggtgcggcacggcggcgtgagggctcctccgaggagcgacaaggtgatggagaggcccaactcgaagattccggcgatgaaggcgtcgtcctccaatgctgcggcgccccagatgatcatgaacaggagccaatccaggagagacaggaagattgcactgcagcaagacgtggacaagctgaggaagaagctgcggcacgaggagaacgtccaccgagctctggagcgcgccttcacgaggccactcggcgctctccctcgccttccaccttacctgccttctcagacgctggagctcctcgccgaggtcgcggtcttggaggaaggaggtcgtccggctcgaggagcaaggtcgtcagcttccggcaagggctctacgagggaggctgt

SEQ ID NO: 97987 - DNA, 2836 bp, Oryza sativa
  Clone ID: PAT_MRT4530_95936C.1
gccataaggcaaggagccacagcctccttttgctcgaaaaccgttgatttttttctttccggatttcccagaatgtctaatacttatatgtatcaggtctcgtatatgaatgttagacctaataccacagaagtacaaggcctgatacgtatggataccaacctgatacacattaatccacaagaaaaatggaggagcctcaatgaagcctaaacatccccaaacaaattacaactacgacaccatggatagaaaaatattgtggcggatttctgttgattgagctcagtgagagagaagctgttgttcaactgatcatctaaaagggggaagatgcctcgagcatatccaccagcaggcagcgatgggattctaactgatgaaatttcaagtgttagtttcaaatgtcacctttttaaataaatcaaaatagcaacaatacttctctgtcaagttttagtttgtcggctctgacggtcactgtaggtaggaggaacacggaacaccaattcttcagtggaaagcaacatgatatatatcactctcactacgtggccagaagatacctgaacctgaactcgtacggcacaacctggataggcggcggcgacgggctccggcggctggcctcgacggcctcgacggcgtgccgccgccgctcgccgggcagctgcaggcacacccagtccatgagggagctcacgtccttggtgaagtcaagaaggtaccagtgcaggagcttggggatcgagatgctggtcgccgtcgagacgccgacggcggcctgcaggtagtccctcttggctgcctccagctcttcctcgacgtggcaagccgtgtacaccctcaccgccggcgaagaccagcttccgcaggacagcgcgaatgtcaccgacggctcaggccagtccagtccaaaaacccctctcgccgccgccgccgcgccattgccggatttcacccccttcgggttcacatgctttgcattgtagggcagccttaggatgaagtgctcgatcgtcatggcgctcagcacgcgcccacccacgttgattgtcgctcttgtcagagattttctccatatcacccttttatcttttgctctcgagttgcagatgcatatgctgcacgtaatgaatctagagaaagaagtaaatgtggatggatggatggatggaaccttgggcatcattgccaccagcgtttgtggggtggtaggtgctccatgctcaagaaatgcattcatcatgcaggaattgtaggtgttgatccagaatgctaacttctgctgatgggaaaggcccactaggtcaactgaagagagcttctggagcaaggccctgatttttgccaggtagacattcaatctcctgtcaagaagggagttgctgttgtcaaaaacattctgatcgaatgaagtggcatcaactgctctgaattgcttgtatggaccaatgtccctgctacccaattccaggacgccgtaggggtcgccggcgcaggcggcgccgtcggagctctcgcaggagcctgaaaccgacggagacgatgatcggtcctcatcttggtcactggaggacctcatctgtgagaagatattcagtaggcacgtcaatagctcctcagacactttgtttgcttctgtcgagatgttttctgaatcaatgacagtggtgtcctcagtacctttctgatctttcactgcactaactgtctgaaaatcggcacatttctcctcttctggattactgcattttggcacggttttcagagggaaccggctgtgatctctgaaagagttggtggtacacgattggttctccttcccaggacgatcacctccatggttcatggaaggaatagtccttcttggcgtctgcttgacattggtgactcgcttcagagacgaccagctagcactagcagcttggtcgggaacttggccatggcgcgccggcgtgcaccggtcggtgtcggagaagtacgcgctcttcgccatggagatggtgacagcctcctcgtagagcccttgccggaagctgacgacctgctcctcgagccggacgacctcctcctccaagaccgcgacctcggcgaggagctccagcgtctgagaaggcaggtaaggtggaaggcgagggagagcgccgagtggcctcgtgaaggcgcgctccagagctcggtggacgttctcctcgtgccgcagcttcttcctcagcttgtccacgtcttgctgcagtgcaatcttcctgtctctcctggattggctcctgttcatgatcatctggggcgccgcagcattggaggacgacgccttcatcgccggaatcttcgagttgggcctctccatcaccttgatcagggcggagaagaaaacaaaatggactcgtttagatgcaacaagcgacagtgaattaaatacaacgcggggcttgtcgctcctcggaggagccctcacgccgccgtgccgcaccgccgccggtgacgtcctcctccccacgctgccactcatcgcctccccggcgccgtgtacatcacctatcaccaccagggtaaggttgggtggccactggcacgaacgtccgatcggcgacgtaggatcggaggagccaaccgacgccgccgccgccgcgagacgaggaggagcccagaatgcgaggcagaacccggcggtgaagtggtgatcgcgggttcgattcgtctcgtactctcgcgtgatgtttcttctcctcctccgcgtgggtggtggtggtgttcgcttcactacggcttcctccgttttattcgcggcttgatatcgatcggtcacgccaggtgaggtctcctttattttcat

SEQ ID NO: 97988 - DNA, 355 bp, Oryza sativa
  Clone ID: PAT_MRT4530_95937C.1
tcgttacctccggccggccgccgccgagcccgaaccctagccgccgcttcccgctccggttccgccctaatccgagcccaattcctccaggtttttgagggcttttgttcctctcgttctcctctttcttttcccccaagaatcaaagagaatcggtgaggattggatccgaatcgagttcgttttggttttatccctaaaaccgagttcgatttcttcccgagtcgattcctctcgtttggagctcgatctcttcgatccaatgccatataaagcttccccttggtctgctctttcggttgcccctgtaccgagttctaccgtgcctgctagcgccaccgagacgtgctttaag

SEQ ID NO: 97989 - DNA, 730 bp, Oryza sativa
  Clone ID: PAT_MRT4530_95938C.1
attcacaaattatttttcttttgcaaatacgcccgaacgacggggcgtcaatcttttgtaccatgaaatcgatcagataagttttcaggcacacggcaatgatgctagcatcttactcttacatgctttgcattgtagggcagccttaggatgaagtgctcgatcgtcatggcgctcagcacgcgcccacccacgttgattgtcgccttgggcatcattgccaccagcgtttgtggggtggtaggtgctccatgctcaagaaatgcctggagttgcagaataaacaagcattcatcatgcaggaattgtaggtgttgatccagaatgctaacttctgctgatgggaaaggcccactaggtcaactgaagagagcttctggagcaaggccttcaatctcctgtcaagaagggagttgctgttgtcaaaaacattctgatcgaatgaagtggcatcaactgctctgaattgcttgtatggaccaatgtccctgctacccaattccaggacgccgtaggggtcgccggcgcaggcggcgccgtcggagctctcgcaggagcctgaaaccgacggagacgatgatcggtcctcatcttggtcactggaggacctcatctgtgagaagatattcagtaggcacgtcaatagctcctcagacactttgtttgcttctgtcgagatgttttctgaataatgacagtggtgtcctcagtacctttctgatctttcact

SEQ ID NO: 97990 - DNA, 422 bp, Oryza sativa
  Clone ID: PAT_MRT4530_95939C.1
gtgttattgcttataaggtacacatactatactagaacagggacaaaaccatgcataaaccaccattgggggggccgaagggggcaaaattgggggtgggaggaaaaaaaccactacagaactaaggcaagggctaccaagcaaagaaccccacccaaaaagccaaaaaaaaaagaaaaaaaaaaaagaggagaagagggccaccaaaacttgagtaggggagggcggcttggccaacccgaaaaaaaaaggccacgccgcgcgccgggcgctggagatcatcacaagggggcggggagcaactccggccgccaatccgaccccccggcggaaagcagggcctcgccggtcttggagaaggggagccgcacgtcccaggggagcgacctcagcaggctctccaccccccccaaggggcccgg

SEQ ID NO: 97991 - DNA, 454 bp, Oryza sativa
  Clone ID: PAT_MRT4530_9593C.1
gtagtatctctgaactcaaatattgtcaaggttccatttacaatactactattgtacaaaacaaagttaaagcacatatcgacacggtagagcggaaacgcctaatgccgagtttcatcatagtccctaaaattttcaaattctacgagaaaacaaagttctgaacaagattgccaaacagcacaagattgtgcctgtctgcgtatcaatcggtgtaggacttttcaagtcaagtttattcagcatccactagcattttttacatcgataagccaaaagttttcggtactacatgctagctactagactgtgacagacgatctgggcgcacacttcctccatcgagacaaatttcatcatctggtagcggcggttcattccccatatccctagtcttgtgcaggagaaaagttcctgcaacgatggtccaaaaccacataactgtgttgaatct

SEQ ID NO: 97992 - DNA, 254 bp, Oryza sativa
  unsure (1)..(254): unsure at all n locations
  Clone ID: PAT_MRT4530_95940C.1
atggtgggttgtgagcacatggttttgatggtcgtgctcatgacaattaaggacgggttcacgattttcggttgtgaaacatttaccgtgccaactcacaagctcagcaaaaacccccccttctgtatagtatggttcactgtagagcaccagactgtgaagtggcggagataagcccacngnggtccctggggagtccatgcgttgnttacaannnnnnnnttttaaccatcacnnnnnnntttttttgagnn

SEQ ID NO: 97993 - DNA, 1264 bp, Oryza sativa
  Clone ID: PAT_MRT4530_95941C.1
cttacgcggcgggcccacgctgccgccctcccatcatcttcacagccgagagagagagagaggccatctcccccttcccggaaacgcattcttgccggggacaaaagcctcacgtcccgtcaccttcaccttcgccaccgttcacaccccccgcgacgccaccgccacctttatatccttctccccgccacatcctcgctcctcgtctccgccgcgagcttcacctgaatccgatccgatcacccctcgaccggctccgccgccgccgcctgctgtcccggttcgcgctccacctcctctcgtcgtcgtcaccaccgctgccttcctcggtccgccgcgcgcgcgccgcgctcgccgaccgtgacgagcgggccccggcgtcgcctcccccgccgctcccttctctcccgttcgaccagccccgcgaccgcgtctccggcgccgcgaccgtcctcctcgccgtcgacgccgtctcctcgctcgcagcggcggccgcgtccgccgtcctctgcggcgacgccctccaccagatcgccttccccctggtctccggcgaattcccgtggaccgaggccttcaacgccgtgtccatccagctcgccgccctcgccaccaaacccagcgaggtggacgccgtcgacgaggccgtcggcaagctcaaatccgaagactccaaaaccgccgccgcctcctcctcctgggccacgacgcgcctccgccggccagcccgccgccgccgccgtcgaacgctccccctacaccgcctcaccccagcggcgccgcctccgcgctaggcgccggcggactcgccgccgccgccaccgccgctacttgggggaggcaccccgctgccgccaccttaggagccgccgctaccccgctctccgcctcctcctcctctacacatcgtctgcctccccgccccgctgctcgtcgagcaaaacgtctcgccctctccacaaaatccccaaatcgccaagcacaaccccctccccaatggcgccgcctctccctcccaccgcccccaaaaccatcgccgactacctcatccgcccctccaagcgcctccgccccacctctcccgctcccgccgccgctgcgtcggcccccctctcctcctccagcctctcgccggagcagcgccgccgcgccgacaccaacctcgcgctcgcccgggcgcgccgccacctccgcctcgccgagtccaaaggtaggtgaccccgcgcacaccccaccacaatctacgattcagtccgcgcgaacg

SEQ ID NO: 97994 - DNA, 1254 bp, Oryza sativa
  Clone ID: PAT_MRT4530_95942C.1
acatcgtctgcctccccgccccgctgctcgtcgagcaaaacgtctcgccctctccacaaaatccccaaatcgccaagcacaaccccctccccaatggcgccgcctctccctcccaccgcccccaaaaccatcgccgactacctcatccgcccctccaagcgcctccgccccacctctcccgctcccgccgccgctgcgtcggcccccctctcctcctccagcctctcgccggagcagcgccgccgcgccgacaccaacctcgcgctcgcccgggcgcgccgccacctccgcctcgccgagtccaaagcgtcgggcggcaccgcgaagctggaggagctgctcgtcgaggagacgtggctggaggcgcttcccggggagctgcacaaaccctacgcgctcgagctctgccgcttcgtcgcccacgagaggttgcatagcccggtgcccgtctacccgccgccgcatctagtcttccacgcgcttcacgccaccccgttcgaccgtgttaaggccgtcatcatcgggcaggatccataccatggacctggtcaggcgatggggttgtctttctcagtaccagaggggatcaaaattccttctagcttagcaaacatatttaaagagctgcaaaaagatctaggttgcaccgtgccttcacatggaaacttggaaagatgggctgtgcagggtgttcttatgctcaacactgtattaactgtgagagaacatcaagccaattcacatgccaagaaaggatgggagcaatttactgatgctgtcattaagacaatatcactgaagaaatctggaatagtctttattctctggggaaactcagctcaagcaaagacaagattgattgatgaaacaaaacaccacattttgaaatccgctcatccatcagggctgtctgcaagcagaggtttctttggatgcagcacttgcatatcaggattgccctatatgcggcgccataatatctatttgatgctagacaacccaccaatggctggcacttttctaaaacgaatcagatcttggagaggctgggactatctgccattgattggcaactctagaccatttgaagacatcatgtggtctgtctgcctgacaaccacctcagctttgaagtgggctccattgcaatggaagcatcgcaagtcgccgatcttggaaaagatcggcacgcacttggatggaagtctagcagcaaagcagccggtctcttgcactgttcgcaggtcgttctga

SEQ ID NO: 97995 - DNA, 339 bp, Oryza sativa
  Clone ID: PAT_MRT4530_95943C.1
atggaggctgcagccgcctacacccaccgcctccgcgccgacatcgccgagggcaccggtcgcatggccctcgccatcgacgaccacgacggaggccgccgcctccgcgggagccgccacccgctcgccggcttgcgcgctcgtgcagcccgcccaccacccgctcgccggcttgctagctctgccacccgccgccaactcacgccacccgcctgctcggcttgttcgctgctcactcacggctgctgcgtctgcggccatggcccgactctgcacatgcgcatgttcgtgtggcaatcccaccatcatcttaactgctcaagagctgctctcaattag

SEQ ID NO: 97996 - DNA, 2504 bp, Oryza sativa
  unsure (1)..(2504): unsure at all n locations
  Clone ID: PAT_MRT4530_95944C.1
atgcctctggtgaccgctgtcgcgaccaccagccaccgtctccgcgagccaccgccactgctagcggccacttcactgttgccctccgccacgccgccgccaagtcctccgccggcgtcgtcggccgacgtcgccgccgccaactgccgcaaccacccgtcgccgccgttgccaactgccgtcaccagctgtcgcaagtcgaccgccgtcgccgaccaccacagccgaccaccctctagatccggtcgagaggcgcggatctggggaggcaccgccgtcatcgccgccgagcaccgcgccgtcgccgcacagggaccaatgccgctgtcttcgcgccgtgccggcctcaagccgcgtctctcacgcgggtcccgctgccaacgctgcgcccacacagccgccggtctctttcttccccgcctccacacccggctgcacactgtcgtcggtatgctggccggtcgccgcctcgacggaggggatccggcctcccacgccggagaggacagatccggactggggggcgccggatccagcgaggagcgcctcctccgccccgtcggccgccgccagcgccgcctcgtccgccccgtcgccgccgccgcctcgtccgccccgtcgccgccaccttctctgccccgccgccgtcgcctccccagccccggatctggccgcctccgccgccacgggcgccgggatgccccgccgccgccgtccttgcgcccggccggctttccggtgggccactcgggcggcggcgaggcgaaggggagggggaaggcgcggcggcggccggcgcgtgtgggggcgctcgcatcgcccctggggctggagcgacacgagcctatcactggaccccgtctcatggtaaatttttcttcgccatcacctgttgctgttgctgttgccacccccaacgagtctatcaggacacaggagaggtatcaggagaatgggggcgtaacagaacatgggaacatacccattacacgtgtgcgcgacaccctcaaagacggggtggttcgttgcacgggtaaaatatctgtatcttccctgcaagtgatgtacggtttgttgtgtggcatccacggatgcgatgtcaccagtggaaacgcgcggccctgcacggagcttgagtgcctggagattgtaagatcaaatgtcataaagatgaaagctctattagtggggatgttcctcaccgacaagtaccacgcgcttctccctttccacgccagcggcggcggcgtgaaggatcaccggcggaggccgggcaaggcggtgcccggggcggcgggtggtggtcccgggtccgcccggttcggcgccgcgctgtccgcgaggctcgggagtttgctgccgctgccggcgtcgccgttggctgcgttggcgcggctcgcggatctcctcgcgcttgccctcgctgacgctgttcccgcgttggctggtgagggggactcggccgccgtcgccgcgcacctcgacgccggggtcgcgctgctcgacgcctgcaacgggatcaccgcgcgcctcgaccggctccgccgccgccgcctgctgtcccggttcgcgctccacctcctctcgtcgtcgtcaccaccgctgccttcctcggtccgccgcgcgcgcgccgcgctcgccgaccgtgacgagcgggccccggcgtcgcctcccccgccgctcccttctctcccgttcgaccagccccgcgaccgcgtctccggcgccgcgaccgtcctcctcgccgtcgacgccgtctcctcgctcgcagcggcggccgcgtccgccgtcctctgcggcgacgccctccaccagatcgccttccccctggtctccggcgaattcccgtggaccgaggccttcaacgccgtgtccatccagctcgccgccctcgccaccaaacccagcgaggtggacgccgtcgacgaggccgtcggcaagctcaaatccgtgctcgacaacggcgacggcgacctcgacgaggcggcgctgcgggcggcggcgcaggaggtggagaggcggatggaggagctgacggcgccgttggaccggctgtccgacgccgtcaacggcgtgttccgggcggcgctgtgcctccgcaacgcggagctcgggagcatcatggtgggacccgccgaaaagacgccgtgtaaatagccgtttccaccgtgtgtcgtccgtagccatactggtatgtcactgtataaatacaagtataattctggaagtagtacagttctacaggtacagggcaacatggggtggtgtctcagccaaatgcagtggtttggtgctttttctaccagctgttactactatctgtgtgtcaaggttgccacatatgagaacacagtgcaattcgcacccttttgcagatgtggaatccagtaaaaacttgggaaaaccgtggcaactgttcacctacctatgtaattttgcggcttcatacatactgtacgtatacccattaagaaatttgtgaaagnnnnnnnnnnnnnnnnaaa

SEQ ID NO: 97997 - DNA, 419 bp, Oryza sativa
  Clone ID: PAT_MRT4530_95945C.1
caggttggaggaaagccaggaaggcagccaggaaggagggagggaagccaggccggccggccagggggaaggaaggaagattgcaccagatgtcggaacacagcttgaagccttgggggtgttgcagcggaacagtgcttgaattgggcttgaattaaacagtgcagcttggggaccgcccagccagcaggccaaacccaggttgttttcccaaagcacttcaattcccagggcccacttcccgaccttgagccccttccttgcaccccactccgccccaacattcccttggcatcaaaccttcaacctccccatcaacctcacctcctcgtcaactactcgccgctttagagaatccaagcttacgtacgcgtcatgcgacgtcatagctcttctataagtgtcacctaaattcaatt

SEQ ID NO: 97998 - DNA, 1467 bp, Oryza sativa
  unsure (1)..(1467): unsure at all n locations
  Clone ID: PAT_MRT4530_95946C.1
atgtcggggaagaagccgacggcggcgccgccgacggcgaggctgagcagggcatgcgtgatgatcatagtggtggcgagcgtggagaggttcgcgtacaagggggtggcgtcgaacctggtgacgtacctgacggaggtggtggagatgagcacgtcggcggcggcgaagagcgtcagcgcgtggagcggggtgacgtccatgctgccgctcctcaccgccgtcctcgccgactcctactgggaccgctactccaccatcaccgcctcctccctcctctacgtcgtcgggctaataggcctaactttatgggcactgctacacacacggatgccatgctccacgctcttcttcccgctctacctcatctccatcggccaaggcggctacaacccttcgctgcaagccttcggcgccgaccagctcgacatcggcgacgacgacgatgacggcgacaatggcgcaacagcagcaacagaagagcagaggagcaaggtgaagagcctcttcttccagtggtggtacttcggcatctgcagcggcagcctgctggggaacacgacaatgtcgtacgtccaggacaccgtcggctggggcctcggcttcgccgtcccggccgccgtcatggccgtctccgtcgccgccttcttctgctgcacccccctctacaagcagaggcaacccagagctgttcatcgcaagccctgtcgtgacagcgtcctcaaagccctgaaatcgcttctcgcaagtgtcactggcgccagaaagatcaccctgccatccagagacggcgacgatgacactgacatcgtatctgagctagagttgcaggagaagccactgaagctggctgatcagaagcaggaggcggccatgggagaggctgcagcaccaagtgtagccaagatcataagctccatcaccgtctccatcatcctcctcatgccgctctacgacacggtggtggtgccgctcgccggcctcgtcgccggccacggcaaggggatcacggtgctccagcggatcggcgtcgggatggtgctctccatcgtcgccatggcggtcgccgcgctcgtcgaggcgcgccgcctccgcgccgccgcgtcgtcctcgtccggcggccgcctgagcatattctggctcctcccgcagtacgtgctcctcggcgtctccgacgtgttcacggtggtgggcatgcaggagttcttctacacccaggtccccagcgccatgaggaccgtcggcatcgcgctctacctcagcgtcttcggcgtcggcagcttcgtcggcgcgttcctcatcaccgcgctcgagatggtgacggcggngggcggcggcggcgggcacgatcacgggtggttctccgatgatcccccggaggcgcggctggaccagtactactggttcttggcgctcctcagctgcgtcagcttcgtcgtcttcacacacttgtgcaagtactactag

SEQ ID NO: 97999 - DNA, 469 bp, Oryza sativa
  Clone ID: PAT_MRT4530_95947C.1
tacctctgcatcggcaccgtcatccaccgcgccgagctcctccggatgctcaaggagctcttcccccagtaccccgtcacttcaaagtacgtactccctccgtcttaaaatataacaaggttatactagatggagtctggatgagatatattctagtacatcaaatctagacatgggtatcctctgtctcaaaaccttatattggatgagatatattctagcacaacgaatctagacatatccatatctagatttgttgtactatgatggagagagtaacaatttttacactactccaaccatcctataaaaaaccaatctgttagactagtagaacacatcctattactacgaatccggacatacatatattaagatttatagtattagggctgtctttagatccaaactttggatctaaatttctaactttttccatcacatcaacctgtcatacatacacaacttt

SEQ ID NO: 98000 - DNA, 1566 bp, Oryza sativa
  Clone ID: PAT_MRT4530_95948C.1
atggtggtgacaccaaggctgagcagggcttgtgtcctgatcatagtggtggcgagtatggagaggctggcgtacaagggggtggggtcgaacctggtgacgtacctgacggaggtggtggagatgagcacgtcggcggcggcgaagagcgtcagcgcgtggagcggggtgacgtccatgctgccgctcctcaccgccgtcctcaccgactcttactgggaccgttactccactatcacggcctcctccttgttctacgtctttgtgttaataggagttgccttagtggcactgttgcgcacaagggtgccctactcgacgctcatcttcccactctacctcatctccatcgggcaaggcggctacaacccttcactgcaagccttcggcgccgaccagctcgacatcggcgacgacgacgacggcggcgacaatggcacaccaacaacagaagagcagaggagcaaggtgaggagcgtcttcttccagtggtggtacatcggcatgtgcagcggcagcctgctgggcaattcgaccatgtcctacgtccaggacaccgtcggctggggcatcggcttcgccgtcccggccgccgtcatggccgtctccgtcgccgccttcttctgttgcactcccctctacaagaagaggcaaccgagagttgttcatcacaagccttgtcgtgacagcgtcctcaaagctctcaaatcgcctctcgcaagtgtcactgccagaaagatcaccctgccatccagagacggcgacgatgacgctgacattgtgtctgagctagagttgcaggataagccactgaagctggttgatcagaagcaggaggaggccatgagtgaggctgcagcaccaagcgtgggcaagatcatagtgaggctgctgccaatctggacgatgctgctcatgttcgcggtcatcttccagcagccgatgacgttcttcaccaagcaggggatgttgatggaccaccgcgtcggcgccgtgttcgtgatccctccagcgatgctgcagagctccatcaccgtctccatcatcctcctcatgccgctctacgaccgggtggtggtgccgctcaccggccacggcaaggggatcaccgtgctccagcggatcggcgtcgggatggtgctctccatcgtcgccatggcggtagccgcgctcgtcgaggcgcgccgcccccgcgccgccgcgtcgtcctcgtccggcggccgcctgagcatattctggctcctcccgcagtacgtcctcctcggcgtctccgacgtgttcaccgtggtgggcatgcaggagttcttctacacccaggtccccagcgccatgaggaccgtcggcatcgcgctctacctcagcgtcttcggcgtcggcagcttcgtcggcgcgttcctcatcaccgcgctcgagatggcgacggcggggggcggcgggggcgggcacgatcacgggtggttctccgatgatccccgggaggcgcggctggacaagtactactggttcttggcgctcctcagctgcgtcagcttcgtcgtcttcacacacttgtgcaagtactactaa

SEQ ID NO: 98001 - DNA, 1326 bp, Oryza sativa
  Clone ID: PAT_MRT4530_95949C.1
cgtgaacacgtcggacacgccgaggagcccgtactgcgggaggagccaaaatatgctcaggcgccccccggacgaggaccaccgcgcggcgcggaggcggcgcgcctcgacgagcgcggcgaccgccaaggcgacgatggagagcaccatcccgacgccgatccgctggagcaccgtgatccccttgccgtggccggcgacgaggccggcgagcggcaccaccaccgtgtcgtagagcggcatgaggaggatgatggagacggtgatggagctctgcagcatcgccggggggatcacgaacacggcgccgacgcggtggtccatcagcatcccctgcttggtgaagaacgtcatcggctgctggaagatgaccgcgaacatgagcagcatcgtccagattgggagcagcctcactatgatcttggctacacttggtgctgcagcctctcccatggccgcctcctgcttctgatcagccagcttcagtggcttctcctgcaactctagctcagatacgatgtcagtgtcatcgtcgccgtctctggatggcagggtgatctttctggcgccagtgacacttgcgagaagcgatttcagggctttgaggacgctgtcacgacagggcttgcgatgaacagctctgggttgcctctgcttgtagaggggggtgcagcagaagaaggcggcgacggagacggccatgacggcggccgggacggcgaagccgaggccccagccgacggtgtcctggacgtacgacattgtcgtgttccccagcaggctgccgctgcagatgccgaagtaccaccactggaagaagaggctcttcaccttgctcctctgctcttctgttgctgctgttgcgccattgtcgccgtcatcgtcgtcgtcgccgatgtcgagctggtcggcgccgaaggcttgcagcgaagggttgtagccgccttggccgatggagatgaggtagagcgggaagaagagcgtggagcatggcatccgtgtgtgtagcagtgcccataaagttaggcctattagcccgacgacgtagaggagggaggaggcggtgatggtggagtagcggtcccagtaggagtcggcgaggacggcggtgaggagcggcagcatggacgtcaccccgctccacgcgctgacgctcttcgccgccgccgacgtgctcatctccaccacctccgtcaggtacgtcaccaggttcgacgccacccccttgtacgcgaacctctccacgctcgccaccactatgatcatcacgcatgccctgctcagcctcgccgtcggcggcgccgccgtcggcttcttccccgacat

SEQ ID NO: 98002 - DNA, 1249 bp, Oryza sativa
  Clone ID: PAT_MRT4530_9594C.1
ttttttttttttttttttttttttgttttccatgaagtgtgcataatttgatgaaattgtaacacaagtttctgagtgctcacatgaatcatttttctaacaacgtatcatgaatctgaggcctacagacaaataccaatctgtttttctttggttgagcaaccacaattaacaactttgtgccttagagtgcagctcttgctaccgacgatgaagtagctgaagaactgcgacctgcttgtcccagatatagtcaatcagtcttgtcttcctgtgctccaatctcctgtaggtagtgctccgcatccaacgccgccatgcaacctgatcccgcggcagtaatggcctggcgatacttcttgtcctgaacatcaccggcggcgaagactcccttgacgctggtgtgagtggagccgggcttggtcacgacatagccatcggagtccagctcgagctgcccgccgagaaactttgtcgccggctcgtgtccaatggcgaagaagagcccggcgacctggaggtcggagacctcgccgctcaccacgttcttgaccttgacgccggccaacggaccgccgtcggcgccgccgtacgcctcgacgacctcggagtcccagacgacctggatcttggggttggagagggcccgggcctgcatgatcttggacgcgcggaaggcgttgcggcggtggatgatgtagacgcgggagccgtacttggtgaggaagttggcctcctccatggcggagtccccgccgccgacgacggcaatgggcttgttccggaagatgggcgcggcgccgtcgcagacggcgcaggcggagatgccgcggttccagaatgcgtcggagccggcgaaatggaggcggcgcgcgacggcgcccgtggccacgacgaccgcgtcggcgtgcacggcggtgtcgccggaggcgacgcggaaggggcgggcggagaagtcgaccgcggtgacggtctcggtgaggatgctggtgccgaagcggagggactgggcgcggcaccggtccatgaggtcggcgccgaggatcccgtcggggaagcccgggaagttctcgacgtcggtggtggtggtgagctgcccccccgccgcgatgtcgttggcgaggcagccctcgaagagcacgggcttgagctccgcgcgggcggcgtagaccgccgccgtgtgcgccgacggcccgctcccgatgatgcacacgcgcgtgcgcagcgggcccgcggccgcctcctccat

SEQ ID NO: 98003 - DNA, 198 bp, Oryza sativa
  unsure (1)..(198): unsure at all n locations
  Clone ID: PAT_MRT4530_95950C.1
attaataannaatttttactcctacttttgttaaagaatcattaaaggatttcatgaaaaaaaaaagttccccaagtgccaggatcacattttaacttaaatgtttatggcaccgatatttttttgcgccggggctcttatctttttanaaatgaactantaaattattcacacattattaataaataaccttatact

SEQ ID NO: 98004 - DNA, 152 bp, Oryza sativa
  Clone ID: PAT_MRT4530_95951C.1
ttgctgctctggacaagatagaagctgccctgtcgaagttcggtgatggtccattcttccttggacaatttagcttggatgtgtcgaaggtaagggttgggaacttctttcccgcgtacataaaacggagtaattcattagcgcataagtaa

SEQ ID NO: 98005 - DNA, 183 bp, Oryza sativa
  Clone ID: PAT_MRT4530_95952C.1
atggcggctctagcggtgagctccatgatgtcgccgctgatttgcacgttcacggtggagtggatggccacgaggatctgttcatggcaagtgtcgatcgcttacgccatctccatgcagtgcgacgccaccagtgccgccaccaacagaatggctgccgctgtcttcatgcctgctacttct

SEQ ID NO: 98006 - DNA, 1089 bp, Oryza sativa
  Clone ID: PAT_MRT4530_95953C.1
gccaggcgtccgccaattcgttcttttaacggcccatcacaaaccaataaaaaaaaaaaaaaaaaaaaaaaaaaaaaaatcccggccggccaacgataaacacaagcagttagctagcctagctagcttctcagccaccagagaaacagcaaataattcagcagagaagagagcagaaaaccaaagccaaatggcttcaccatcttccttctgcctcctcgctgctcttcttgcgttggtctcatggcaggccatcgcctctgatcctagccctctgcaggatttctgcgttgccgatatgcactcacctgtgcttgtcaatggatttgcttgcttggacccaaagtacgtgaacgcagaccacttcttcaaggcagccatgctcgacactcctagaaaaacaaacaaggttggatccaacgtcacactgatcaacgtcatgcagatccctggcctcaacacgctcggcatctcaattgcacgcattgactacgcacccttgggtcagaacccaccgcacacacacccccgtgccactgagatcctcacagtgcttgagggaaccctctatgtcggcttcgtcacatctaacccaaacaacacactattctccaaggtgctcaacaagggtgatgtgtttgtgttccctgaggggctcatccacttccaattcaaccctaacccccatcagcctgcggttgcaattgctgcacttagcagccaaaaccctggtgccattaccattgcaaatgcagtgttcggatcaaagccaccgatctcagatgaagttttggcaaaggcattccaagttgagaagggcaccattgattggctccaggctcagttctgggagaacaaccactactaaatctaaacaaagtatatgtgttgttatactatgtataagtttctattctgcaatatataaaataaatttgtatttctagtcggcttaattatgtgtgcttgcaagcacatcaacaatacattattttgttgggaaaaggctttgtatgttgttctagtgtggtatcccctgttataaaggtaataaaggaaaacattggtattaaaaaaaaaaaaaaaaaa

SEQ ID NO: 98007 - DNA, 321 bp, Oryza sativa
  Clone ID: PAT_MRT4530_95954C.1
atggacaaagggaacatgggatgggccgggatcgccaatcgaaggccgcaatgggggccagatcaccaggtttcatgcgccttcttcttcatctactcggcggcggcgcttgcattcctcagctcgaatgcagcgcacaacgcgcacccgtcggcgagcgcgcgcggagaaggacaagggcggcggccaccggccggcggggagaagggcagggggcggcagccatcgggcggggagggtggcgagcgggaccgtccaagcgtgagcagcgcggacacttggactggagaagaaaccggcgagagtgctcaatatcgatga

SEQ ID NO: 98008 - DNA, 1936 bp, Oryza sativa
  Clone ID: PAT_MRT4530_95955C.1
atggaagaagcgtggccgcctctcgcccccgccccggaagctgcggctcctcccggaggaggaggaggtggaggagcatggggcgcggcggcggtggcgcagcggaaggaggtggccgaggagtcgtcggcgcatgcggtgagccggctggtggcgagctgcgccaacacgagcggcgtggcggtggccgtggtggacgccaacgccgtcatatcgggcggagccgcgctctcctcgtccgccgcccgcctcgtcacggtgcccgaggtgctggaggaggtgcgcgacgcgtccgcgcgccgccgcctcgcgctcctcatggcccctgtcgagaccctcgaccctgcccctgaattcgtcaagaaagttgtcaaatttgcccgggaaacaggagacctccagacgctttcagatgttgatatcaagattattgctctagcttacatgctggaagctgagatccatgggactaaccatttgcgggagcagccacctcctctgcgtgtggtgaatgtgagaaacctgaaagaggctccactgccaggttggggctctaatgtgcagaacctagcagaatgggaagaattggaccagatgtctgaagcaggtggggatctcaagtcacgcatacttccactgaaggatcttgagaaccacgaaataccgaatagtgagaccaacagtatttctgacaagcaaggtgatgaagagcatcagcctgcaaagaaagatgtaggtattgcttgggaagatgatgagaataatgaaggttggttgcctgctgttagtcgcagtacacacagaagatatctacgaaggaaggcgagacgtgatgccctcaaggaatctgaacaaagtattgagacaagttctgctgccccatcaattgatgacgataaaattttatctgaaaatggtttgaatccagtggatggcccttccgctgatactgatgttatggagcaccaagaagtgaatgaacctgaaattgttgcagatcattcgcaatctgataataaggacaatggggtaggcaatgttggtgatgttgaggagaccggcggtacggacgcatgcattgaagagttggataatttggatatcaaaagcgactctgaggaaggtgtcgattcatctcttgcagatgatgggagcagtgagcagagttgggcgttgaggtccttatctgaatctactgtagcatgcataaccagtgactatgccatgcaaaatgtcatcctgcagattggtctccgtctcttggcaccaggtggcatgcaaatacgtcagttgcacaggtgggttctgaggtgtcatgcttgctataaggtgacccaagagattgggaaaatattttgcccaaaatgtggcaacggtggcaccttacggaaggtttcggtaacagttggtgaaaatgggatcactatggcctcacgacgtccgcgtgtgacacttcgaggcacaaaattttccctcccaatgccccaaggtggaagagatgccataactaagaatcccattttgcgtgaagaccagcttccccagaaggttctgcaccctaaatcgaagaagtcaaacaagcaggacgatgatttcttgggtgtcgaggacatattttcgcacagcggtgaaaagaaagtaccactgaaacctccagtgaggaaggcccttgcaatgttcagtgggaaacggaatccgaatgacaaccacttttctcgcaagaagcattgaatttctgttccccatttgttgctcttttactatcatggttttgtactgcattgtttgacgagagaagtagagtgtatcaccttgatggtgattgtggagaaaaaagtcatcctgtagactgaactctgatgaagcatgtaagctatacaattttgcagaacatctatgtaaggctcagttccatagtaccattttcatatcaaaa

SEQ ID NO: 98009 - DNA, 945 bp, Oryza sativa
  Clone ID: PAT_MRT4530_95956C.1
gagaaacacaagcaatattagttagcttcccatcagagaaagagagcagaaatccaaagccaaatggcttcaccctcttccctctgcctcctcgctgctcttcttgcgttggtctcatggcaggccattgcatctgaccctagccctctgcaggacttctgcgttgccgatgtacactcacctgtgcttgtcaatggatttgcttgcttggacccaaagcacgtgaacgcggaccacttctttaaagcagccatgcttgacactcctaggaaaacaaacaaggttggatctaacgtcacactgatcaacgtcatgcagatccctggcctcaacacgctcggcatctcaattgcgcgcatcgattacgcaccattgggacagaacccaccgcatacgcacccccgtgccaccgagatccttactgtcctcgagggaaccctctacgtcggcttcgtcacgtctaacccaaacaacacattgttctccaaggtgctcaacaagggtgatgtgttcgtgttccccgaggggctcatccacttccaattcaaccctaaccctcatcaacccgcagttgcaattgctgcactaagcagccaaaaccctggtgccatcactattgcaaatgcagtgttcggatcaaagccaccgatttcagacatagttttggcaaaggcattccaagttgaaaagggcaccattgattggctccaggctcagttctgggagaacaaccactattaattgccttaaaaaaattatgcttacagaatctatgttgtaatttcatatatagcataaataagtggtatgtattttgtatttcttatccgttcttccaaggtgtttgttctttacatttatgtactaatgtaaggccaatataatacatgtatggtttcccgtcgaataaattgaatgtgccaaaactctggaagaaaaaatact

SEQ ID NO: 98010 - DNA, 606 bp, Oryza sativa
  Clone ID: PAT_MRT4530_95957C.1
atggagcctgatcagtggcatggcaatggcaaaggcctttctccatcatgcagatgcaggggcaagctagcagacatgccttgctcttgtggggtaatgaagcactgggcagacatagaggaggcgagctacggtggcggcggcggtggcggcggtggttctcctctctttgatgagttggcggcggcggcggggaggaggagcatctccggcgccggccgcctgaagatccctgtctccgggaaggaggggagacgcatcatggggctcttaggtatggtgggcgactcattcggttgctcagctactggtgagcggcttgtctctgctgcaagggatggagacatccaggaggctatggccctgttggagcttaacccccgacttgcgcgagctctccggaggctaataaacaacaagtctgatgggggcgtcacaccgcttcacttggcagcccttcatgggcatgctgagtgcgtgcaattgctgttagaccttggagcctctgtttcagaggttcaggaagcacacctctccactatgcggcctgtggtggaagtgctgtatgctgtcaaccggagcaaacatgagagctcaaaatactaa

SEQ ID NO: 98011 - DNA, 1155 bp, Oryza sativa
  Clone ID: PAT_MRT4530_95958C.1
atgcggcaagggcaaatcgcgcgtgagagcgtcgcgggcccaattgggcatgcggaaaatcgtgcgatgaactttcgccggaactccgccgccggcgccgctccgccctcgccgtactactcgccatacccggctcagtcgacgttcctgccgccacacgtctacttgccacaaccgctgatcaatgccaccacgtacaacttcgcccaggcgccggcggcgcccgcgccgccgccgcacgtcaacgtgccacaaccggcgatgcatgccgccgcggcgccggcgccgccgctctggctccggaccatgacggcggcgaacctcgactcggagatgggactgatcggcgagatgatggtgcagtacccctacgtcaccatcgacgtcgagttcgccggcgtcgtccaccacccgccttacaccggcagccgccccacgccggacgagatctacgccgccttgaagtcgaacgtcgacgaggtgcccgccgtccagatcgggatcaccctctccgacgcggagggcaacctccccacgagatcttcgtcttctcctgagcaggagatcgcgtgggaggtcgtcttctccgacttcgacgccggccgcgacccccacgtcgtcgactccgtcgagttcctcaaaaaccaaggcatcgacttcgacctcgcgcggcagatcggcgtcacctccacggcgttcggagagaagctgctcgccatcctgccgccgccgtcgcggcgtggcgagctcacctggtcggcgttcggcggcgcctacgacatgggttacctgctcaagatgctcaccggcggccagccgttgccggagacgagacaacagtttatgcaacttgtcaaatctcggctaggcggcggccggatatttgattcaaaatatttggtagaacacgaccgtcaagatctgcgcaatgccgggttgaggcacacggcagatgttcttggcgtgagacagcaggagggggtgaagatgctggctgggcacaagagcgtggtagcagctgccatctttgccacaatccggccggccggcggggcgaggtgggagaggagggcgtcggcggtcagcgacgcggcgacgagcaatgcggcggcgacgacacaagagaaggggaggtggcggttgcagagaaagtag

SEQ ID NO: 98012 - DNA, 2160 bp, Oryza sativa
  Clone ID: PAT_MRT4530_95959C.1
accgaagcggcgcaggctccaatctccatctccacctcgtgaagcaggagactcaccgctcccgacggagaagatggccggcggcagctgcggcggcggcagccgcgtgaaggtggtggggcaggtggagcgggtggtcggggcgacgctgagctacgcggagttcgtcgaccgcttcatgaggcccaacctccccgtcgtcctcacgggcctcacctcctcctggcggtcctgccacgactggacgctcgccgccgccgccgaccgccgcgcccccgacctcgacttcctcgcccgaagcttcccttctcccctcgtgcaggttgctgactgttcctcgagggagttctcggaccagaagcggctcgagatgtcgatgcgggagtttgtcgaccactgggctgcgagttcgagcaatggggattctgatggttccctgctgtacctgaaagattggcattttgtgaaggagtaccctggttatgttgcatacaccacaccaacattctttgccgatgattggctcaacatgtatcttgatagtcatcctatacatcgagattctgacattgccaaccatacaaatgaaataaactgtgctgactatcggtttgtttacatgggaccaaaaggaacttggactcctcttcatgctgatgtttttaggtcatacagctggtcggcaaatgtatgcggcagaaaactatggctctttctaccaccatcacaaagtcattttgtatttgataggaacctacgatcttcggtctataacataaatgatgatgtttctgaaaagcagtttcctgaattcaataatactaaatggctagagtgcactcaggagcagaatgaaatcatttttgtgcctagtgggtggtatcaccaagtccataacctgatctgggctgcaaatgatagccgccctaaaaacagaattttgactgaaaacttgaaggaggatactatatcaataaaccataattggtttaatggctacaaccttcattgggtgtggaacttgcttcatgaagattacaaggtagcaaaagattatattgaagacattcgggacatatgtgacgattttgagggactatgtcaacgcaacttagcagcaaatacaggcatgaacttctatgacttcttcgtcttcataacacgttttgctttagccaatatagttgagctttaccatattcagaatccaaaagatactgacttcatttcagccgaaactgctaaccactttgtctataatctcatgtcgatccgtgatgttgcatcaaaaatggtatctacagaagctttcaataccgagaatatttgtaatatctcagaacaaaaccggagtgctttctctgatatcataaaaatattggaagaagagagtttcagaaggttattggtggcgttgtcaaaggcatataattacatagacagaggacaaaaagattgtctcaaaatgaaggattcaagtcagaagggttgtttgtcagtaacctgcttaaaacctgactgtaatgttgttggtgacattatttctttcatgcgtgagattcatggacctgtggatttggtaacactaattgatagtgctctctctgatagatagattatgcttaccttgtgacttgtgcttgcaccattgcataacctatttctttggaatcctggatctttaccagttgaccactgttgaatgctcccattctctgcatttctggaaggatagctaagcatgacattcccattaccatcttgtgattctcaaatctggtattgcaacctttatcttttaaaatcatttcacagtgtgaaggatgggcaagagtactgtaccatctgacagtaattatgttgtgaaaatttctcatgaagaactagttggaaagtaaggagctaattgttggtcagtgacttgctgtcttggatatgtatttcaaggtgaatccactgaaggtgacacattgacatactgctaatactttcagaaaatgacctcaaatgtttcaccatagaagatagaaaatactatgttccttctttatgttgttttagatgcgtacagtaaaacatcaaagtctcactaacatttttgtattggagaccgtgtcaacgtcctaagcgacatataagaaaaaatgatgttgttttcac

SEQ ID NO: 98013 - DNA, 3556 bp, Oryza sativa
  Clone ID: PAT_MRT4530_9595C.1
tcagaggttgtcgaacgtttctcggaaatcgtcaatcaatgagtcgcttgtcttggtcttgacaacaatgtcgtcgacataggcctcgacattgttcccaagttgatcgttaagtgccccttggaccgtgcgttggaaagtatttcctgcggttatgagtccaaatggcatcttgacatagcagaatacaccgaatggcatgatgaatgttgtcttctcctcgtcctctttcgccatgctaatttggtggtagctagagtaggcgtcaagaaagcttaacaactcacaaccagctgttgagtctaccaattggtctattcgaggaagagggaagtgatccttgggacacgccttgttgaggtcggtgaagtcgacacacatcctccacttcccgttggccttgcgcaccatgactggattggctagccactctggatggagaacctctctgatgaagccagctttgagaagcttgtcgagctcttctcgtatggcttgtttccgatctggtgcaaatctccgcagtttttgttttactggcttggcatcgggtcgcaccatgagtttgtgctcaatcacctccctgggtaccccgggcatgtcgcatggtttcttgggtggctcagctgtggcgggtgggttggacgtgtgctcaaccatgtcgaggctccgcttgtcgcactgcactgccagctttgcgttcccctgaatagtgattgttcccttcggcccaagcatcttgagcacttggtatgcgtggtgagatgcggccatgaacttcgcgagtgcagttctcccgatgatggcattgtatgttgtatcaaattcagcgacatcaaaggtgatctgctctgttcggaagttgtttgcttggccgaaagtcacaggcaacgtaatcttgcccaatggcttggacgatgactgaggagtgattccgtggaaaggttgatcagtaggtgtcaactcgcttcgtgggattcccaccgcgtccaaggtgctggcgaaaagaaggttgatggagctgccgccattgatgagaacccgtgcgaccttgatattttgaatagtgggctcgatcacgattggatatcgtcctggaatgaccccagtcttggggtagtcttcctctgagaattcgatcttctgttcggaccacttcatcttgggcgcagccccctgccatgtcgaacaaacttcgcgctccactttcttgtactctcgcttcgaagagtacgccatagaacctccgaagatgtgcgagacatggagatcggaatctgggtatgctgagtccgagtcctgagtggctgcttccgtggccttctcgactacacgtacttgcttgcccttccccaatgcgagttgctttgtgagtgattttttgaaaacgaaacaagcttctaaggagtgtcttgcgactcttcttcttgcttgattccgatgcgtctttggctggtttcttctcttcggcttgtcgttcttgcgtctcagtgtgtcgtccatgtgagcgcatcgatcgacaatctcgaatagttttcgagcagttgttatccgtcttgtcgccaactcctgggtggtgtagtgatctctgacaccagtcttgaaagcgcggatcacggaggcatcggtgatctcggggatcgtatttctgcactcattaaagcgccaaacgtagtccctcaatgattcgcccggattctgtgtcaacgcgtgtaggtcgtcttcgatcgcgtggcgtttgtatgttccttggaagttagcgacgaactgctgccacagatctgcccatgaagaaatccagtatggtgggaggtggactagccatgaatgtgcagatcctttcaacgtcgccggcaaataatttgccaatgcgttgtcgtctgctccggcagcgtagaatactgcggaatagacctgaaggaactccttagggtcggtgctcccatcgtacttctctattgctcccggtcgaaatctctcaggccatcggacatctcgtagagcacgactgaaagctctacacccgccaccgggggcggcaggttgtcggcgatcgtatgtcctccgtggatgcatgtctaatgacgaggatgatgacgatgatgatgagtcacttggttccggggtacgattacgaggatgacttccgggttctcgagaatcttgtcgtcgcccaccgttgttgtcccggcgccgatctttgtcgtcgtcatcgttatggcgacgtcctcgaccagtatcgcccggcatccgtccggtggcggcctcttcgaacgcgttactgaggttagccactaattcccgtagtcgttctgtccactctgcgagatcatcgttcagaacgggatcataaggggtttccctcagtattgcgttgatagccctgatgtgttgggctggtgtaaccacttgatcctctgcttctgcgttagcgcgcgcagacgtgctggtcccatcgatagcgaacacatcacgtggtgtactcgttgatgatgaggcctggtcttcgagcaagtgtagtactgacggctcgtggggatcgatgtcgattaccccgatgaatcgatctgagataactgtcgctcctcgttccttgtccgcatctctaagagagatctgtgattgctggaccttaggaggtgacgtcctcatggcgctgagaagaaccttgcagcttgagaggtcgtgattctttgtcttgtgaataggacaatagacatcacgggttagagaagtacgttgaattccacgctctttgcaggcgtcgagaaatacccagcaagcttgtaaggtgtgtttcctggttttgtggatatgacaccaggactttgtcgcctcggaagttgtccttgtcggctcgtgattctcgtcggaaggacaagatttggccgcattaggatccttctcaggctcggatgtcgtcgatgttccgttctccacttctgcgggaggatccttcgacatggagccgtccagggttgtaaccacggcgttctcgcttctggtcattgatggaccagttgagatcggcaccatggtgtaaaccaggaagacgatttcgccgacttgagtccacaccagcattgttgaagtagaaactccttggttgatgccggggttgacgctgttgtcgacgaagcttgatgacatagtagtagaaccttgagcaccaagttcccctacctggcacgcccctgtcgacggtggatacccgtagaccggatatagagggtattggggtacgctggtacgaggatcaacgagatcgtagtcgaattgatccgactagatctcccggcgacttggctccgataagctccggcttcgtaggctgtggtggatgttttagctctgagattcgatgccttaggtcctcccggagggtcccttttatatcgcaggtcaactgtctccaagtaggactcggagaagccggaccgaacacgacacaatgacgacccagttctgatcgagtaggactccttccatctgtgaactccatgatgaatttccttaacgtatgccgaacacgtccgtatacgcgtgagcataccat

SEQ ID NO: 98014 - DNA, 434 bp, Oryza sativa
  Clone ID: PAT_MRT4530_95960C.1
actcaacacactctctctctctctctctctctcttccccaagcatatgctgcaagctccaaggagagtgaggtccggcactaagacaacatgcaatggcagcgtggtggccagcattgaggaagacgttgtgtgaggcagcagcatgaggcgaccttcgtgtcaagctgatggaccagatggtggcgacccttttcatcttgcactcaaggaggtctgtgtagacctggcgcctcaccgtcgggagtgtgcaggagatgagtacgagaatgggtgtgttgagatttttttttttatgttttagctggtttattttttgtttctttgcgttggatttgacatgttgcagtaggattatagatagtgtttcataacttggtccttaatgcatacagatatgttgatgtttcaaaaaaaaaaaaaaaaaaaaaaaaa

SEQ ID NO: 98015 - DNA, 535 bp, Oryza sativa
  unsure (1)..(535): unsure at all n locations
  Clone ID: PAT_MRT4530_95961C.1
cccacgcgtccgcacaaagtcattttgtatttgataggaacctacgatcttcggtctataacataaatgatgatgtttctgaaaagcagtttcctgaattcaataatactaaatggctagagtgcactcaggagcagaatgaaatcatttttgtgcctagtgggtggtatcaccaagtccataacctggaggatactatatcaataaaccataattggtttaatggctacaaccttcattgggtggtgagcacgtaattgtacaaacttcatttcaatagctatagcatttttttttctaacattgtacacactatagtggaacttgcttcatgaagattacaaggtagcaaaagattatattgaagacattcgggacatatgtgacgattttgagggactatgtcaacgcaacttagcagcaaatacaggtaatgttctaatcatatgaagaaacataacaaatgacatactntctgataacatcatgttgggtttctcatttcaggcatgaacttctatgacttcttcgtctt

SEQ ID NO: 98016 - DNA, 663 bp, Oryza sativa
  Clone ID: PAT_MRT4530_95962C.1
ccacgcgtccgctatgatctaaagtccagagtatatagatatggtctagaccaagaagaatactatgtcatgcatgacttaatgcatgaattagcaagaaatgtatcctatggtgaatgcgcaagaataactagtcctgtcaagtttaaagatatacgggacacagtcagacacatatccattttatgcattcctcaattttctatcgatgtggtcaagaaaatatcccaatttaagaatcttcgcagtatcatcattgttactgaatctaagcttgataaggatacaaagaatacacttcaaaaaatcattgaaagcacaaaatcattacggctatttcattcaaggttgagaataagatttgatttttccagcaagtttggaaagttgaaacaccttcgctacatcgacatatttggcatctcatcaaaagggatttatcatattgccaaactttatcacttgttggtactactttcgatttctagcccgacgacggtatttccttgtcgtaggagcttgctgtgtgtagcaaaacaagagagatttatgttgaacctttatcgtttgcggcatgtagcctatgggcaggatacgtacaaattgtttggtatgctgcctataagcagacttgaatcaattcggagattgagtatataccat

SEQ ID NO: 98017 - DNA, 1642 bp, Oryza sativa
  Clone ID: PAT_MRT4530_95964C.1
atggcgctctccactctcctcctcccctcctcctcctcttcctcctccaagacggccactgccaccgacacctccgaccgccgccgccaccaccaccaccacaaccacaccaagcgcaagaagaagccgccgccgccgcccagcttggagcaccaccaagccattcgccatgctgtgtcggagctggggccggaggactcggggcgaaacatcgtggagataatcttcaagtcgagctggcagaagcgcgaccgtccgatctgccagatcgaccgcatcctcaaggtgcacaacgcggcgcgcaccgtggcgccgttcgaggccgcgccggtgtcgtcgtcgtgggagcagctgaagagcctgctgagctgccggagcgcgacggcggcggcgcgcgtgcacgaccccgccgcgccgtcgtccgcgttgtcgcggctccgcagccacggcgccggcgcgtgcggcgcgtcgctctgcgccatccgcgacgtggtcgacgccgccagctccgcctccgcggcgtccaccgccgccgcgtccctcgaccgcgacaccaccccgctcacccgctcctcccgccgcgcccaccgcgccgccacctcctcctccggcggcggcggcggccaccacgcctccctccgtggcctctccggttgctacgagtgccgcgccatcaacgtcgagcccatgtcaaggaggtatccgaggccacgggagctgtgcgcatgctcgcagtgtggggaggtgttcaacaaggccgacagcttggagcaccaccaagccattcgccatgctgttaagattggatggcaaaaatacatcaaaaggtatctgtgcctagccatcttttgcatgcttgcagtcgcatctgcatctccatttgttgaagtgtcggagctggggccggaggactcggggcgaaacatcgtggagataatcttcaagtcgagctggcagaagcgcgaccgtccgatctgccagatcgaccgcatcctcaaggtgcacaacgcggcgcgcaccgtggcgcgcttcgaggcctaccgcgacgccgtccgcacccgctgccgcgccaccgccgcccgcgccgccgccgacggcaacgagctcctccgcttccaccccgccgccctcgcctgcccgctcggcctcaacggcgccacctcgctctgcgacgacgacgacgcctgcggcgtgtgcgcggcgatccggcacgggttcgcgccgtgggcgggcgcgcacccgctcggcgtgcgcaccacggcgagcagcggccgcgcgcacgactgcggcgcggcggcggcggcggcgcagcaggcgggcgggtgccgggcaatgctggtgtgccgcgtaatcgccggccgtgtccgccggaacgacgacgatggcggtgcggaggaggaggagggagcgttcgactcggtggccggcgacgaggcggcgagcagcgtgtacggcaacctggaggagctgttcgtggcgaacccaagggccatactgccgtgcttcgtcgtcatctaccgtgttgtccccgagtgaagcagcgaaacaagcactcaaaatcaattaattgtatcaaccatttgtattagcataatcgtccagcaatttcaacatcatataaatgtataaattaaatgcattt

SEQ ID NO: 98018 - DNA, 462 bp, Oryza sativa
  unsure (1)..(462): unsure at all n locations
  Clone ID: PAT_MRT4530_95965C.1
ctttgccctctttgggcgtgtaaantttgctcgtnaattggccttnagtttgcaataatgcgngggttttttatgtgtcaattacaaaaacaaaaactcccctccgtattttaatgtatgacgccattgactttttaacaancgtttgnccttttgtcttattaacaaaattatgtaattatcatttattttattgtnacttgatttatcatcaaatgttctttaagcatgacataagtatttttgcatttgcataaaaaaattgaataagatgaatgatcaaacgttggttaaaaagtcaacggcgtcatacattaaaatacggagggagtattcagtaaccgcgattgcaggacaagcgatcctttggaatacaaattcatactctggcttgacattttaggagcatgtgcatgagacgatgtgcttttggaataaaaaaaaaaaaaaaaaaaaaaaaaa

SEQ ID NO: 98019 - DNA, 2456 bp, Oryza sativa
  Clone ID: PAT_MRT4530_95966C.1
gtttcggtggggggtggagctttgtgttgctcggtgatctggaggcgtgattcgccgcgccggggccgtggattggttttgttgattggggggagttgggggtttcgatttgggagggagattgaggtggtggtggtggtctatcgcacgaggcgagtttttttttttttttttttggttagaagtcatttatttctctgcaagtagttgtaaattacatggtagtgtgacaaatgttctcagaactacaacaacattgtggcacgcatgtacaaggtaaattacagcagtcctctctttatttgctctggtgagaccgtgaaaggagtagagcagttcatcttcgatcttaacattccaagaacagcagcagctgctgcaatactgacgtaaagttcacgctgtacttccgctcttgaaccgcaatccctctgaaatgtcaccagtcagacaatagtagcgaaacaatcttttttttcctttttttgctgaatcaaactaactactattttttgttctttttcttgcaagaagctaatgtagcatgtcaggatggctgcgccttcaagaataacaaactcttcgttttttttttgtctgttttctcagtagaaatgatatgttaagatggcttgcatgacagcattgcatgctgttctctgttagcggaggaagagtattcattgggggacaaacccctatttcattgggggagacagatccttcttctcttgacaattagggcaaacccagtccagagaaaatgactccttgaatgccaacttgtctacacaccttccacactcataacatctcagtatgcaaacagtacaacctttgcaattaccagatcttctgtcatcacatccttcatctgggcaatcataaacaagtttgtagttctgacaaatagggcacatctcaatatcaagagcatatccatcattgcaatctgataaaaaccgattagcatgaaggaatcttggcccccggttatgcacctcctgtgtcttgtcggtattcaacaaggataataactcttcgtactgctcctttcgtaaactgaagagtgttccaactctgaggtgcttaattccaaacaccgccttcgtattaaatgacttgagattggaaataaggccatccaaagttaaccgtgggcagcccaaaatgctcagctttgttaatcttggattactttctaaaacagccttcagcccctggtctgtgatatttacgcagcacgcaatacttagacactgcaaagtatctgggcacttctgtgtcaggtgtagaagaccagcatcagaaattctctggcgcaaatccccttcaatgtggatggacttccacagtaagggctcatttctgacagccgaatgcaatgtcttacacactctctcaacagagaggatgtcacgaaggccaaggtagtcaagggcaaacagcattccctcatgtggaactcctccctcctggacaggaacaacttcaactgcatcgccgcactccaatgcagcatttccagaggtaggaggggtctccacgaacccaaaagaatcatcagcatttcctgaggaagaagggttcttcatgaacccaaaagaatcaccttcaccagcagaaaggcctccaaaccccaaggggccttcaaaaacaccccgatagccaccaaactgaaactccggtgatagaacaaaagccttattcaagtaataactcaggtcggcaaaaacagcatcatcgcggctgtctccaaaacgcccagcactggacatgactgtgaggtcctcaatgcaactggcgatcgccgcggtgaacgtggtctccaggttcatgccgaaggggtcggtaggcaagaggtccacagggtcgaactcctcttcctcttccagctccagctcaaactccagctcatcccaccacagggagttcaccccaccggatgacagcggcgaggcctcctccgaccagcacccgcacccacacatcatgccagcgcagtcctcgttcatcaggaacgagctggtgagcgagcacgacgagtaattcagcgccatagcctccaaactctcctccactcatttatttgcttaaactcagcgggtagtcccttttattgggatttttttcaactaattttctgcacacagaaacgatacagaacaagcaaccctagatctccccaagagaaccctccattcctgatccgggccgataaaaaaaattcccctaggaccaaaaacttcaccgagcaatctcgatcatggatcccaatccaatccaatagcagagaaaaacagggcccctcgatacaccaccaccaccacctcaatctccctcccaaatcgaaacccccaactccccccaatcaacaaaaccaatccacggccccggcgcggcgaatcacgcctccagatcaccgagcaacacaaagcaccaccccccaccgaaac

SEQ ID NO: 98020 - DNA, 2314 bp, Oryza sativa
  Clone ID: PAT_MRT4530_95967C.1
ggagagagagagaaatctcccgggggcgtctcgtcgtctcctccgctccgctccttgcgccaagacgagtcgcggctgccgatctccatctgcgcgagcagagcagagcagagcagggtatcctggacctgggcccactccttgtgattaagggattgtcccggggagcttggtgcacacagtgatggagccacgcattggcaacaagttccgtgttggccgcaagctgggcagtggctccttcggggagatctaccttggttcgtgcgcaattctacccaaagtcctcgttttgattcaaaagttctcatctttacccatcagcctctggtgacttctattttgttttctttgcgtgtgttctcgcaggtaccaatgttcagaccaacgaggaggtcgctattaagctcgaaaatgtgaagaccaagcatccacaacgccgctgggagtcgaaaagaaagagaaatctcccgggggcgtctcgtcgtctcctccgctccgctccttgcgccaagacgagtcgcggctgccgatctccatctgcgcgagcagagcagagcagagcagggtatcctggacctgggcccactccttgtgattaagggattgtcccggggagcttggtgcacacagtgatggagccacgcatcggcaacaagttccgtgttggccgcaagctggggagtggctccttcggggagatctaccttggtaccaatgttcagaccaacgaggaggtcgctattaagctcgaaaatgtgaagaccaagcatccacaactgctgtatgagtcgaagctgtacagaatactccagggaggaactggaattccaaatgttaagtggtttggtgtcgagggtgattacaatgttttggtaatggacttactaggaccaagccttgaagatcttttcagtttttgtaacaggaagctgtctctaaaaactgttttgatgcttgctgatcaaatgatcaatcgcgtcgaatttgttcactccaagtctttcttgcatagagatattaagccagataattttctcatgggcctaggtaaaagggcaaatcaggtctatgtcatagattttggacttgcaaagaagtacagggatacatcaacacaccagcacatcccatatagtagcagtgtcaagattgacattgatgttatttgttcctaccttccgtggcagggtctaaaagctgggaacaagaaacaaaaatatgagaaaatcagcgaaaggaaaattgctacttcaactgaggcccctgcaacaggacaaagctcggcgatggctcctatagcaaataataacaggctgtcagccaccgaagagggaaggagaagcggctggtcagatatggatgcgatgcggcgtcaggttccacctccagctataaatgcaggcagcctagccaagcagaagtcccctatcggacatgagcaatcaacttctaaagatgcagtgttctccagttcgacttttttgggacggtcaagcggatcctcaaggcgacctgctgtctctagtagccgagaaccaagcactgaagctgaccagtcacgtagtcgtacaacagatgcaagtccgggggcattccaaagatcaggggccccgcggtggagtccacagatggttgactcctctgacaacaggcgcacgccttctggcaggcatccatcgaatgctaagaactacgagtcgaccatacggggcatccagggcctaaatttcgatggcgatgataggattcagtactagtatgtctcaatcttggcggtgtgcatatcatcagagcccctactccatgggtcacgcctgctgaagtggagtactaaagaccggaaaataagaggtttggttggttctaaggggctttggcccttagcaactgtttggtggactcatggcaatgcttaggctgtttgtacaggttcccatttgttttcattgcgcggacatgtgccccttgaatcttgttgtatttggagagatttctgcatgcagggctctcatgccatgtgcttctttggaaactggaattggatgaccggtgggggaagttgggggatgcttttttaaagtttgaatattagggagaggtgtccagcctcttgtaacttatggacaaggaaaactgctatgagaagaagggttatgtatgctgtttgtcacagacgtgagtatgttagttactggtgatgatgttcctctgttcgtagcagaaagtagagcatagcttgggtggattttaaactgattctgttgctaataatcttcatggatgaatgtcaatgtacaagtgaaggtttaat

SEQ ID NO: 98021 - DNA, 369 bp, Oryza sativa
  Clone ID: PAT_MRT4530_95968C.1
agaaaaaaaattttaaaatgatccatcaaataaaaaatcttattaaataaagttttatattattataatgaataatttgaaaaatttttggaaaattaatcaatattttaaacatattatttgctccaaagtattcacttcacccctgggcagaaatttttattaaacctcctacatataaaggaaatttattaatataaataggggataaaaaagggataaatcatataggtataaaaaaagtttttgggttaattaaaattaatggtttattataaaaatttaaagaacattgcgatgttaaataacccgaaattccccctataaaacaaacaatttatggaaatatttttattttaaaatttaaac

SEQ ID NO: 98022 - DNA, 2001 bp, Oryza sativa
  Clone ID: PAT_MRT4530_95969C.1
attaatggcccactttaagaaaccaaccatggtggttgtagagtgcagtttctattgtgatgtcttattgacataacactatagacactatttatacacatcatggcttgggactgccctaatacagttaaggaaaaggtaaatccatcctaatcaaacgcaaattaatcggttcaccgtacttgaacgcccggaagactttagcaatcaagcagtttcacgagctccatcccccctgcaacgcgccaatgcttgctggagtagttacaagtaatagtaacagctagtcaatccaagtactactactagttaccactgtctactactgccacggcacgctggcactgcacaaccagaacacggatacattatcttagcaccaaaggaccaaactatgggcaggaacggacgcaaagccgcagcgcaacggcatgtgtgtcacgatggaccaatagtcgcgcgcgcgctcgcgcacgcactggcggaacgatcacgacacgaactgcatgaactcgctgtcgcggagcagcgccgccatggtgtcgggggcgaggcacacctcgatgtccacgctgccgtccccggcgcgggcagggaacgccgacatcttgccatcgaacttgttggcgcggccgctccgcaccgcgagggggcggccccacccgaagtcgttgccctcatacatggggaaccggttcgagctccccatcgtgatcaccgcgccgtccgggttgcccagcgggaagcaccggggagcgccctgccacgccgccgcggcgcggcgtatcgcgccgtcgtcgtacgccgccaggctcgcgttgagcttggccgccgcccaccgcaggtcgttggacgccagctcggccaccgtggccgtggttgctgcgctctggatggcgttgccgaagtacacaggggagatcgccgggcgcagcctgtgccggcagttcaccgccatgcggaacgtgctcgtcgcgtcgggcgccagacgctgccgcgcgcgcgtcaccgagagccatatctgcgcgcacagtgactggaacgacgagatcgcactgagcccttcgggattcttccgatcgtgcgccatcttgccgtagacctcggcgtcttgaccgccgctcgggcgacggttagtgattgccttgagctcgcgaatcgcatccgcgctgaagtgaaagacgcgctcgcggagaggcgcgtccgcgtcgaaggtcacggcggggcccacgcctcctggaaagcggaggacggcggttgactcgccaaaaaagctgcggcggaagtccggcagcttgggtgacgcgccacggcaaagggcggcccatgtattaaagaagtgccaaaaggaggtcccgtccaccacggcgtggttcgcgacgatgccgatgaacacggcgccgtcgccgagcacggtgacctggaacgacgtgagcgggcggcggtggccgtcgtagctcacggtgcggtccatggggaacaggtccttggtcagcttggtcgggacgtcggcgtcgggcacgatgaagtcatccagcgacaggttgggcgcgacggcgtggcggaactcgacgccggcgtcgttgcagcggatgacgacgcgatcatcggggagcgtgacaaggcggccggcgagggtcgggaagatggcgagcgcccgagacagcgaagacatgagcaacgaaaccagggaagccatgggcacgtcgggggcggggaagaagaggcccttctggatgtagtggcacgacagcatgggcaggtcggagacggacagcgtgaggtccccgaccgccgaagcgccgtccgggcgcacgtcctgtctcgacacgaccgtgatgcccgacgccggcgcgtccacgccgacgaggctcttcgtcacaatgggcgacgcggccgaggcggcgcccaccatggccacggcggagagcatctgagccatgcgttccgatcgattggcgtttgtgcgccaccggctgctggctaatggacagtagcagg

SEQ ID NO: 98023 - DNA, 342 bp, Oryza sativa
  Clone ID: PAT_MRT4530_9596C.1
atgaaggaggtggctcgtaagattcgcctcgtggagcagatagctgaaaaattgatgatggctccttcggtcaagaaggttttactggaattcttctctagggtagcaggggtgatggtagaagatgaacaagataaaatccgcaagcgcacagaaaataccgatgtagcacttcactgggagtattctcagctcgctgctcctagatatcgctctactatgcacccgggcaaggaggacttcagtgatctcgagggttgtcaccacctctacacccacctcacacctactgtgggaagcggagcaaacaccggaaatcaactacctagacaccgcgtataa

SEQ ID NO: 98024 - DNA, 980 bp, Oryza sativa
  unsure (1)..(980): unsure at all n locations
  Clone ID: PAT_MRT4530_95970C.1
accaagcatccacaactgctgtatgagtcgaagctgtacagaatactccagggaggaactggaattccaaatgttaagtggtttggtgtcgagggtgattacaatgttttggtaatggacttactaggaccaagccttgaagatcttttcagtttttgtaacaggaagctgtctctaaaaactgttttgatgcttgctgatcaaatgatcaatcgcgtcgaatttgttcactccaagtctttcttgcatagagatattaagccagataattttctcatgggcctaggtaaaagggcaaatcaggtctatgtcatagattttggacttgcaaagaagtacagggatacatcaacacaccagcacatcccatatagggagaacaagaacttgacgggaacagcaagatatgcaagtgtaaacactcatcttggaattgaacaaagccggagggatgacatggaatctcttggatatgtactgatgtacttcttgagaggaagccttccgtggcagggtctaaaagctgggaacaagaaacaaaaatatgagaaaatcagcgaaaggaaaattgctacttcaactgaggccctctgtcgtggatatcctactgaatttgcatcttacttccattattgccgctcgctgcgctttgaagattcgccagactaccaatatttgaagagattgttcagagacctttttattcgagagggatttcagtttgattatttttttgactggacaatcctgaagtatcaacagtcacagatgaccagtgctccaccacgtgccattgcccctgcaacaggacaaagctcgccgatggctcctatagcaaataataacaggcctgtcagaagggaaggagaagcggctggtcagatatggatgcgatgcggcgtcaggttccacctccagcctataatgcaggcagcctagccaagcagaagtcccctatcggacatgagcantcaacttct

SEQ ID NO: 98025 - DNA, 285 bp, Oryza sativa
  Clone ID: PAT_MRT4530_95971C.1
atggcgcgatgcgatggagtagacggcaggggcaaggcgtgtggcagcatcgttcaccctctgccatccccgctcgccgccaccgctccgagttgcatcctccatccccgcctaccgctgccatcctcggctcctcctctaccgtcccctcccgacaacgccgctacccactgccaccgtccttggctcccctaccgccatccccacctgctgcctccgctccgagcctcctcccccgccgccgccatcctcggctccctctccgacggctgctcggtgatatag

SEQ ID NO: 98026 - DNA, 446 bp, Oryza sativa
  Clone ID: PAT_MRT4530_95972C.1
aataatataacactataaaataaggaattgtatacatgggcggggtcacatacattacgtacgggagaccctaaagtaattagccagacacactaccttccttataaggacattgcatagacaagctatgcatctaatcccaggcatggtgatagggcacgggtctttcaagcaacaaggttaataaaaaccagaacctatgttgcgaatacccataagtggaaaatgaccaaccattggaaccgccttaaaaaagggtgatacatgcttgccctcttttgcacggcccaagccctgtgcttgagcttgatgaacacacaacctactgaatccacatcctaggaatggggatctggcatcctgtggccacgcaccaacctttcattcgtccctatcggtacctccctcataatatgtggcctggttctcctgaaacaccacctttc

SEQ ID NO: 98027 - DNA, 468 bp, Oryza sativa
  Clone ID: PAT_MRT4530_95973C.1
tttttttttttttttttttttttttttttttttttttttttttttgtttttttttttttttttttttttttctttttgtgtttttttgttttttgggggcaaaaaaaaagggcttagcgaagccttttctaaaatatggggggggggttaaccccctgggacatcacacgggtttaaggccaaaatttgtcaccccaaggcccctttgggggacaagaagggggtccccaaattgggggggagggggaaaaattccccaaaaacccccatttttaaccggggccccccaaaaaatttcccgggggaaaaaaaaaaccttaaggaaaaaaagggggtaaaaaaaagggccccccccagggaggtttaaagtgacaccttggaaatttctccgggagggggcttgcccttttagggggggggtggggcctaacccccgacacaataaacccgggggggggggggggctct

SEQ ID NO: 98028 - DNA, 1746 bp, Oryza sativa
  Clone ID: PAT_MRT4530_95974C.1
atgtcgtggctccgcaacgcggtgcaccgcgcggtggaggcgagcggcgggcccctcctcacccgcaccgtccgctcctccctcggcaccgtcgtccaccacgccggccaggccgtcgcgggcggcgccaggctcatcaacgaccgcatcgggagccggagctacaagagcatgaggctgacggcgaagaggctggaggacgcggcgctgtcctacagaggggaggaccgggtgcagctgctgcgccggtggctcgtcatgctcagggagacccagcgcgcggccgcggcggagaaggaggcgaagcgcgcgggccatcctgatcaacacctgcccgtgttggatctgtatatggattacgagaccggggccgagccgatgaactttatccatgtcttcctctacagccaagcgctcgaatgcctcgttttatccatggcaaaacgtgctgagctgcttcaatttgctcaatgtgcaatctcagggttaaaaataaatcctgaaatttcaagattagatgatgaaatcttgcagctacaacaacggataaatggaatggacgctcttcgatctaattcgaccagtaggcgtagcaaagcatcacaaacagtcgcggaggttaataaattgaaggttttgtcagaatcacttgcaaattcagctgcaaaagcagaaaggagaatcatggaaaataggctacaaaaggaggaatctcttattttccgagttaccaaaacaaatgaagttagtgtaactgaaaaggaaatactggctgagatctctgggcttcagaagcaaaaggatctacttgaggatgaactaaagaaatgctggtcagtgtatgagaactgggaagatatcctggagaaacactcagggtgtagatatgagcttcgaataaattgttttactgttcttagaagttacgatcccttgatagaaatatttgtaagagtgattctgaaactcagattacaggaggaagaactgtcaagatctattgcttcctgcaaagttgagtcaagcactgtcggtgcatggatcatatttttagaagatacatggaagttgcagtctttgtatgaagaactaaggaaaaaacaagccaatgatgaactggacaagtgtgcgacttgctttgcaaaattgattaatcatcatctttatgcacgagtggaagagctgagcacttgcattgatagtataaagacctttgttgataacttgaaaatatttgataacagatcggtatcagcggaagatggaaacaatggttcgtccaagcaatcaaatccacgtaaataccttgaggaagaatatctggaagctgagaaaaaggtggtagcagcattcagtttggttgataacatcagagcaatatatttgtccaatcaagattatcaagccaggagagatgatcctgacgtgaaaaaactatttgccaacattgacaagctgcgggtcgagtttgaatcggttccacggccactgctgcaaatcgagatcaaagaaagagaagagagagcaaagcaatctcgttccttgcaggctgctcgctcatcaagacaagcaggacacgagtccccaatacctgctcaactcaggacacgcctgccatcagagtccgactcagaactggcgaaatctgacccagagtacagggagtattcggctgatgacataagtgggtgggagtttgatgaccttgaagatgatggggcaaggctttcagtgaaatctatatag

SEQ ID NO: 98029 - DNA, 381 bp, Oryza sativa
  unsure (1)..(381): unsure at all n locations
  Clone ID: PAT_MRT4530_95975C.1
gggggggagggggggaagcgcgcgggccatcctgatcagcacctgcccgtgttggatctgtatatggattacgagaccggggccgagccgatgaactttatccatgtcttcctctacagccaagcgctcgaatgcctcgttttatccatgattatggaggtcgctagggaanaanaagcctcncttctctcaaaagtttttggattgtgtcttcctggaggaaaggatgtccacaatgcaatacttagtagcataaaggagttggcaaagttattttcaacttaccatgatgaagggttggcaaaacgtgctgagctgcttcaatttgctcaatgtgcaatctcaggggtaaaaataaatcctgaaatttcaagattagat

SEQ ID NO: 98030 - DNA, 186 bp, Oryza sativa
  Clone ID: PAT_MRT4530_95976C.1
ctgcgcaggtttgcgcatataataatagccagctttctcggttttggacaaagaaaacagggaagatggcgctcaaaaaattttcctccatccgagacacacattgccgttggcctgaggccataacttactgatgccgaaagagacgactatcttgcctttgcagaaggtgaacatagtacatag

SEQ ID NO: 98031 - DNA, 3481 bp, Oryza sativa
  Clone ID: PAT_MRT4530_95977C.1
ggactaagtagctgactacatcatttcgaccaatggattacaagatgaacggctgagattttgctgaatttacacttctgcctggtaatagtgtgactgaaattcatgggaaatctagggagctggtaacacattggagcaagatgcaagttatacagcattcttacatacatggaagcaccaaaaatattacttttaacccaacccttgaaatttcttcttctgttcttgcttccgaagagagctggaaattacctggagactatcagaaagagattgcttgtgtatgtacagtagagaagcaaagcatcactgatgcttaggacacaccctcactggtcactactggtcatccagcttccaaacctcatggaggagcctgtacctggcactgtttgggttcccaatctgcttcagcttcgcgagcgggttcgacgaagccttggagatgaaggtcaatggcgagctcagctcatccagctcgtcgtcgctcgtgttggacttgcggaggatggccgacccgctcttcctggggtcgccgatcatgcttaggattgctccggatgccgggtatgggtataggatgggtgacgcgctgcacgggaccgctcggatgcccttggtgttaccctccaaatgatcctctgactccagtgcttcaagcaaggaatgttgaactggatctgggcaaaaatcatctggcacaaagccatcaaggattctcttgatgattgatgagctgaaggtaggacaaagcagaaaagaaaacttcacaagttcagatggaaataatgtgcatttgttgaacaagatgagagtgcatgcctctttcctagtactggtttccatgagcacatccttagggatcattaggagatcactcaatgcatttaggagataaaatggtttgcggagttcggcagcaccattgtcaccatccccactctcaacttctggatagtcatccatatccataccaaacgagtcactaagacatctggaccagctgccaatagcatttttcagttggaccccagcaccaaaactaaatttcccagatggtacaggaaggaccttaggatcagttattgggtcagacatgggatcggttggaatctcatcatctgattccctcaaaatagcattgaacattgctacatccaatctagctatgcattgctccatcactgggcaaagcttttcagatgcttccttgaaagccttcttccatatgtcaattgataaggttgcttgttgctgattgcccacaacagtaatccttccataacatttctttgcatttgaactaggcatcggttcactgcttatattagcagattgcatatgtggtgtgaatgcctgccaccaaatggattcgacaattcttgagaatatccatgattcaatcttcttaagtgcggctataaatgtgtcaacatcttcccagttatcaaactcaggggaaagcaattttcctttcttccggttaagcgattcccacattgacgcagaattcctccttggtcctgttttggaaccattattgatagcattgctgttcgattgtttagaagtttcagaaacaattgctcgcaacaccacacagtttgatagccagaaactcaaccttgcaacatcatatccacaagcttttgcaaccagaaccaaaccagaggaagcacttcttgctgcactccccatcttgtctctagaccagtttttaagcgcatgaatgaaatgcctagagagtcttcgtgctggtgtgtgtaccttgtttgatgagctaccatgttcagcgatcaccgaataaaggcctatctcggcagcagcagtttctcgcaactctgcttcaagcaactcaaccctaagttctagttctcgaactttggtgtcgttacgattatttgatatgcgtattggcacctgagcttgtgctccatcataggtatcagtcctagtatcattagagaccgcaatatcttgggagtcaacttctttcacttcttccttctgggaatcaactttcttattaatgacactaccactaaaatccggaactctcatactgtacctcatattctttgctctatcactagttaaagtgctatatgttctctccccaaagtttctttggttggaatcactcataccataagcaaatgacattttacgaccagctctgagagcattttgtgctggaaaagatggagtttgttcaccaggcaaatctgataaaagagacagattccctggatggccatttgccttttggacttgaattggatacttttcaacttcttcgctcctcacttttgtactggaagatggcatttcacgctgggaatcaaatggtgatctagagccttcatttcccactgttcttacatttttttttgctgaatttacacttctgcctgtgtaatagtgtgactgaaattcatgggaaatctagggagctggtaacacattggagcaagatgcaagttatacagcattcttacatacatggaagcaccaaaaatattacttttaacccaacccttgaaatttcttcttctgttcttgcttccgaagagagctggaaattacctggagactatcagaaagagattgcttgtgtatgtacagtagagaagcaaagcatcactgatgcttaggacacaccctcactggtcactactggtcatccagcttccaaacctcatggaggaccctgtacctggcactgtttgggtaatccatccgcttcagcttcgcgagcgggttcgaatacacattgaacataaaggtcattggcgagcacatcccacccatcgcgtcctccctcttgttggaatcacccagtatggcgatcccgcccttcattgggacgtcccttatggttagacctgatccaattgaaggcgcaacagcaatggtcttccccgaattgcgctcgccattttcccaaaagaggaccacagatttcaaagacttgagggactcagaagggggccatgggctgatttcttgaatgaagatattgaagtctacatggaaggatgcatccttcctcgtcttggttcggaggcctagcaccatccagtgcttcaacagttgatacactctgagcttcaatatagtaatcctagttgtcattttgcacaatctggtagtcctctctcaattatcctacgaaaagtcgactgccattaagttcattgacaaagaaaagctcctggcctgaatcgagaactcgatgcaagattgagaattgagaggaagagatggaggaatagagtagaggggggtttggtcacgtcgcgtggaatgattgggcgactgggatgaggagggaggaggagttcgtgggcacgcagtagtggtggtggtagtcggtgtgggttgtgggggaaggaagtgagaagacgactcgggatgcgagaagaagagggagaagaggacggacggacggcccggcgttctcgaccgaacgcgtggg

SEQ ID NO: 98032 - DNA, 348 bp, Oryza sativa
  Clone ID: PAT_MRT4530_95978C.1
aaaggaaaaaggggggctttatcatcattagtcgaaagaactggacagtacaaaacaaaaaaacaatggggggggggtgatttatttaattattctttatccgcaagcccccctaagaggattctgccccattaaaaacgtcttggtagctcttgtattggattggggggaatgcacccaactcatttcctttattatgcttgagcctttgagccttttttttggggaggcgatatgcatttgctagaacatcattggggagagcccggaaaatggaactctttcctgcaatggggcttaccaaaaagttaggattggttttgaatgcaaggaaaacacattcttctc

SEQ ID NO: 98033 - DNA, 387 bp, Oryza sativa
  Clone ID: PAT_MRT4530_95979C.1
atgaccaaagcaaattggccgggcggcggatccagcggtgcggccctcgggaagaccatatccgccgccctaggatccggagcggctgcagctacagtgacagcgagcggcggatccggcaaccacgtcgacggcgaccgctcggcctcctcccgcccggatctggtggcgggagcggtcggcgccaacgtgggggcggcttccacaacgacgccggtggtcggtgggagcagtggcagtgggcctcctgccacccagatctggcggcagcgggcctcctcccgcccggaactggtggcgggagcggtcggcggcgacgcggggacggcttccacaatgacgccgatggccggcgggagcagtggcggtgggcctcctcccgcctag

SEQ ID NO: 98034 - DNA, 3806 bp, Oryza sativa
  Clone ID: PAT_MRT4530_9597C.1
atgcggagggcgatgatgggcgtggacgatctgatcgaggaggcgaaggtgcgcaccgtgtggtgggcgctctgcgtcttcgccatctcctacttcctcacgcatgtgggaattggtgaggaaattttgattggctgcaaagttggccgcgacaagttgttacttcatactggagataaacttgtaactaaactaggcattttggacattaatgaagtccattatttgggtaaatcaattcggaaaaagaagcccatttctattcttacacttcagtttctccgatacctttcattctcagctgaattcgattggaaaggtcagcctgagcagaggcagatgcttgtgtcacatttttcaaaacgacagttgattgctcatgtacatcggctttctgaagttgcacatttttcaagttggagaaggaaggtttgttcaccttctgttgaggctgcttttgtgaaattctttgagaatattttgagagatgttgtggatgatttggggtattaatctaatactcctgatggagatgtcccagagttgatacgtagtttaataattaatgctcttggttaaatatcgggaaaggtgaaggaatttattttagttgacttgctaacaagggatatggctgatttgataggacaccatttagatattttccggaaaaatcaatctcaaattggtgttgatgttatgggaacattgtcatctgaggaaagagatgagagactgaagcagcacctaatagtttcacaggaactccatcccgcattgttatcttcagagcatgaatataaggtttttcaagatattgttgggggtataatggctctagttttaagaccgcaagatgctcagagtccattggttcgctgtttctccagggaactgctgacctgcttagtcctgcagccagtgatgaactttgcaagtcctatctacatgaatgagctaattatttaccttatgaacaacaaaaatacaaacagtggaggagggaatttagataactctaattcttcagttacagtaacaaatgcccattcagctcataaaggaagttcacagggttgtcaagtggaatcaaggaatttgtctcaagaatccagtggcttagtaccagcaaatagttctgggatgaggtcacttgttactcatgatggtgacaagtcaaaaatgtcaaagattgaacatggtagcgccatccagtctcgacagccagattgggctgtgggactggatgcagctactaaaaggcgatctcaggttcttgctcctgagaatcttgagaacatgtgggcaattggaagaaattaccaaaagaaaatggtgaaattcgagcattcaaggggaaaaagttcaggcatagataacattccaagtgcaggagcagcaggaaaagagttatctcctaatttcaatgagagaattacatctgttgatgacaaatacatggtcaatttgatgcaaggttcaaataggaatgcccaatctacctatgtcacaggtagtcacccacttgtttcgcaagaatggcaagatacggatgaagcaaaaccaaatgaagggagtcaagttgattgcagcagcacagaaaaaccctgtgaaactatcaacaacacaaaagctcagttaaagaggtctaatagtactcctgatattgaaaaaagatatctagccaaaagtaatcaaaccatggtttccagtgaaatagcaagaaaaaatcagggtgatagaggttcttttcctgtctcacatggtgaagtagtattgtatgttccaaagataaggtgccgggttgttggtgcatattttgagaaacttagttcaaaatcctttgccgtttattctattgcggtgactgatgcagagaacaaggcttggtttgtgaaaagaagataccgaaactttgaacgtcttcatcgacaactgaaggagattcctaattactctttgcacttgcctccaaagagttttctttcatctagtattgatgattaccttgtgcaccagcgatgcattttgctggacaaatatcttcaagaactcttgtctatacctaatatagcagagcagcatgaagtttgggattttctgagtgcaacctcaaagaattactctgctggaaagtctacttctgttatgaaaaccttggctggtaggatccttgttctttctcttttgtttatgctgacaattatgaacgtgcctataaaatattttcctcactcacgatacttgtttgcccttgcaccaacagttaatgttgatgatgcgatggatgatattgttcgacagtttaaaggagtttcagatggtctgaaaagggctgttggaacctcacctaccagtgcaccttcttcacatttggcagagaatcagatgtctctatcttggaatcaggaagagatagataaccataatctgcataatagaaacctgtcaggtgctcatagtctttctgatggtgatagcaattatgaagatccctcctcatctgtaaatagtgctagccactcagacaatgagttgaacaacagtcagtatggttcaaatgatatcaagctcaatgaagcatattctggttttgatgcacaagcaagccaacaaatagagaaacctactagggcatattctgattcttcaaacatgtcttctctaaatacatttgaagatccagcaggaattcctcctgagtggacgccaacaaatgttagtgttcatttgttgaatctggttgacaaggtgttccaactaaagcggcgtggttggataagaaaacaagtactctggatatcaaagcagattttacagttagtcatggaagatgcaattgatgaatggattttaagacagatcaattggctccgaagagatgaagttattgtacaaggaatacgctggattcaagatactctctggcccaatggtgttttcttcaccaggttggatggatatcaaggaaatgcaggtccaagccaatttgataagcacccatctgggagtgctaatcaggctagtggcaacagaaaggatagtgcaagctcttttgaacaacaactggaggcatctagaaatgctagtgaagttaagaaacttcttctaggtggaactccgccgacattagtcagcataatagggtacaagcagtaccagcgtagtgcgagggacatttactacttcctccaatccaatgtctgtgtgaagcagcttgcttatgcaatgatagagcaggtgcttgtgtcgctcttcccagagcttcgtcagctaatagaggacatacatgagaaaggtcctggagctgaatgtgaaggcagctgtcgttatgttagcccaaaacagttcagtccagagattgatttggatatatacgatgacggtgtagccatgtttcttcttttactctggcattttgcccatggcgaagctgcctggcacgcaaaaattttgcagatggatttcaacagcgtaaagtcggattgaggatgcagttgttgattatccaaccaaaactatgtacagatgtatatcagaagctgtgtaaattagtcctctaatgcataccaagaactacgttcttaccagtgatctctgatagtttgatgtatcgtatcagttctttaattctttttctctcctcaatgtattctagtcgttcctagctctcttggccgaggttagtaaaaatatcgaatgttccaatggtataggcgtaccgtatatctgactgtccattcttcagttgaagaactcaatccatgcatcttgacaagatagcaatcaagaacctttgactgatg

SEQ ID NO: 98035 - DNA, 320 bp, Oryza sativa
  unsure (1)..(320): unsure at all n locations
  Clone ID: PAT_MRT4530_95980C.1
cnccgcgacgacgaggccgccagccagtttntgaagcgcacgttccagctcgccaagcgacgatgatcatgcaaaaaaagcttcgcgtcgtcccgtctccaagctcagcaatggcgcagccgcgcagtgtatccatcggagttgaagaagacggtagctacacgccatacagctctagatttttgcgatctttgcantcggaattaaacctcataatctctcgaacgaactgtaaacccaacacaaatacgaatatgtaaaatttttctggcacggatctgaaagtttcaatattggtgtcattcaaaaaaaaaaaaaaa

SEQ ID NO: 98036 - DNA, 379 bp, Oryza sativa
  Clone ID: PAT_MRT4530_95981C.1
atcctagcattcatgtcttatctgaattggcagagtactactggaataattgtgaggtccacttatcatttcaagtgtcgtatttcatttttcatgcttgtacagataaatttatcttgctcgcttgttatttattttgtaatgatgaagaaaattatgccaactgaacctcttttttaaaacctttttggtttcatggccaaggttgaagcaccacagaacttggattgctgctggaagacaatttccttgtacatgtatttgatgaatacaattgtaactgaacacattgaacttccttgagtaactgaacacattgtacatgtattactaactctgatttgaatgaatttgttggactgaacttggatggccccaa

SEQ ID NO: 98037 - DNA, 369 bp, Oryza sativa
  Clone ID: PAT_MRT4530_95982C.1
aaacaggaatcgcacatctgcttttgttgattgctcatgaatttcgtacacattggatatacaccacacgaaagcatatcctcatatccttcttctagtctcaatttcattttaagacagtcgaattgaacatgagaaagcagcaaattaaacatccaaatcaccaattgcaacacagatatgtagttaattaacacatattgcacatatctccatatcgattggtgtttcatttattatcacataatttttgatactaaagaagctcacaatacaacagaaagggggggagaggaacttacccagcgaccatcaccaccggagcagctaggtcttactcggcggcggcggcggcggcgccttgggctt

SEQ ID NO: 98038 - DNA, 510 bp, Oryza sativa
  Clone ID: PAT_MRT4530_95983C.1
atgcctagatcccgtataaatggaaatttcattgataagaccttctcaattgtagccaatattttattgcgaataattccgacaacctccggggaaaaaagggcatttacttattatagagatgggatgttggctcaatccgaaggaaattatgcggaagctttgcaaaattattatgaagctacgcgactagaaattgatccctatgatcgaagttatatactctataacataggccttatacacacaagcaatggagagcatacaaaggctttggaatattatttccgggcactagaacgaaaccccttcttaccacaagcttttaataatatggccgtgatctgtcattaccggggagaacaggccattctacagggtgattcagaaattgcagaagcttggtttgatcaagctgctgagtattggaaacaagctatagcgcttactccgggaaattatattgaagcacagaactggttgaagattacgaagcgctttgaatttgaa

SEQ ID NO: 98039 - DNA, 273 bp, Oryza sativa
  Clone ID: PAT_MRT4530_95984C.1
atgctgtcgttgccaccgctgccgcacaaaggagaagggagacaaaaggacattgacatgtgggacccactggctaattcagccaattgggctagtcaacaagccatatcgagcggcagcgtggtcgagcggctgcaggccgagcggagggcggcggcggctagcggcaggcctcgcggagggcagcgggcagcgggcgccggcgtggccgcgcgtagggcggagccggcggcgccctcccttctgccggaggacaggcgggaggcggagtaa

SEQ ID NO: 98040 - DNA, 927 bp, Oryza sativa
  Clone ID: PAT_MRT4530_95985C.1
atggcagtgcgagtggccacagccatgacagtgcttgtatgcctcgtgctagtgatagccatgattctgctgcgcaatgtctggggatacgcctacagcaacgaggaggaagtggtggcatacattgcaagtatgctccccatcctcgcggtctccttcttcgtagatggcatcaatggtgctctttcagcgctgctgcccgccatgctcaatggcggcctctactttgggcccctagatcccgtatccaacatcatcaccaatgccgttggccacctcccgccaccggccaacgtgatggtgcagtggtcactgaaagcccttgtcgggttcttgatatgctacttctactacatgcctagcctggaggcgctgtgctacctatgctccaccgaggcggatatcctcaccattgtccacctcatcgaggttgattgttgcacgcgaacatttggcgttggctctggcaccacgaagacctcccccagctgtgccacggggggaccgggccatgctaacatggacagcctcaccacggccatgcttacgctctccttgaggttacgcaagatcgccggtcttctgtccacagaaacggctggtggaatagaattagaagaggaatcaggagttcggaagccttcggaagagttcggtttagacgtggtgtctagattacaagatatcattatttggggttatatattgcggatgagagtagggccgctgaagatgacagctcagtacagccctagggaaaccagtgtagaacctattgaaccagagcatgacattttcaagcgtaaggttgctgctaagatagatgattgctgcttcgccaatgattttgacggtgtagaacttaagccagagttgtacaagccaccatggactgcccaagtggccgatgggctgaccctccaatag

SEQ ID NO: 98041 - DNA, 1682 bp, Oryza sativa
  Clone ID: PAT_MRT4530_95986C.1
ctaagtggaaaaaagtccataggggtgagaccgtgagagtacacccctgccctgacgtcctgaccccaccacggctttcatcaaaaacccgccgccggcgccgccgccggcacattctccggcatcctccggccatttccggtcactctcatagcctccaaatataactacggagggagtagaagctaacaagattccatcatacgaactaagaaatgatcattcgattttggctttctccaattgacaagggctacgacactggcattgacaagaaatcttcaagtggtttgcacaagacaaacatacaggaactgggattctgtggggtgctgcaatgaagcagctgctttgccttttattactactactaaatactaatatttggaaccaggtttgatgaattattctactgtacctagtgagtttgaactatgaccagtacgctgtcaaagcagcagcatttgccgtttctcctttcagtttcttatcaagaggagctgaatggtaacggcaactggaagcttaatgcaggttactgaagaagcaaatgccctttgtcaaatttacagatcaatgtagacacgcaatccatcacgggctaactgcacatctatcccctcccttctggaccactcttccaacgtttcattgtccttgtgatggtccatctcatgagtcatcccaatgagcaatgcccttttggggcaaatcctcttaacagcatccagtgtctgatcccaacaaagatggacattatgagaaccagtcctataaaggcagtccaataagcaaatcggaaggggaacaaactctagccctgaggtcacaaatggtatctgaagatcactctcgattactctccagtcaagctgagcaactcgccgaacctcctccccttcctttagtttctttctgaccaagtaaggaaacttttgggcaatgctgttcatagcaaattgggatagataaattggagttggctcaatatcattcgtaggactaaatggctgtacaatccgaacatcatcaagacccaagattgcatcggcatgctcatgagtcagaataatagaatcaacacaagggattttatgatggataaaccaccgtagaacttgttctcggaatgtcttcccaacatcaattagaatatatttgtgtgcgacttcatcttggcaataatcaatcagaagagaagtattgcacctgtagttagggtttagctcggggggcacggagagggactgggagcagacggcgcagggcgggtcggggggctggatcaggcaccgcgcgttgggcacggcgctggagcagcccgtcccgaggaacaccagcgaggaggaggacggcggcggcgcgggcgtccctccttcgccggtggcggtggcggcgccgtgtccgttggggacggaggaggccattggcggcgagacgaggcctctctccgccggcgaccgtggcgacgacgacgacggcgacggcgagtcggtgaggggaggaaagagaatcatacaacgcacaaaatcccattccaaaacccatccaccgcgcccaaaacagaagcggaggcactcgttccagatcaaaaagcgtgacacccgcgaaatcggggcccgcggcgcgagcgggccagttacgccgccgccgccgccgccgctgccctcctccacggcgtc

SEQ ID NO: 98042 - DNA, 997 bp, Oryza sativa
  Clone ID: PAT_MRT4530_95987C.1
aagtacgaaatgaaacttcaaaaaagcttctgttggagttcattatcattcgaatcaggctttctccaattgacaagggctacgacactggcattgacaagaaatcttcaagtggtttgcacaagacaaacatacaggaactgggattctgtggggtgctgcaatgaagcagctgctttgccttttattactactactaaatactaatatttggaaccaggtttgatgaattattctactgtacctagtgagtttgaactatgaccagtacgctgtcaaagcagcagcatttgccgtttctcctttcagtttcttatcaagaggagctgaatagtaacggcaactggaagcttaatgcaggttactgaagaagcaaatgccctttgtcaaatttacagatcaatgtagacgcgcaatccatcacgggctaactgcacatctatcccctcccttctggaccactcttccaacgtttcattgtccttgtgatggtccatctcatgagtcatcccaatgagcaatgcccttttggggcaaatcctcttaacagcatccagtgtctgatcccaacaaagatggacattatgagaaccagtcctataaaggcagtccaagatgagcaaatccagctgaccctctccagactttgaaattgcgtgttctgtgcttggaggaaaccgtgaaacgtctgatatataagcaacttttgattttcttccaaaaaggaaacccagacaaacatagtcctcgccatggatcaccggcaggggaacaaactctagccctgaggtcacaaatggtttctgaagatcactctcgattactctccaatcaagctgagcaactcgccgagcctcttccccttcctttagtttctttctgaccaagtaaggaaacttttgggcaatgctgttcatagcaaattgggatagataaattggagttggctcaatatcattcgtaggactaaatggctgtacaatccgaacatcatcaa

SEQ ID NO: 98043 - DNA, 582 bp, Oryza sativa
  Clone ID: PAT_MRT4530_95988C.1
atgtcatgcctcttcttccttctctcctcttctctggtccatcccccccccccccacgatttatggagcaagccaggaaatggccaaggcaacggtggcgaaggacctggacttatcagcggtggtcaaatcctaagtgacacttgccgctacttgcaaggagctgcccatggggaatgggaggcgcgacctcatcgggttcgaccaccccacctcatgataccgcaacaactcgacagggatggtgtcggtgagcctgttctactcgagcgatgcaagcagggcaactacagagctcgtgctcgaggaggcgtcggcgcacatctcctcctcggcctccgaagcaaggagattgagctcgagctcaaggaggcagcctccgacctccaacacaaggaggcagcatgtaagatgccgccggtgcgagtgcatgcaaagggaatacggcggcactgtgacgtacttgctgtgctgaggaggaggaagctcggatgggctgccagcgcgtgcttcaatgaggggaggagtcctggagagaagatagtgaggggtgcggattgtgtaagacaggagatagattga

SEQ ID NO: 98044 - DNA, 234 bp, Oryza sativa
  Clone ID: PAT_MRT4530_95989C.1
ctagccgaggtcgagtaggaggtgtgtcgcgcctggcgccggcgcgatggcggccgcggcccctccccggctatggtcgactcctttcgattgtggggagctcttttggtgagatgtcggcaatggcgtttggaggacgatgatggtgatggggcttttgtcgtgctggtcagcaatgggagccgcgaggttccccatgacctgctggcgaaccggtggtaatggcggctccat

SEQ ID NO: 98045 - DNA, 6287 bp, Oryza sativa
  Clone ID: PAT_MRT4530_9598C.1
atggagttcacagatgtaaggagtcctactcggatagaattgggtcgtcattgtatcgtatcgggtccgatgtctccgagtcctacttggagaccagttgacctgtggtataaaagggacccctgggaggacctaaggcatcgaatcttaccgccaacacatccaccacagcctacgaaatcctcgtaccagcgtaccccaataccctctatatccggtctacgagtatccctcgtcgacagtggcgcgccaggtagggggacttggtgctcaaggttctactactgtgatatccagcttcgtcgacaacagcgtcaacaccaacctcaaccaaggagttcctacttcaataacactggtgtggactcaagtcggcgaaatcgtctttccggtttacaccacagtgccgatctcagctagttcgccaatggccggaaacgagaacgcagtggctacaactcagggcgactccatgtcgaaggatcctcccgccgaagcggagatcggaacgtcgacgacatccgagcctgaggaggatcctagtgcggccaagccttgtcttttcgacaggaatctcgagccgacgaggattacttccgaggtgacaaggtcctggtgtcctatccacaaaaccagaaaacacaccttgcaagcctgctgggtttttctcaacgtccatgctgaaattcgtgcctgcaaagagcgtggaattcaacgtacctctccaactcgtgatgtctattgtcctattcacaagacaaagaatcacgacctctcaagctgcaagatctttctcagcgccatgaaaatgtcacctcctaaggtccagcagtcacgcatccccctcagggatgaggacaaggaacaaggagcgacgctgatttcagatcgatttgttggggtaatcgatatcgatccccacgaaccatcagtcttgcacctgctcgaagactatggatcatcgccaacgagtacgccacgtgaggtattggctatcgacgagaccggcacgtcagtgtgcaccaatgcggaagcggagaatcaagtgactacaccggcccagtacatcagggccgtcaatgcaatactggaaaccccctacgatcccgttctgaacgacgatctcgcacgatggacagaacgattacaggaatcagtgaccaacctcaacgcattcgaagaggccgctgctgcagagcactcggaacagccaccaactggcgatgctaatggtgaaaaccctgaacagcgggaatcgactcatcgagccacccctccacctcgcggcaccagcgatctccgcgatcacctgaatggccaccgagaggcgcgacgcacacgagacaacgagatccgttcccgacatcgcgtctctccacggcatcacgataacgaagaacgaggaggtcgttcgagcgaagaccgagaccgtgataaccgctgcgatcacgacgatcgcgaacggcggatgctaggcgatactagtcgaggacgtcgccataatgacaacgatgatggagatcggcgccgagacaacaatgggtgacgacgacagggttctcgagaacccggccgacgtcctcgtaatcgcacgccggaaccaagcgacccatcgtcatcgtcgtcatattcctcatcctcatcatcagatagatatccgcgaaggacgtacgatcgccgacaatccaccgcccccagcgctaggtgtagagctttcggtcgttcacttcgagatgttcgatggcttgaaagattccgaccaggagcaatagagaaatacgatgggagcaccgacccaaaagaattccttcaggtttactccacggtactctacgctgccggagcggacgacaacgcattggtgaattacttgccaactgcattgaaaggctctgcgcggtcatggctgatgcatcttcccccctacttgatttcttcgtgggcagacctgtggcagcagttcgtcgccaactttcaaggaacttacaagcgccacgcgatcgaagacgacctacatgcgttgacatagaacccgggtaaatccttgagggattatgttcggcgctttaacgagtgcaggaatacaatccccgaaatcaccgacgcttctataattcgcgctttcaagtccagtatcagagatcgctatactactcaggagttggcaacaaggcgcgtcacgactactcggagattatttgaaattgtcgatcgatccgctcatgcgaacgacgcactgagacgcaagaacgacaaactgaagaccggaggagagaagaaaccagccaaggacgcacctgagtcaagcaagaagaaaaatcgcaagagtgggaaaaggaaagctcaagcagaagttctcacaacataatacgcggaccctcccaagcgcccagacccacaaggcagcgacgcaaagaaaacatggtgccctatacacaagtcagacaaacactctctaaaagattgcctcgtcttcaaaaagtcgctcgcaaaacacatgacattggaaaaaggcaagcgagtacgtgtggtagagaaggacgctgaggcggctactcaggaatcagactcagcatatccagactccgatctccatgtctcccacatcttcggaggttccacagcggcgatatccgatcatggtcgaacccactattcggaatatcaaggtcgcacgagttctgatcgacggcggtagctcaatcaaccttctcttcgccagcaccttggatgcgatggggatcccacgaagcgagttgacacccaccgatcaacccttccatggaatcactcctcagtcatcattcaaaccattgggcaaaattacgttgcctgtgactttcggccaagcaaataacttccgaacgaaacagaccacctttgatgtcgctgaattcgatacagcatacaatgacatcattgggagaactgcactcgcgaagttcatggccgcatctcacaacgcgtatcaagtgctcaagatgccgggaccgaagggaacaatcactattcaagggaatgctaagctggcagtgcaatgcgacaagcggagcctcgacatggtcgagcacacacccagcccacctgccacagctgagccacccaagaaagtgagcaaaacaaacaagacgccgaaaccggacggcgcaatcaagatcgttccactctccagtgccaaccccgacaagaccgaactcgcgctcatcaccttcctccgtgacaatgctgacgtgttcgcttggcagccgtccgacatgccgggggtacctagggaggtgattgagcacaaactcatggtgcgacccgatgcctagccagtaaagcaaaaactacggagatttgcaccagatcgaaaacaagccatacgagagaagaactcgacaagcttctcaaagccggtttcatcagagaggtactccatctagagtggctagccaacccagtcatggtgcggaaggccaacgggaaatggagaatgtgtgtcaatttcaccgacctcaacaaggcgtgtcccaaggatcacttccctcttcctcgaatagaccaactggtggactcaatagccggttgtgagttgttgagctttcttgatgcttactccggctaccaccaaatcagcatggcgaaagagaacgaggagaagacatcattcatcacgccgttcggggtattctgctacgttaagatgccgttcggactaataaccgcaggaaacactttccagcgcacggtccaaggtgcacttagcgaccaactcggaaataatgtcgaggcctacgtcgatgacattgttgtcaaaaccaagataagcgactcattgattgatgatctgcgggaaatgttcgacaacctccgacgatatcgcctcatgctcaatccagagaagtgcacgttcggagtaccatcgggcaagctgctcggtttcctcgtctctggcagaggaatagaagcaaatcccgaaaagatcaaggcaatcgagaacatgaagtcgcctacaagactcaaggaggtacagaagttaaccagatgcatggcggcactaagcaggttcgtcgctaggatgggagaccgaggacaacctttcttcgctctgctaaagaagcaagacaaatttgtatggacacaggaagtcgaagaggcattcattgcactcaagcgctacctatcaaatccccctatacttgttgccccccaacctaatgaagaattatttctctatattgccgccacgctatattccgttagcactgtcattgttgtcaagagagagaaggtgcaacgaccagtctactacgtcagcgaagctctccacgacgcaaagacaagatatccacagatccaaaaactgctctacgcagtaatcatgacatcaagaaagctacaccactacttccaagcccacagggtcacagttgtatcctccttccctctcggtgaagtagtgagaaacaaagacgttgtcggccgcattgcgaaatgggtagtcgagataagccaatttgatgtccgctttgtgccatgaacaaccatcaagtcccaggtacttgccgacttcgtagccgattagactatgcctaataacaggtcagacaaccaaatcgacaacgaaacgtggacaatggcgttcgacggcgcactcaacagccaaggagcaggggcaggattcatcttaacatcaccttcgggagatcaattcaagcatgcaattcacctcaacttcagggcgaccaataacacagccgagtacgaaggactactcgccgtgataagagctgcagctgaactcggagttaggcgactaattgtgaaaggggattccgaactagtcacgaaccaggtgcataaaaattacaagtgctctagccccgtgttatccaagtatatcgcagaagtcaggaagctggaaaaaaggttcaatgggatcgacgtccgacatgtataccgcaaagacaacatcgaaccggatgatctagcacggcgtgcatccagacgagagccacttgaacctggcacctttctggacgtcctgaccaggccatcagtgaaagaggcaagcggcgaagatagcccggtcgcccccaacatcagctcgggggttacagaggcagagcacgccgttgccgatatcgagaccacagacgactggtgcaccccactcattaaattcataggcagcgaagagttgcccgaggacgacgcagaagccgagaaaatatcccgtaaagaaaaagtctattgtatgatcagcaacgatctatacaagaaggcaccaaacggggtactcctaaaatgcgtctcgtccgacgacagcagacacctccttatcgacatacatgaaggcatctgtgggtcacatgccgccggtcggacattagtcggaaaagcttttcgacaagggttcttctggccaaccgccctcaaagacgcctgcgacatgtaaacacacaaggctaccagcgcaagcactctagactatccctctcacttggccgttctcgtgttggggactagatatactcgggccattcccacgaggacagggcggctacaggttcctattcgtggcgatcgacaaattcactaagtggattgaagcgacacccacgggggaaatcaaggccgacaacgccatcaaattcatcaaagggatattctgcagatttggattgccccaccgtatcataacggacaacggctcccagttcatcaatgccgatttccaggattactgcatcaggctgggagtcaaaatctgtttcgcctcggtttctcaccctcagagcaatggacaagtcgagagggcaaacggcatagtactacaaggaattaagaccttactatgggccgtgcgtaccacaccgacaacgtccaacaaggagacacccttcttcctcgtgtacggctcagaggccatgctccccaccgagctacgacatcaaagtacacgagtacagaagtattccgatgaggatcaggaggaacagcgaaccgacgatgtgaatttactcgaggaacatcgcgaacgagttgtcgttcgagcagccagctaccaacaggcccttcgtcgttaccacgagaagcgcatccgagcacgcacgctttcgatcggtgactacgtcctccgatgggttcaaagccaagcagggcgaaacaagctctcacccaaatgggaaggaccgtacacgatcacacaagttctgcggccaggcgcattcaaaattgcagactgtgatggttgcgagttggcaaattcctggaacattgatcaattacgtaaattctatgta

SEQ ID NO: 98046 - DNA, 472 bp, Oryza sativa
  Clone ID: PAT_MRT4530_95990C.1
gaggaagtcctggtggttttggtggtcgtggtggcaggggtgattctcctggttttggtggacgtgggaggggtgatttttctggctttggtggacgtggcaggggtgattcttctggctttggtggacgaggccgtggtgatttctctggtggacgtggtgggagagggcgtggatttggagggcgtgggcgatctgaccgaggcccacatgaccgttttatctcagatggacgtggaagatacgataaccgtcgaggatttggtggcaagggtcgggaccggagctacagccgcagcccatatagaggccgttcgcgaggctatgaccgaagaagtggcagtaggagcctaagttgtaggagcagaagccgaagcaggagctggtcacgtagtaggagccgcagcaggagttggagccggagccgtaatcgcagccgcagcccaagtcgcagcatgagcagaatgctatg

SEQ ID NO: 98047 - DNA, 512 bp, Oryza sativa
  Clone ID: PAT_MRT4530_95991C.1
cccacgcgtccgcccacgcgtccgggaagatgttgtcccatccgagagccccttgattgctttcacaaagggtgatctgaaggccgatgagatcatgcgtgctctcaaggaggtcaccaaggctgccagtggcatgtaaattggttgcctgctgggaagcctaatattactctgaagcctggaagaatcaggagtgccagcttgatgaagtctcctggctctttaactgaaagacaagactctttttctctccttaatttacagcataatcttatggaccactaccacgaactttccttgcagtaataaataattatgacacttgtgatgctactacgggctcaactgtttatgagcaatttctatgatctttattttttcttttttggctcaaatgttgatgagctaattcagttatatgtattttttcttttaatcctgcacttggttcaagtacgcatatcatggcaattctcttaataatttcggtccttgttcaggattggttttgg

SEQ ID NO: 98048 - DNA, 243 bp, Oryza sativa
  Clone ID: PAT_MRT4530_95992C.1
atggcgtggcagatggggaggatcatgctcaagttccggccgattgcgcccaagccggcggagatggcgcggcgccggttgcgggtgtgggggccgggaaggggaagcggaaggcgtaattgttcatggtactactactacaacgggagaatttactatttgccacactctcaaaatgtctctgctcaaatgccactggcaaatagtaaattctcccctactacaacaggattcaatttataa

SEQ ID NO: 98049 - DNA, 622 bp, Oryza sativa
  Clone ID: PAT_MRT4530_95993C.1
actggaatagagacatgaagctgtataacattctctcaccaatgtacatatcaaacaaaattgcaataattaggctagtttccttaatataagtttagaaaatcaacatgatgggctcatcatacaaaaaaaagtttgaagctttcaagctccaagcatatagcttgcatgaaaagagaactgtgcagctaaccatagcatttctatctcacaatgaaaagactgggatattttccaaagaacctagcaaagatccatcatgttgaaatttagtcactattcagcataattagcctcttcgaccatatgcaagtctgcaaacagggcacgcatattcataaatatgaacacataaggtcactagcttcattgcccacacaatcatcatcaccagcaactcaaccagtccatggtcactaccttcaggtatttgaaatatcagggggctagtggttcacttaggacaaatgcttgaataaaacttcgggctgcatgcatctggtctggtgtgccggatatcaaaataacagtgtccattgcattacccatcggatctgcgacagttatcttagcccctgaaaactcacaaattctgtttaaacaacctccatcttccccacat

SEQ ID NO: 98050 - DNA, 676 bp, Oryza sativa
  Clone ID: PAT_MRT4530_95994C.1
actttctcaaggtaacctgtcaaactgtgttcaaattatgtctcatttttttgttgcaaacacgattttagggatctactgaacagactatatgcttcagatgtgccaatgttaagcagttaatgtcttagctaataagaacataatatttaatccacatatattagtatttaaatatatgtgagatgttgtataagttcccaaatatctgacctttgctgtgtgtagtgtacaattcatcaaactcgtatttaggctgtgtaactggaatgctaatgtctgaaatttaatcactgataaaatgtacaatttgtatggataactttcttttcttataggtgattttgaaaattttcagacagcttgttgtctaaacaagtcgaaaatatctccaacatttcgagagaaggagatgaatcttcagttaggaagagcatgtcactggatgatttgcaggagaaggctgttttctctgcaattattgtagatccccagatgaaagacacaaaagaatcaccggagcaaagtggatcaaatagtgcagtgcagaaaatgataagtgcctttcaaagcagctctccacaggatctgacgcggatcaaatcagaaagctcactaaaagggctgtctgcttcttcagagaatttcacccagtcttcttcagacaagtcatcta

SEQ ID NO: 98051 - DNA, 1710 bp, Oryza sativa
  Clone ID: PAT_MRT4530_95995C.1
cccaggaccccccccgggcccccgcacccccctccccatggcagtcctcccagacacccaatggcgtcgacgccggcggccgcgccgcctgagtgggttgtattggaccgcttaccgctcacctccatcgacctccctaaggacggcatctccctctcgctcgtcgcaaccccgcgcatctcgcagctcctcgtgtccccttcgctcggcctcgcctcaggcagcgtcctcgccgctgacccctccggcatccttctcctttccagctccgatccgtttcttgccgacagcaagtcctacgttctctgggacgcagtctacaagatttcctttcccgtccccgccacccccaccgagacaggcgccgccactggcctcgtcgtggttcccggaggatccgaccacatctacatcatggtcgcggagctctcgatccgtggcagcgacgtcatcctgcgctgcttctccacagaccctgccaagtggatccacaagattctacaacaaccccctcagtataagctcctgtggtgttggtgtagtgactatgctctctctcaccaggggaggctctggtgggtagatctcctgcagggcctcgttgcttgcgatcccttctctgacaatccagagcttcacttcgtgccgctcccaagctgttgccgcaaccccaatgtgcagcagagctgtcgcatgggtctgagtgacaatcgccgtgtgggtctcagccgtgggaagctgcggttggtggtgctaagccacgcctctaactctaagtccaggatcagattatggacattggctgattctgaggctggccattggactttggacttcgatttgtccagtcctgtatttgatgacatctggactgacttgtgtgattggaagattgccttcttccaccccagcaaaccacacgtggtctacttctcccagaagcagcatctagttgccgtggacctgcagatggttaaggtttcagaggaagatggtggcctatatggtgaagatgctgatcggcgactaagcatgagggcaaataagaggaagaaatctatttattgttttgcatgtgctgctgaaatgttgcatcccatcaatggctttgatggtggttatgctggtatgagcgtaaccaggggcgtgggtgctggggactctcaagcaggaggaggagagaggaggagaagtgagaggagagaagtgagggggaagagtgtaacacctgcgcacccactgactgaaccagaggagttgaagcagaatttcgcggcggccgacgtcggcgtcggcgtcggcgtcggcttcaccttcaccatggcgtgggagcaccgccacccagagatggggaacgaggaagttaatggaccttgggctgggccgtgggtggcaaaaaatctaaaggtggtgctcaaggttccaaccatgactgacgaaaagacgaagcagaaagcgatcgaagccgtcgcagatatctacggtattgattcgatagctgcagacctcaaggacaacaagatgaccatcataggcgacatggacaccgtcgagatagcgaagaagctgaggaagatcggcaagatcgacatcgtttctgttggacctgccaaggaagagaagaagccagagaagaaggaagagaagaaagaagagaagaaagaggagaagaaagaggagaagaaggaagagaagaaaggcaagaaatga

SEQ ID NO: 98052 - DNA, 407 bp, Oryza sativa
  Clone ID: PAT_MRT4530_95996C.1
gttcccaaagctttactttaaaaggtaaagacagggccatcgattacagcctagttggatcacccaaaaccacactacaaaaggatgggggaatttggccatgccaggacttataaacgacggaacaaaatcctaaagatcctagggttttgggtcaggcccaaccacgggttgtaaaagggacaggacaagtggaataggggtggccccactatccaactaaaaaagttaaaacgggggcactactctcaaaggctattttaaacaaccaggtttgccccattggaggggaagggtcactgacccgggtaacagtcccacatcactttaaataaacccgggtttgcacagaattcaggcaacttgttttatggaacaagcgccaacggaccactattctttttggg

SEQ ID NO: 98053 - DNA, 471 bp, Oryza sativa
  Clone ID: PAT_MRT4530_95997C.1
tctgagtatcggttctactttatatctatgtcgttataattgtgtggttagcctaccacagaggtgcagtggtgtgggtttaaggtctgattattcggttactctatgtcatccatggggatatatatagagtagtatttaatgatgtgggcatggtgcttagattattagatatcattatttgggtatatatgctgcgggacagtagaggtgggccgctgatggtgacagctcagtacgggtattcctccacgttagcatgtattcctaagacaattcccttgggagggtactcctccgcatttagccccggttggacggccatgacaggttgtcgtaagaaactcggcaacccagggtggtctctcgaaacaccaggagggcactagctaaaattcgggggtattggccgcacaagggaatgaacaaaacttaaggatagagaaggaattaggtaaattttcagtagca

SEQ ID NO: 98054 - DNA, 728 bp, Oryza sativa
  Clone ID: PAT_MRT4530_95998C.1
atggtgcgccacaacgatatcgtcgttgattctgtccatctatccggaggtggagtggcagggttgggactgggaggggcatgcagacaggcgccgggattgctggcgcggcgcatcccgccggtcgcgcccatgctgctggccacggggacacacgcccagcgccacgacgcggacaagccatccgcctgcacctcaacgtctgcgaaaatagttgattttcgcaggcgtgcgccagtcatccgcgctgccgccgcacggccacggcctgtcgtcgtcaacgcggatctaggagggggggggcggccgggagccgccaccgccgccgcagcacggccgcggcccaccgtcgtcaacgcggatctgggaaggaggggcggtcaggagccgccgcccgctgtcgtccgcgccgccgcctcaaccgccctcgccgccgtggccgtgccgccgcctcaaccctcctcgccgccactgcccgccgccgtgctccccttgcccccctccggccagatccgccggccaccgctctccccccgccccctccggccagatctgggaggtaggggccgggagcgcgccgccgccgccctccgccgccaccgcccgtcgctggccgccgccgccgggaggggagggggaggagaggcgccgcttaagtggtccgcctgcgaaaatagattttcgcaggcggacatcaaatttcacctcgatttatatgtttgtaggcg

SEQ ID NO: 98055 - DNA, 654 bp, Oryza sativa
  Clone ID: PAT_MRT4530_95999C.1
cctcgaggccggcccgggaaaaaaaaaaaaaaaaaaaaaaaaaatcacaatagcatcattcaatctttaattcatttgagagttgagagtgagcggaatatatttgtattctacgattgaggagaatggccagccctggagtttgcatcaacttggtgaatggtacatcgacgcgcctccccaccaatgctgatctagtagtccactacctgcaccgtcgcgccattcaggaaccggtgccctgtgacttcatcaccaacgtcgacattctccagcacaacccctgggacatcgtccctgcggaggagaagacaaatgggaagtacttcttcatccatgaggagaacgaacgccttggcaaccaccacagcaaccgtgctgctggtgatgggttctggaggccagtaggctcagaggtgccgatatatcacaaacgtagtggtggcgctgatgaagcactggtggggatgaagcgcaccttggtattccactacgggaattcttcgtccgcaaagcgcaccgaatgggtgatgcaggagttccgacttgctggtgctacccttataccttgccctgtgacgaggccagccaccggggatggctccatgcttccctgccaccggacaggaacgaccatcgccacggaaaacaatg

SEQ ID NO: 98056 - DNA, 2650 bp, Oryza sativa
  Clone ID: PAT_MRT4530_9599C.1
ccgcctctcccgcctcgcccgagcgccgtccggtcgcgccgtcgcctcctacagcatcgcagccgcctcctctcccacggcctaccctccgtttcgcgcggtgaccgccggaggcgcgttcccgccgtcgccctcctctttccttcgcgccggccgcctccagccgcctctgtctccctgcctgagcgccggtcgacgtcgccaccacctccctcggctccgcgacgccgccctcatccccggcatcacctcctcctcgcccgattttcgccggaacaccgtcgcccgcgccggcctcaccttcctcctcgtcgacgtctcctccggcaacccctttcgccatgcccgtgcatcagccggcgctgccgtcccctccctcggcacggtgaccggcgtgttccacgtcatcctcgtccccgtgcagccgctgccggctgtcctcgtcgcctcctcgccggtcctggtcatcgtcgtcgtcgtcgtcctctcgtcgttcccggtcgtcgtggcccccgtcctcgtcttcgtcctcggctccgcgtcgtcaagccccgtgccggccgcgtctcgccttcgttcaaggatcgccgccgaagccgtcccctcgccgttcgtctccgttgtgcccgtctgtctccgctgcgcccgttcgtcgttgtcgttcccgcgcctcgtcgcgtggtgggcaaatgaaggctacacgagctgcggcccggtagtcgagatgtcatggcagagggttggtgccctgctgctaggggctcagtcctgcctgcttgtcccggaggttccggccgtaggtgggattgggtcgaatcggaacaacccagcaggggcaaccaacgttcaagtacctacagtccagcaacagtgcaagttatcagaatttctcaaaactgggcctccaacctttgccatggccgtcgatcctatggaagccagtgattggttgcgcacagtcgagaagaagctagggttgattcagtgcaccgaccaggagcgggttggcttcgcaactcatcagttggttggaccggcttcagggtggtgggatagctacgaagcatcacggccagaaggacataccatcacctggaacgagttttcatctgtattcaagaaatcacatgttcccgcaggaatgatcacactaagaaaacgagagtttcgctacctgaagcaaggagatttgaccgtcacagagtacatgcacgagttctatcgtttggctcactatgcaccagaagatgtggaaacggatgaagacaaacaagagaagtttctccaggggttaaaagatgagcttgcagtgcaactactcctagaggattatgaagattttgagaaacttgtggacaaagccatgcaactcgaaagtgagcataatcggatgacgaactgcaagagaaggattgtcaacatcccagtaattccaggtggtaaccaaagacagcgcactgagccacttcagatcaccggatcttctgttgtgcatcaagagttcctgccccaagaagatgaacgcaatgcagacaacaacactagcaatactaatgatgatgatacgaccaacaaccatggttcttgccccattagtgaccactcgaataaagcgtgcaatgtcagtagcattcaccaagatgtcaacgatagtatcaatgttggaacccagaatgacaaccttagcaatttcgacactgagaaagactccaatggtgatagcaactatggtaccattgatgccaatgtcatttctccagagattgtccacagccgaagcataacctgcgtcatcactccggccattatgcaagaagaagacaaccgcctctccctcctcgccggagcaccttccggccgcgccgtcttctccctcggcctcgcagccacctcctctccctcggtcagccctccgtttcgcggggaaaacaccggagacgcgttctcgccggcaaaacagtggcgttgccgccactgttccacctccggccgccactgtcgcgtttcccgtgcgccggccgacgtcgccaccacctccctcggcgtcgctgcatcgccctctcccccggctgctcctcggtttcgccggaacgccgtcgccgcgccggcctctccatcctcttcgtcgccggcgtcctttcggccgccccttcctcctccccggctcgtcggcttgctgcaccactaccacctccggcatcgcagcggcaaggccgtactcggcatcgtttcccctccatccaaacccctccgcggtccatcatcgtcgcctccgatcgttctcgtcgtcgacgtcccgtcggtcgcccggctcgtcgtctcgcggcgccgcctccgtcatcgtcatcgtagcggcgtgttccacgtcatcctcgtccccgtgcagccgctgccggctgtcctcgtcgcctcctcgccggtcccggtcgtcgtcgtcgtcgtcgtcctctcgtcgttcccggtcgtcgtggcccccgtcctcgtcttcgtcctcggctccgcgtcgtcaagcctcgtgccggccgcgtctcgccttcttccaaggatcgccgccgaagccgtcccctcgccgttcgtctccgttgtgcccgtctgtctccgccgcgcccgttcgtcgttgtcgttcccgcgcctcgtcgcgtggtggtaa

SEQ ID NO: 98057 - DNA, 215 bp, Oryza sativa
  Clone ID: PAT_MRT4530_959C.1
ggcgagtcaagactagccttcacattccgccaccaaaatccggccgccaaaaccctcgcctccttccccccacgccgcgctccgacctctcgccgccggcgagcccccgcgtgatctccatcctccaacgcagcgccgccgcccgcccgcgctcccgaccaccgcggccctaacgcgctgcgccgggggagcttcccgtctccgcggcgctgctt

SEQ ID NO: 98058 - DNA, 129 bp, Oryza sativa
  Clone ID: PAT_MRT4530_95C.1
atgggtatgggtatgggtatggattacccatatcgagtggcgaaagctcagccagttcttttggccggcagcggcgacgtctttggacgccgcaaacctcttgagggcgctgtcgaggcgtcgctttag

SEQ ID NO: 98059 - DNA, 663 bp, Oryza sativa
  Clone ID: PAT_MRT4530_96000C.1
agtggatccccgggctgaggtgagtccggcagcaactatggcgtccttctccgacatccacgctcctcccctcctcccaatccacggaggagctcccgactcagattccccgtcgctaccccgcttcctcgctgccgccatggcggcgccggcaagaagagccgcctcctggtcgcaagaagaagggggaggagagaccgggtcgcctgccttcccacgaaggaggaggaggaggaggaggtcggcgtggcgggagacggtggggaggaggatggggacgaggacgggtacctggcgagggagggcgagtggggggtgcggcggatggggcgggtcggcgaggagatgcggcgggtggcgctcgtccaggccgaggccttccacatccccgtgggcctcttcaacgacttcttcttcgattttttcaaaattaggcggaggtgctgtcggcgctcatctacagggtgaggaattcgccgcctgacagatacgcgtgtttagtggcagaagaagtggatgcaaccagccagatatctgaggcgccattcgagaaaattgttggtgtggtggactgcacagttcagaatgaagctgacatacttaagaacctccaaggcgtcgacgagtacctctatgtgtcaggaattgcggtgttgccatcct

SEQ ID NO: 98060 - DNA, 279 bp, Oryza sativa
  Clone ID: PAT_MRT4530_96001C.1
gaatcacccaaatactacggcaaattctgccagtcatcgcgagggttgatttttgtctataacagaacgcactgtccgtgccacagaatactaacaggtatagtggacaggacatagtgatatacatcaaaccggctgacaatgaacgatgaatcattttgagggcaagtggcaaaatcaaactgcaatccactttggtggagagcataatcttcataggccgtaagggtttctggtacttgaaacaccactgatggaggttcatagtattaagacaca

SEQ ID NO: 98061 - DNA, 532 bp, Oryza sativa
  Clone ID: PAT_MRT4530_96002C.1
ccacagccctgcttgtcccctttgaaaaaaaaaaaggttccacgccattttgcaggcccaaaagcgggaaaagaagagtttaacctaatgcaaaggcagcttttttttggccctccttcctttttagattcgggacctttctggaaacagcctatttgccaagctagttacctccaaagtaactcctaaatcaatgtattatgggctgtttttgctaaaatatgcccatattggcatgatgaatcatagcattgaccgcctcttttttttctgcaaagtatgtggagtgccccccatagcagacttagaagactttgatcacaaagctccagaggccaaacctttgaaatgacatccccttgagaggggccatcgggaacccttttaggaagacggttgcacccgccggccttggctttagagggaccatccactttgatgggggctttggcatgtctcgccgccccgcgcaggggaacatgggggtaatcgtcacggaggtggtgccaaacaaagccattccccatggggt

SEQ ID NO: 98062 - DNA, 438 bp, Oryza sativa
  Clone ID: PAT_MRT4530_96003C.1
gttagaaatataatgtgttagttagagataagagtcaaatacaaatatagagataagatatatcctagagattgactcctagagataagatagagtcctaaagatagaatcctagagataaatctactcttacttgtattatactccaagtctctatcccctatgtactcctatatataccccatgagagggtcgatataatagatcagaaaacatcacaataaaacaaattagaattttccacagtcagccaaaacactcccaagaacgcaaacgcaaaggaaacctgggtacactacagccgagaacaacggcggatcctgtcgctctcggtgacgacgtggccgcgcgtgatctccttcaccgacgtgcagccgctgagcgccatggtgatctccagctcgtctctcagcatccgcagcgcgttcctcacgccgg

SEQ ID NO: 98063 - DNA, 342 bp, Oryza sativa
  unsure (1)..(342): unsure at all n locations
  Clone ID: PAT_MRT4530_96004C.1
ccgccgtggcctgngtcggcgtcctcatggccggntggtccttcctcatcagcatggcggcattntcctccctcctcctcggntggttgtcctcggcgtntactgcttcaagggcttggtntgctgatcgatntgaaggccattttgttgaaattcgaccagaatatgcatcttttttcagttacgcaacgcgcactttcagtaaattatagacagtttttacagtgaaatcagagagttgtacacttgtagtcatctttgaagtttcatggaactataatntcatggatgatgatgaaggagaaccgatgaaaaaaaaaaaaccaaaaaaaaaaaaaaaaa

SEQ ID NO: 98064 - DNA, 435 bp, Oryza sativa
  Clone ID: PAT_MRT4530_96005C.1
ctcatcagctcgatctatccaactgagctattctcgcttatcgagctcgatcgatcgcttggtcgagatggagaacttcccgatactctttgcgacgcagccgacgtcgtcttctacctccagctcctaccacttcatgagctcctcttccggcagccatgaccaccgccaccaccatggactacaggcaggcggcaacggcggtggcggtggtggaagcttgagccatggcttgttcatggggtcgtcgtcgtcgtcaattaggatggaggagctctccaactccaagcaggccggcgacgtcgtcgtcgacggtggtgcaacgaggagcccacacggcggcgacggagacggagctgcgggcgacgacggcggcgatgcgcaggcagccgccgccggagggaggaagaagggggagaagaaggagcggcggcc

SEQ ID NO: 98065 - DNA, 1138 bp, Oryza sativa
  unsure (1)..(1138): unsure at all n locations
  Clone ID: PAT_MRT4530_96006C.1
atgaaggagtctgaaccaaatttgatgttcctttaccacatttacaattgtgacaacaacattgccttctttcaaaaagatgctgaagacatatactattacactgcctgtggaactgttagaattgactacatcaaggatgctgctgtgattccattattcagggagatgaaccccaactagtgcatggaacacgcttaacgatcatggaaaaaacaattggctttgcacatatgcttttccttaatagaggaggaatgtacaaccaggcaagcataacttgatactgcctccatttgcagatatcccataaaagaggatttcttgcccactcaagctttacaaaagtttaattaactaaaaacattcctctccattgcagtaggaatcactcaacagttccatccatacacatgatgcagccatcagaaccagatgctatgctagtaccatgaagtcaatgcaaaaacagctactcctnaattacaaggagaagaaatggaaatgatattgttctcttgcaaaagaagttcattgttgaaccaaaggagcaaaaatatggtacagtgaggttgattgaagggaagaactgtaatttggattggattacactacaccatcttgattttccctccaaacctcagtgctcatcagagtgcattatatcaaaagaaagaacagcaaaaggagcatagagctgaggtgctcttgatcaaaacaactactgatactgaccttgacctgaccttcttggtcgtcttcttccttctcctaatctacaagaacatggggagcagcagctgcaggaggaggaggagctcagttccaagctccccacaccttctccccgatgaagcgcaccagcctccccaccgtgctcttctcggcgttgctgctgctgctgctgctgcaatcgccctcgctcaacgtcgtctcgtcgtccgcatcgccgtccatgctgtcgccctcttcctcctcctcctcgtcgtcgccatcgccctcgtagtcgccgtcctcctcgccatcgaagccacaggcgtggtggtggtgttccacgctggcatccgcctccttggtggcacttgcatcctcctcgcagtcgccgcctccgcgtttgccgccgcggcggcggcgggaa

SEQ ID NO: 98066 - DNA, 161 bp, Oryza sativa
  Clone ID: PAT_MRT4530_96007C.1
gttatagataagcaacaacgcaaacatagcgggggcttttacgaccgggttgctggaagcgtccccgatggagatacgaccgcttaacgggccggaaagcaccaccacgttcaaacaagcggagcgcagtactcgacgaagaactccacaagggctacatc

SEQ ID NO: 98067 - DNA, 207 bp, Oryza sativa
  Clone ID: PAT_MRT4530_96008C.1
atgaaatttttacgcgggaaacggagggtgtcgtgcgagatataccgggcgcggggcgcgggactgcggtgttggctcgatggcgggattgttttgccgccccggctgcatgtgagaagggagtctcagtggcagcgaggtagccgccggcgagcgaccgttcggacaaggccgaacgttggcgcagcagagtcaatcagaacacag

SEQ ID NO: 98068 - DNA, 1233 bp, Oryza sativa
  Clone ID: PAT_MRT4530_96009C.1
atggcggctgcgctgccagacgacatgctcgcggaggtcctccgccacctcgggccgcgcagcctcgccgcgtgctgccgcgtctgcaagccatggcgcgacctcgtcgacgaccgccgcctgctgcgtgcggacctcctcccacgctcgctcgccggcatcttcctcaacttctcgggcctatgctacccggaattcttcgctcgcccctcgacgacggcaggagccactaccgccatctccagtctccttgacttcttgcccttcgatggtactaaatggtacaagatcgaggatcactgcaacggcctactgctgcttgactgcaactgcgtggttaaccctgccacgcgatggtgggctcgcttgcccccacgccctcctccgcgcgaggacatggagagatggagtacatccatactgcttacctcgtcttcgatccagccgcgtcttcgcactacgaggcgtatccaagttgaactggaaccatccgaatggccaccaccattgtacgtcttgcccgtcttctcgtcgagaaccgagcgatgggaggagaggacatttgtccgtgaaggggaagctgcaggaaatacgactgtccctgataagagaatatccttgagaaatgataagtaccaagtgatcaaactgccaaaggttactaggatgccctcagaagactcttatttttgtcttggaagatcacaaaaaggagtgtaccttgcattagccagacattgctgccatcttctagtttggattctggatgaatcatgtgacggaataaagtgggagttaaagcatgataaagacattaaacatattctacttggacgaaataaagtagatctgggaccatggatcttacaggaaattaattatcaaaaagaagaaggtagcttatcatcatatgaatggtttcgaaagaagcttgaatatgagctcaacgaggaagccacattggagaagtctgaatggaactctgatgatgataatgctccttgcaatgaagatattataggaagatacaatgaagctattgatatcattggattccaccctttcaaagagattatattcttcagtgaatcgttcgagagagggatagcctatcatttaaatggctcaaaggttgaagatctaggtgacttatacccagtaggttacgattttgtaccatccaatgagcaaatgatatctgcgtcttatccgtacacaccctgctggatgtga

SEQ ID NO: 98069 - DNA, 1933 bp, Oryza sativa
  Clone ID: PAT_MRT4530_9600C.1
cttgcacatcgacgatgaagaaagcggttggtagcgtcttgtttcccacggtgagctctgccgaaaagataccctttgcctccgttggttcaccattgaaaccattgagaatcatgttggtcttcttcaactcatcatcctcacgccccaacttcttgaataatgagtacggcatcaagttcaccgcggcacctccatccactagtatcctagagatcggcttcccatcaacatggcctttgagatagagagggttcatgtgacggtttgactcatcgggcttctcaaaaaccgtgtctttaggacctaatgagaattgagcaacctcggcttcatccatagcacaaaacggtggtggtcgcaactcattgaaccttttatctctttgctcttcggcttttttctctcttatctcttgagcccgaagacgttgcaaccttctcttttgagtagccgtcaaatccttaggcatccacctaggatccggctctgttccaggaggtaaataatgccctctattaaccttgtttgaagacgatgaagccctcacatcgccctttgcaaaccttctatcaaaccggcgctggagccgggtcagaccggacgtagaccaccggtcagaacgggcagatgcccccggcaaaacgacatttgggcgcccggcagacaaccttgaggggtcggtcggaccgctgtcgggtcggcggtcagaccggcctgatggcccgatcagaccggctgtatggctgcggtcagaccggccaaaaggcctggtcagaccatccgactgcgatgagctggtaccggcctcggattttttccttgaagactctccaacttcatctccagaaggtattgacacatcatgagaccccactttgatggtaattacttccgaagtccttacctccaccttgatgcgctttctttccctcttttcttcattagcccgattcttaccatataaccggccgttgttcggtgaaaataaacgctcatgaattggcctcctcggtcctccccacccaccttgcttctcatacttttccaaaagcatatcaaaagtcactttggtctttctaggggctttagaagttgaagctccactcctattttccttccaaacgccaacctccggtttctttggcactatcattttaggccttgcttcaccaatgattactccttttcctttagtagattcggcttgctccggccgaatcaacaccttcttatcattgaaattaatcgcattcaccggaaaaggatcatgatcaagattcatcttggagccatcagtgaacttcaatcgtccttcatctatggccgattgaaccaccacggtatacagacggaagacgtgacatagtttccaacccatcctagccatagacaagagtaccgacccaatcccacctacggccggaacccccgggacaggcaggcaggactgagcccctagcagcaggacaccggccctgtgccatgacatctcgactaccgggccgcagctcgtgtagccttcatttgccctggagaatgtccatcgacccccgacttcatccatctccaatccgtgtacttttgtttataaccagactgagccacaaactaagccttacccactagacatgtggaagtacggtagtgctttgcaacagaggcccgaagaccggtccttatatggccgaggtgctactatcaaaaccatgcaccccgagcccagcctaaaaccattttggggattttgaatagaaggagcgatgatgtgacttgccttgctcgctttcccaaacgtcggcttcaacttccacgaagagcgggtcttccgaagctgcagcgtctacacgaccaacggaaaagaaaaggcttttactctaataaactccatataacagcagaaacaaagcacaaaaatgggttcttgacttct

SEQ ID NO: 98070 - DNA, 189 bp, Oryza sativa
  Clone ID: PAT_MRT4530_96010C.1
atgtggaaccggatccacatccacgtgacggctgtggtgctgtacgtcccgtggtgcaggggcggagccgccgcccctccaccctactggtggatcactggcgcttcctttaggaagagctgcttcaatctgagcaacgtgatggcagccggcatggggatgctctccgtgcagtacgtgctgtcgtag

SEQ ID NO: 98071 - DNA, 564 bp, Oryza sativa
  Clone ID: PAT_MRT4530_96011C.1
atggtgtctccggatactgtcaggaaagacgaaagcgctatctctgatctcgccggccacggatttaaggaggaagactactatgttgtcgactacgagtcagaacttcagaccgccatgtcgacaacacgtgacctcgcctcctctttctccaccttcactgccgcttgtccagggaggctagatccggtggcgccatcgacctccgccctctcctcccagtgccaggctagatccggcggcgcggccgccggcggggagaggggagaggcggcgtcatcgacctctgccgctcgaagcagggatagcccccggcgagctggatccgtggcgctgtcgtcgccctccgcagctcgaagcagggacgaccccggtgagctggatctgaggcggcgccggcagagggaggaggggagaaccggcgccggcggagggaggagggcggaagccggcgcaccgggcatgttgatgggggggatttggtggggtggttgtcgtgaatgcgcgatgagggacgaggattggggggatttgggtgtggcagatatttgtgggtcccactag

SEQ ID NO: 98072 - DNA, 245 bp, Oryza sativa
  Clone ID: PAT_MRT4530_96012C.1
gtataaataaagatagccggagcttccatatatttcattcacatatgccttacccaacaacatatagtcgcagcggataccactcttacagtaagtcagagagagatcacgtgaaacatacacataggcagagcacgggcggcataatcaaaagacgatgaacacactgtgaacacacgcgacaaggtgggagacatcatcgaatcagagatgaacaatgaaacacggctatatatgacgatgac

SEQ ID NO: 98073 - DNA, 936 bp, Oryza sativa
  Clone ID: PAT_MRT4530_96013C.1
atggcgctcgatgagctctccctccgtctcccctcctttttcccctcctccgctgcccccttgcccgcgtcgcgctaccgtcgccggaggtcgtccagcaagtgtagtgcttctgagctgaagacgaggttagaataccaaggctcagacccctgtttgccacatggccagagaattcccccttcatcgatgggctgtgccagattgttgcgccgtcttttcactgagctcaacgagtttggtgaaagctgcgcagccgcggaaagcttgttcgtgcgggccgaggaggatcttcgccataaggaggatgagcgtcgggtcgtggcggacgccataaagaaatctagcgtcgagaacaagtccctcacgggggaaaacaagtctctccgcgtcgacctggacggagcgaacaagagggccgccgaacgggagcgccagctcgctgcggctttggaaaagattaaatcccttgaaacacagcttgtctcagccgaagctgctaccaaggcttgggcgccgccggcgacggagtcagccaagcaagcctgctacacccttaggctggctctcaacgaccttgttgtcgaagtggctggcacgtacggcgattgctgtgcgcgagttgccgcaggcttcgtgcttagcctccttcacgaacatggttgtgaccatgttgaggattttcctcagatcgtaaagaagggctggcccgaaaatgaccaatctgccgcgtcggccgtgaagacctttcggaagagcttctgggagaatggcggcaaggatggcgcgaagacccagctccgcgaccagctggagaggatagcgagggccgaagacgccgctgccgccgatgctagtgaagatcccgagccgtcgggggcgcctgctggccgtgagggcgaaggcaacaaaagccaagaccaccctgaggtgtga

SEQ ID NO: 98074 - DNA, 375 bp, Oryza sativa
  Clone ID: PAT_MRT4530_96014C.1
atgcccggtgcgccggcttccgccctcctccctccgccggcgccggttctcccctcctccctctgccggcgccgcctcagatccagctcaccggggtcgtccctgcttcgagctgcggagggcgacgacagcgccacggatccagctcgccgggggctatccctgcttcgagcggcagaggtcgatgacgccgcctctcccctctccccgccggcggccgcgccgccggatctagcctggcactgggaggagagggcggaggtcgatggcgccaccggatctagcctggcactggaaggagagggcggaggtggatctcggcggccgagtgacggcggcgtcgtcggggcccagcggaggcggcggcgctcttga

SEQ ID NO: 98075 - DNA, 360 bp, Oryza sativa
  Clone ID: PAT_MRT4530_96015C.1
agaagaagagggtttctagagcctggactttctggttctccggctctctataaatccttcacacacagatccaccagaacacaggagtagggtattacgcttctcagcggcccgaacctgtctacatcgcccgtgtctcgtgcatttgctctctcgcgaatattccacagatcgagggtgaagaacctcacttagcgcccccggccgaaccggcaaaggggggcctgcgcggtctcccggtgaggagccctaagctccgtcaactatgattaaaagttactccttcatggattggaaattatttccatttcccattatccaaacaaggcctttaggttaatgatgttgggatcccacatt

SEQ ID NO: 98076 - DNA, 706 bp, Oryza sativa
  Clone ID: PAT_MRT4530_96016C.1
gcacgaggagtcaatagcgtgaacaatggtgtccatggcgccttcctcctccgccgccgccacccgccgccttccccttcttcttctcctcgccgccgtcctccttctccacccatgccacgccgccacggaggcgtcggcggcggcgaggcgggagtgcacgtacacggtgcgggtgaagacgagctgcgcgtcgccggcgcggacggcggacattgtcagcgtcgcgttcggggacgcgtaccggaacgaggcgtacggcgcgcggctgccggcgggcggggcgtcgggggcgctcgaccggtgcgccgtcgacgcgttccgcgtcggcgggcagtgcgggtacggcgtctgctacctctacctccgccgcgccggccgcgacgggtgggcgccggagtgggtgcaggtgttcgagcctggcgccgccgccggggagaagccgtccaccttctacttcggctcgccgctgcccgacggcgtctggtacggccacaaccgctgccccaaggcgtccccggccatggcggcgcgccggacgaacacctccgcttcacctctaggctagggtagctgctcgctccgcaatgtactagtagtactacggaattggcgattttcggaattcggatgcatccatccatcactcaagaataaacagcctcgtgtgtgtgagaaatatcggaaataagagctttcggatgac

SEQ ID NO: 98077 - DNA, 383 bp, Oryza sativa
  Clone ID: PAT_MRT4530_96017C.1
ctgcaggattcggcacgagggtaatgccacatatagagtggtggcaataatttttattgcaacgatgaagtgttgcaatatgcttttttaccacatccattccatggcaacatcgaaatttgttaccactaaataaaaatcattgcaacatcctattaccaccgtatttattaccacggctaccaacgattctaaaattatggcaacatatatctattgccatgatttttttcgtgccgacaaaaggcggcatatgacagcaatcatcgtgctttggaattcagtgttggcgattgggtttggttgcgtctgctccatcggccgatagcgtcattgtctgtcagcgttcacgggaagctcggtccgaagttctttgaaccata

SEQ ID NO: 98078 - DNA, 948 bp, Oryza sativa
  Clone ID: PAT_MRT4530_96018C.1
cccacgcgtccgcttgaaacctagcttgaagctagcttaatttgctagccattatagcctctcatcgatatatataccccaatgcatatgtaattaagcttgaatcctatttttcttccttgtttgtgttttgtgtttgtgacttgggtcgaattagtttgagagaatttggagggtttttggttttggttttgattttgattttgattttgatttagtttttgagttacatggacaggttcagaaatgtgttgctacgaaagtgcaagagcctgtcacgctctctctcgaggtcgagctcctacaggaacctccgatccatgtccacccgggagcacgtcgtcgccggcggcgatggcggcattgtcggcggcggcgacagcaaggcggtgtcggccggcggcgacggggcggtggtgttcgtcgggagctcgcggcggcgctacgtgatcagcaacaagcacctcagccacccgctgatcgccgcgctcatcgacgacgacgtcccggcggcggccgccggagacggaaaagaaggcggcggcggcggtggggtggttgagaggaggaggtcgacgtcggcagcgacgacgacgtcgtcgtcgaccaagccgatcgccgtcaactgcgaggtcgtgctgttcgaccacctactgtggatgctggacaacgccgtcgacctccgcgccggcggcgacggcgacgacgacgacgccgccatgagagagctcgcccagctctacgcctactagctgctgctgctgctgctgctgatcatggagagagatcagcttaatcaacaccatcaatgttagttaagtactcgatctggtacatgcgtgcatgcatgttgttagtaatttgttttgattagttcttaaaattaacttgccttgattgatttcatttttaatttgattgttcatttggttcttgccgcgagatcta

SEQ ID NO: 98079 - DNA, 4422 bp, Oryza sativa
  Clone ID: PAT_MRT4530_96019C.1
atggcagagctcgcgtctggcgccgtgagctcgctgctgggcgtcctccgaaacgaggcgctgctgctggggcgcgtcgggaacgacgtggaattcatcaaggaggagatggagagcatgcacagcttcctggagcacctggccaggacggctccgcccgtcggcggcggcgggcacgacgagcaggtgcgcacctggatgaagcaggtccgggagctcgcccacgactgcagcaactgcatcgacatctacctccagcatggcgaccccgcggtctaccgtgccaggcgcggccgctgccgctgcctctggtgggcttcctggcttgtgcacagggtggtcgcccagcaccacgccgccacccgcctccgcgagctcaaggagagggcgcgcgacgtcggcgagcgccggataaggtacggcgtggtggtccacgataaggcgcccttagcggcgccatcgtcgtcgccgcctgatcaagcagctgacacagaagaagaggacgacgacgacgacgatcgtaaccagatggcagctgcggctgccgatagttgtgatgaccaccgtcgcagattgctagagcctcgcgctctagacgactactgcgccgagaagctccttggttggctcaagctgcaagctgaaaccggccgcgcagccgcagcggggctgatgccgtccatcgccattgttgcacagggaggtgcagacaacgctggcgccattgcacgtcagtctttggatttggcggccgtccatttcgaccggcgggtctggatcaacctcagggatgttcaccacccatgggatcttcctctcctacctgaggagatcctctgctacatcctgcatcgttgccagcaccaaggcacatctgatcatgtaggcggcgagtatggccgatggcaagcttactcctacagaagcgatgtatacaacgaaatccatacgacgattgcacaaatgaaggtcgacgacaagattgaagaaatcaagggcaagattgaacaactcgagagcgggaagagcaacaatttagaaaaaaataagagctccaagaccctgaatcctatcaccctttctgataaacccttgggcatactcgtcgaagcgctacggttcgcgccaatggcgccagagtgtaagccattatcatctgatgaggagattatgcaggaggcggtcgagatgctcaaagaacatatggaagctcctgcaggcaaggctgctgagcccctgattcgtctggataatacccaatatgagctcatcctgcagaagatgttcccccccgcatccaccaaacctcctccacagtctgaacaagccgccgcttctacattgggtgaggatcacatcagggagatagtccacaaccacaagattacactagaaatcatacgggagcttcttcttcccatgcgccacctgttggatggcaactctgtcaaggaacaaaccacatgtgtcaccaaaggtgaaggcgctaactctgttgcggctgcaaacgaagaagccaaggagaagatggtggatgaggatgagaataagacgcgtctattgatggaaggcatcacacaggatctgctctccaagtcgtccaagctccagctgttacaaggcaactatgtcgaagaacaaaccaagcagctgggcatgggcggtcatgataaaatatctaataacgctgttgttgatgctatcaagggaaccaaggataagatgtatgagatgtcattggagattaaggaccagctgtttatcaaagggatagttgacaagattaaggatcatttggataataagaaggctgtgattgttctccaagatgaagaagagtatgtatcccagtgggagaagactagaaatgctttgagtttgttgggttgtgccacaggtagtgcagtgatcgtggcaacaaagaataatcagagggccaaggaattttgttttccgcctggggagcctgtaacctattcacttgttggcctctaccatgatagagtgctcaagcttacaaaccagcgggagaatcaagatgactacaatcgtcagattctccgggacatcttggacaagtgtgatccacaagaattctccatgaagatgttcatgcatgctctatatgctaatccaaacaggagcaatgaagaactgtgtaagttgcatgaagccttgcaggttccccaaaactcattggccactagtaacgctaagaagatattcaaattctcctacagagatctaccaagagagcataggacctgcttgctatacctagctatctttcccccaggtcacaaaatcagacgatcaactataatagcacgatggcttacagaagggctgataaccaaggaagattggccgacagcagttcgtcatgccgagagatgttttgatgctctcatcaaccggtggcttgtttggcctagcgatattggtgctgcaggaaaagtcaagagttgtatggtatgtgatccaattcatgggtttataaccaagatggccaagaaacaacacattttggatgcacgcctttcagatctttgggctcgccacttctccatcttcagtggtcttcgactccgcgcatctgatggcatcgacaagttcgtgcacaagcttcctaagtattcacctcaactggcactgctcaaggtactagatttggagaactgtcaatgctttaataagaatcactacctcaaggacatatgcaacaaaatattacttctcaagtatctgagcgtaaggggaacaaatgttacccatctgcctagtgaaatcaacaacctccacgagcttgaggtattggatatccagcaaaccaagatgcctgagcatacaacaagagatgtcatgctcctaaagctgaggcgtcttcttgctggtcatgttaaccagaggcatagtcatgacatgggcatgcccattggggatgagatgtcattatattccagtgtccggatccctcgcaagattgaaaagatggaaaacatagaggtactatccaatgtcaaggcttcatgggatggaaatgagctaaaaaacattagaaagctatggcggctaaggaagttcggtgtggtcatccacgacaaggattctcaccttgataaattgcttcgagcaattagtgacttgaaagagtgcctccagtctctttccatcactgtatatgaaaccaaaagtgaaggcatttcccctaacaaacagttactactacctgaaatgttcggtcgcttggtacaaccacctaagcttcttgagagtctaagcatcaatggacttacacatagggtgcgacttcttccattgttggccagaggtagtaatgaacttgccaaggtaactttgagcggcactgaactgaaacagaacgatctgatggtcatggctgtactgcccaacttgtgctgtgttaggttccaacacaaggcatacactgagagaacgctcacattcaaggtggatgaattccaacatctgaagtattttcttgttgagggagtcaacatgacagacattatctttgaaaatggagcagctcctgagcttgagcatatcatcttgtccttcaccaacatatgctctctttgtggcattggctgccttccaaaattgatggagctccagctcaagggaaacaactccatcctttcattacctcaagacagaatagctcctgatatgaactctgagagtaggttattaaccttcaagaagggtgaatttgaacaactcaagaacttcgttgttgaaggccccaacatgaccgacatcatctttgaaaaagaagcagctcctaagcttcagaagattgttttgtccttgaccaatgtaaactctcttagtggggttgaaggccttccaaaattgaaggagattgagttgaagggccacaagttccttctttcattctttgccaatgccaatcagattaccaaagtgactctttgtgataccttactgaagcaagaggacatgcatatcctcgcaaataaaccaaacatgggcagcatagtgctgttggacaagtcttacgatgaaagccagcttgcctttaacaaggatgagttcccaaagctcaaccttcttatcgttgagtgctctacaataatcaacatcagcttcgccgatggatctgctcctaagctcgagaagatcgtgtggcacttcagtaggaaggatttttgtttactctccggcatcgccaacctcccagaattcaaggagctcgagttcaacggtgattttgtccctgacaaggtgagaaaagccattaatgcgcataaaaggaagcctattcttacacacaagaagccacagcatcacgggccagcaccaaaagaggaagacgagacaaggtttccatggatctccaacttgttctcgaaaaagcaagaggatcggcgctag

SEQ ID NO: 98080 - DNA, 233 bp, Oryza sativa
  unsure (1)..(233): unsure at all n locations
  Clone ID: PAT_MRT4530_9601C.1
aaactccggtacagggtactggatggactaagtnacaagttacttggttctccgggaaggtcactgccgtcaaatttttcgggtagtaggcttgaatcccagtttggtgagatttggagtattttcgagaccatgtgatttgtgtcacatgggaagtgaaataaacagggtcactatagcaaaaatttgtggtgtaactggaacggctgtcaaattacgaaggaagatattng

SEQ ID NO: 98081 - DNA, 295 bp, Oryza sativa
  Clone ID: PAT_MRT4530_96020C.1
tttgctattagaagaacttatttaggggttttccgatggctcttcgtcaccatgggggggggggtgacgcaggaggcgctgttcaggttgcacctctggagacaaagaggtcggggagattatcctatccttgaagatgaccatgaggacgaggatgatgatgatgacgaggatgacaaacaggatgaggttcaaggagctggaggtgatgcttgcggaaggtctaagcagagtacgagcgagaaaaagagcaggaaagccacgccgaaacttggcatgaagaccataactggtg

SEQ ID NO: 98082 - DNA, 487 bp, Oryza sativa
  Clone ID: PAT_MRT4530_96021C.1
gctatctggtgccctttgcttgatgcccgactctatcattcccccccctgcagaaccgcgggaaaaaaagcccccggggggccccacacgggggggggggcaacaaacaacaggccccaaccgcaaggccgaggccggcgccaccccccgggcaaaaggcccgcacaagcggcccccccggggggaagaccgcggggtgcacccgcagggggggcactcgcacgggggggcaccggggaccccccccacaaacgggcgcgaggcgcggaaaccaacggtgcccaccacgaggaagaagccataccacacgcaggccatgtacccgaagaagaaggatgtctgcatgaaaccgggcaggcccgaccgggcatggtagtaggggaggcaggtgaagaaaatgaatataccaatggaacctccacaaaggaccgagcgccaccaccactcaggagcctcgacagccagctggaagtatggaagggccaca

SEQ ID NO: 98083 - DNA, 3906 bp, Oryza sativa
  Clone ID: PAT_MRT4530_96022C.1
atggccgacgtcacgtttggcgccgtgaaattggtgctgggcctcatccaggatgaggcccggctgctcagcggcgtccgtgaggacctgcgcttcatcatgcaagagatggagagcatgaacaacgtgctccgccacctcgtggcaaacaaggggagtgccgccgctgactaccagctccgtccgtggatgaagcagatcatggaactcgccttcgactccaaaaactgcgtcgagctctacacgcagtccggtggcgggcactgtggttggcagccctggacaatggtagctcgccaccgggtcgtcacccggatccgcgagctcaagatccaggcgcgcgaaatcagcgagcggcaggcaaggtaccacattgctggtgttgctcatgcccagcagatggacgcgaccaccacaatagagcgctgggatgctagtgtgcccaaccagagtcgcgcctgggccggcagctctaacaacccatcccggcgtgccatactccacgacggctggtttggcgactacatcagcgtggatgaggctctctcgcggctcaacccgttcacgctagaccgttatgaggtagagccaccggcgcggttggacagcgatgacgagcagcagccacggcctcagttgaacagcgacggtggcaaggagcagcccctagcgccgcagtcggatggcagaaacaaggagcagctgccgcctccccaatccggaggcggcaatggcatcaagcagcagcagccactgcctccgcagtcagatggaggcgacaaggagcagccgcctccttcgctgtcggatggtggcgacaaggaccagccgcttcctcccgactgcggcgtcaagcggcagctgccgccccagtcggacggtgatgacaagcagcagccgccgccccagtcagacggcagcgatcagccgccgccgccgcagccggatggaggcgacacggagcagcagccgcctcagtcagacggcggcgacaagaagcagaagcatattagagtcgtcacaatcagtgtgcaagacggcacggatgaagctgttgctgcagaggccgtgatcgagcgtttcaagagccgctgggcacggcggggactctggtcgcagcagctctgcctccacgtttctgtccatcggcctccgattctctcggagattacaaaggtcatggttgaaaagctgaaagagaaggaggatgatgagaagaatgaggcggaagacagggagtggcttggccataaattgaaagatgaagatgtgctgcttgttctttccggttttaattacccagcgttatggaaccagataatctactctctcgttgatatttacctcaacagagcgctcgccctgctttcccacagctacggatacgaggaaggacacttgaaagaaattctgcgcaacatcctcgccaagtgttgccttgatgtcttctgcatgaagatgctcctccatgccctctactacaatcctgacatgacgaaacaccaactgcagttcctgaatataagccttggtaaagaatttacagatcatgggagacaggaccgaataatggccttctgctaccaagcactgccaaatagttacaagaactgcttatggtattcaaccattttcgcccgtggaagcggcgtccgaagggcaagtttaataagacgatggattgcccaaggcttgatagcccaagtgaaccagtcaagtgcagaggacgaagccgggcactgtttcgaagccatgcacagccagaagcttattgtttcttctggtcttagtggtacacgcaaggtaaagagctgcaccgtgcatccagtagtttctggcttgatcagcagggagtcttcgacagttgaggacctattgctcaacaaccagctgccacttgacttggatctcctctactcaatccggcacggcatgcaactccatccggcaaactctaatatcaaaaagttcttgaactcactttccagcagttcaaggttgctgctgacagtacttgatttggaaggtcgcaagggcctcaaggcaggcgacctccataccgtatgcaagattcataaactcaagtatctaagtctccggaacacagatattgcccaactgcccaaggaaataggtcagctcaagctcttagagacacttgacatccgaggaacaagggtacaagtgttccacacggcgctaccaatgctaaagcacctgcttgctggttgcattattgactacccaaaggaagacatcatcaagtccaaggaatcattctccacggtttccatgcctcgtgctgttgcaactatggaaaagatggagatattgtcccgtgtcaaggtttcgaacagtgctaaagaactgaacaacattggtgacaagctcgagcacctaaagaagttgggtgtggttctatctggcaagaaagctagcttgatagatttgttccttcaggttgacaaactccacagatgtcttcggtccttatcaatccgaatggatccaccaggtaactgggattctattgatgttattttattgagacctccaaagcttctggagagcctacacatctgcagcatcagaagcgggttgcctcccaggatcaaggagctccatcagcttgccaagataactctacgtgacacctttttgaatcagggtgccctcgatatacttagcatgctcaaaggcctacgctatctcaggctttgctaccattcattcgcagaaggcgctctgagcttcgtgaagtttgtggaacttgtggatcttgtcattgaagatgatattgttaacagtgtcgccttgggtaataatacttatggtggagaccctgataaacttgaaaagatagtttggtccttcactcacatggaggagctttcaggggatggctgcattggccggcggcgcaagggtttgagggcggcggcgccggcgaggcggcgagctccaccggcgaagcacccccaccgtgacggcggatccgggcctccgaggattcctcatgactttgaggatacccttaccatggtggctggggatgatagttcgaaaaaggctaggattagatatatgttgcttgctacgtggaaaccaatgctgaaacctgaggaagttcctacgctggatgtgacggtggaagatttgttcattgtcgccaaggtcgctgcgcagccactgctagctcttccgaacacagccattgggtacgcggcggaggacgcaagaagtcaggagcccccgttcggtcgtggtggccacctcgagcatcacatcgctcgaacagctggcggcatcttcatcggtgaagtccagcggcgctccttggctaggtgggagcgggatcctcgggccccaacccccggcaccgcatcaaccacggacttccggcgcgccacacgactcttccgcaccgacgacaggcggggaaaaccggcgatggcgatcgggtgcagatggcaacctaccatctcaccggtgaggctcaagattatgaggaacacaagggaccccccaaattgggagacattcaaggagttgtgtcacgtccagttcggccctccaattcgaagcaatccacttggcgaggtcaaacggctgacacagacgtcgacggtggcgacataccaggccaagttcctcaccctgtctatccgagagccagctgaggacctgcaggaggccatgagcctcgcacgcgcctatgagcgcaaggcgtccaagcacggcggcagggccaaaatcggcggcgcagctccacggtggcacggccgcggcgacagcaccagcaccgtccgccgaaccgacggccgacacgggccaatgaaaattccgccacctgcctccggcggaactagcggaacaccgccgccgaggcctgtgttacaattgtga

SEQ ID NO: 98084 - DNA, 3305 bp, Oryza sativa
  Clone ID: PAT_MRT4530_96023C.1
atacgtgttaattgcttcctgctcctacctcctattgcattgcatgccatggccggatggtagcagctaccagctgccactgttgatcgatcggaagataggcggatcattgataagctagctagagctaagaagaagagatggccgacatagcgtttggcgccgtcaaattggtgctgggcctcatccaggacgaggcccggctgcttggcagcgtccgtgaggacctgcagttcatcatgcaagagatggagagcatgaacaacgtgctccgccacatcgtggcaaacaaggggagtgccgccgctgactaccagctccgtccgtggatgaagcaggtcatggagcttgccttcgattccaaaaactgcgtcgagctctacacgcagtctggtggcgggcgctgtggttggcagccctggacaatggtagctcgccaccgggtcgtcacccggatccgcgagctcaagatccaggcgcgcgaaatcagcgagcggcaggcaaggtaccacattgctggtgttgctcatgcccagcagatggacgcgaccaccacaatagagcgctgggatgctagtgtgcccaaccagagtcgcgcctgggccggcagctctaacaacccatcccggcgtgccatactccacgacggctggtttggcgactacatcagcgtggatgaggctctctcgcggctcaacccgttcacgctagaccgttatgaggtagagccaccggcgcggttggacagcgatgacgagcagcagccacggcctcagttgaacagcgacggtggcaaggagcagcccctagcgccgcagtcggatggcagaaacaaggagcagctgccgcctccccaatccggaggcggcaatggcatcaagcagcagcagccactgcctccgcagtcagatggaggcgacaaggagcagccgcctccttcgctgtcggatggtggcgacaaggaccagccgcttcctcccgactgcggcgtcaagcggcagctgccgccccagtcggacggtgatgacaagcagcagccgccgccccagtcagacggcagcgatcagccgccgccgccgcagccggatggaggcgacacggagcagcagccgcctcagtcagacggcggcgacaagaagcagaagcatattagagtcgtcacaatcagtgtgcaagacggcacggatgaagctgttgctgcagaggccgtgatcgagcgtttcaagagccgctgggcacggcggggactctggtcgcagcagctctgcctccacgtttctgtccatcggcctccgattctctcggagattacaaaggtcatggttgaaaagctgaaagagaaggaggatgatgagaagaatgaggcggaagacagggagtggcttggccataaattgaaagatgaagatgtgctgcttgttctttccggttttaattacccagcgttatggaaccaggttctggatttgctgacctcgatgagctgctctgactgtgcagtagtactctgcacaaacgatagtaagatggcaaaatattgctgcagcaatgactctgccaacgatgggcctcagataatctactctctcgttgatatttacctcaacagagcgctcgccctgctttcccacagctacggatacgaggaaggacacttgaaagaaattctgcgcaacatcctcgccaagtgttgccttgatgtcttctgcatgaagatgctcctccatgccctctactacaatcctgacatgacgaaacaccaactgcagttcctgaatataagccttggtaaagaatttacagatcatgggagacaggaccgaataatggccttctgctaccaagcactgccaaatagttacaagaactgcttatggtattcaaccattttcgcccgtggaagcggcgtccgaagggcaagtttaataagacgatggattgcccaaggcttgatagcccaagtgaaccagtcaagtgcagaggacgaagccgggcactgtttcgaagccatgcacagccagaagcttattgtttcttctggtcttagtggtacacgcaaggtaaagagctgcaccgtgcatccagtagtttctggcttgatcagcagggagtcttcgacagttgaggacctattgctcaacaaccagctgccacttgacttggatctcctctactcaatccggcacggcatgcaactccatccggcaaactctaatatcaaaaagttcttgaactcactttccagcagttcaaggttgctgctgacagtacttgatttggaaggtcgcaagggcctcaaggcaggcgacctccataccgtatgcaagattcataaactcaagtatctaagtctccggaacacagatattgcccaactgcccaaggaaataggtcagctcaagctcttagagacacttgacatccgaggaacaagggtacaagtgttccacacggcgctaccaatgctaaagcacctgcttgctggttgcattattgactacccaaaggaagacatcatcaagtccaaggaatcattctccacggtttccatgcctcgtgctgttgcaactatggaaaagatggagatattgtcccgtgtcaaggtttcgaacagtgctaaagaactgaacaacattggtgacaagctcgagcacctaaagaagttgggtgtggttctatctggcaagaaagctagcttgatagatttgttccttcaggttgacaaactccacagatgtcttcggtccttatcaatccgaatggatccaccaggtaactgggattctattgatgttattttattgagacctccaaagcttctggagagcctacacatctgcagcatcagaagcgggttgcctcccaggatcaaggagctccatcagcttgccaagataactctacgtgacacctttttgaatcagggtgccctcgatatacttagcatgctcaaaggcctacgctatctcaggctttgctaccattcattcgcagaaggcgctctgagcttcgtgaagtttgtggaacttgtggatcttgtcattgaagatgatattgttaacagtgtcgccttgggtaataatacttatggtggagaccctgataaacttgaaaagatagtttggtccttcactcacatggaggagctttcaggggtcagtacgctgcagagtctgacacacatcgaactcaatgggagaacatggcacctacagaatctggaaaaactgaaaagagaagtagatgaatgtgggattactttcacgctcaatccacctgagaatggccaaggatcaaggctgtag

SEQ ID NO: 98085 - DNA, 1525 bp, Oryza sativa
  Clone ID: PAT_MRT4530_96024C.1
ctgccgatccaattcaccgagcttcaagacacaatggcggatgcccttagtggcatttcgctgcttgcgtctaaatcggatttggccgatctcagccgttcggtcgtggtggccacctcgagcatcacatcgctcgaacagctggcggcatcttcatcggtgaagtccagcggcgctccttggctaggtgggagcgggatcctcgggccccaacccccggcaccgcatcaaccacggacttccggcgcgccacacgactcttccgcaccgacgacaggcgggggtgttcctcatttctacaaactcgaattccctaaattcgacggcaaagatgatcccctgaactggctcaaccattgtgagcagtttttttttaggacagaaaaccggcgatggcgatcgggtgcagatggcaacctaccatctcaccggtgaggctcaagattatgaggaacacaagggaccccccaaattgggagacattcaaggagttgtgtcacgtccagttcggccctccaattcgaagcaatccacttggcgaggtcaaacggctgacacagacgtcgacggtggcgacataccaggccaagttcctcaccctgtctatccgagagccagctggttcagctcttcaccacgggccttcgcgaggatctcgccatcaacgtctagctcaataaaccagaggacctgcaggaggccatgagcctcgcacgcgcctatgagcgcaaggcgtccaagcacggcggcagggccaaaatcggcggcgcagctccacggtggcacggccgcggcgacagcaccagcaccgtccgccgaaccgacggccgacacgggccaatgaaaattccgccacctgcctccggcggaactagcggaacaccgccgccgaggcctgtgttacaattgtgacgagaaattcgtgcgcggtcacaaatatgcacgcttgttctacatcgagtacgacgacttggcgtccgccgccgccgcccgccgatgacgacgcaaaacctgccgaaccccgcgtctcgctgagcgcactatccgtcgtcggcggcgacaacaccatgcggcttccagtgatgatcgacggcctgcgcgtcgtctcgctcatcgactcgggctccacacacaacttcatccacaccgagctggcgcatcatctacgactccgtctcgagccggtgcgcgacggcctccgtgtcgtggtggcgaacggcgaccgcatagtcagcccggggcgttgccacaatctgccgctgttgatcgacggtgaaatcttccgcgtcgactgcttcgccctggacttgtgcgccgtcgacatcatcctcggcacggaatggttgcagttgcagaccttggggccggtactctgggacttcaagaacacacccccattcatcggacctcgccaccaagccacctctttgcgccgaccgcacgccgccactgccccaaccaccatacaggcacacattgtgtcacgccccgaactagccccgaacggaactagcccgtgacgctc

SEQ ID NO: 98086 - DNA, 584 bp, Oryza sativa
  Clone ID: PAT_MRT4530_96025C.1
caggactactcggattggatccatatttggtttccctaattccaactggacaaagggaacacctatgggtataaaacaagggccccctaggagaagaggggagaccaccccccatgaaagccacccacaatcaacatacacgggaacaataggtcaagacagaagattcaacatacaagctaacatacgcaaagacaagacgccggatattgacttcagagataggcacggctagtcccctacggtgtcttccggatactgtcaggagagacgaaaggcgctatctctgatctcgccgagcacaaactcgaggaggaagactaccctattgtcgactatgagtcagaccttcaaaccgccatgtcgacaacagttagataggctaccccaaatattgtactgtctcgcgtatatcctagtaccaacgatccccatactatgcaaataccggaatcacgacataaaacgtcgacactaatagagttggatttgttctccatttagtacccatggcacaaaaactgggtaccgagctcgaattcgccctatagtgagtcggattacaccacgtcatcaaagccagc

SEQ ID NO: 98087 - DNA, 438 bp, Oryza sativa
  Clone ID: PAT_MRT4530_96026C.1
ggggggcattatcccaaacaggggatttttttttaaaaaggaacaaaaatttgtttttacaatatcctccatcagaaacaggggccccacccccagggtttattaaagacaaggcccgccccatgctaggacaagctaatttcagggggttttcctttaaatcttcttaaaaaaggccctccttttatggccataatttatggccattttggcatccccccataaaattatccctatttttttccccggttttgaaaggcccaaacatttatgggtttacacccccccggggtttttgatcggggggaccacggccttgacctggagggagtttttaagggtggggatgcccttttccctcccaaattccgttttgtttgtatcccccgaacgggatcgggggtttaaaaacgtttaagcatgtcccccccccgggcc

SEQ ID NO: 98088 - DNA, 360 bp, Oryza sativa
  Clone ID: PAT_MRT4530_96027C.1
atgtatacattctgcatctgaaagactgttgggagacataatacatgcatgtacagcacacactgtacataaagacacacttttttttttttgctagcatgtcacggattaaaaggctgccctacttaacttacatctcaggaaaagagaacttacttctttctagcagggcacaaatgcacacagatacacatacgcgaatacttaatatactgaattataatggtaataatattaatcaaactatcagctcatatcgaatggagtgcataaacacgctaaaatacataaagggcgcaccgtgtgtgtttgcaatgcacacaaatggcatatgttataaagaatgctctatggagattt

SEQ ID NO: 98089 - DNA, 552 bp, Oryza sativa
  Clone ID: PAT_MRT4530_96028C.1
atggatccaccggtcgcctacgccatcgcacctcttgccggcggccccacctccacgccggccgttgacgctgctgcacctccaaccggcgccgcacctctagatccggcgcgagccgcctccgtcccaccgcctcccgccaccgaggggcacgggctgcctccctcgtgccgccgctcagccggatccgctgggcccccatgcctcccctccgccggatcgcccaggaaagggaggggaggggccgcgtgccgccagatcggccggccccatgcctcccctccgccggatctgcaaggggagggaggggaggggccaccggggtcgcccgccgccgcctgctgtcaccgcccatcttcccgcccgcagtcaagggagagggagggaggggccgcgcgctgcttgctgtcgccgtcggtcggccgggagaggggaaaagaggagaggagaggagaggatgagtggagtaggagagagggagagagggaggtgggaggagaggagcaggcggagggggagatgagcgaagtgtgcgggcacgtgacggattaa

SEQ ID NO: 98090 - DNA, 1503 bp, Oryza sativa
  Clone ID: PAT_MRT4530_96029C.1
atgggcgtccacatcttcaccgaccggctggcatttgtcaccgccgactggtgttctcacctacacggttggttggtcacaccactgttcatgggcgtccacgtcttcaccgaccggcttgccttcaccgccgtcgactggtgtctccgcctacacggctggcctattatgccgccgttgttgggcgtctacgacttcaccgctggcctgcctccttcgccgccgactggtgtcctcgcctatacggttggaatggatcagtcagaacatcaccacaggcttgctttcgccgccgccgactggtgtcaccgcctgcacggctggcctattatgccgctgttgttcggtgtcaacgtcttcaccgaccggtcgtctcgtccaccgccgactggtgtcaccgcctcaacggctggcttattatgccgccgttgttgggcgtctacgtcttcaccgaccggccgcctcatccgccgccgactggtgtctccgcctaaacggctggaatattatgccgccgttgttgggcgtctacgtcttcaccgaccggccgcctcgtccgccgccgacttgtgtttccacctgcacagctggcatattatgccgccgttgttgggcgtctacgtcttcaccgaccggccgcgtcgtccgccgccgactggtgtttccgtctacacggttggcctattatgctgctgttgttgggcgtcaacgtcttcaccgaccgaccgcctcgtccaccgccgactggtgtcaccgcatgcacggctggcttattatgccgccgttgttgggcgtctacgtcttcaccgaccggccgcctcgtccgccgccgactggtgtctccgtctacacggctggcatattatgccgccgttgttgggcgtctacgtcttcactgactggccgcctcgtccgccgccgactggtgtttccgtctacacggttggcttattatgccgctgttgttgggcgtctacgtcttcaccgattggtctcctcgtccgccgccgactggtgtctccgcctatacggctggcatattatgccgccgttgttgggcgtttacgtcttcaccaaccggccgcctcgtccgccgccgactggtgtttccgcctgcacagctggcctattatgccgccgttgttgggtgtctacatcttcaccgaccagctgcctcgtccgccgccgactggtgtctccgcgtacacagctggcatattatgccgctgttgttgggcatctacgtcttcaccgaccggccgcctcgtccgccgccgattggtgtttccgcctacacggctagcatattatgccgctgttgttgggcgtctacgtcttcaccgaccggccgcctcgttcgccgccgactggtgtttccgcctgcacagctggcctattatgctgccgttgttgggcgtctacgtcttcaccgatcagccgccttgtccgcctccaactggtgtttccgtctacacggctggcttattatgccgccgttgttga

SEQ ID NO: 98091 - DNA, 2400 bp, Oryza sativa
  Clone ID: PAT_MRT4530_9602C.1
atggcttctggtcaccgagagtggataaactgtcgtccagggcggtgccgtctagcggctgcagcgcgtgggtccccaaatcgcgaaattttcttttcccccaaaaaaccgaataaagagaaatctctccgagcgaattcgacgagatcggaggctcggatcgaggtattctccttctgatttgattggattcgggatctgctggcggggatccatctttaggtaggatttcataattttatggactttgattgcaaaacagcaagaggagactcttcatctgtgaatcgttcatgcattgtcactgaaggcactgtcgtccaggcaaagcccgtttctcacaacgggaaagctaaacactggaatagcctcagtacattgaataaccagaagtgcagttatgaattactttccgacccaaagaaaaatgttgaaacaagtgatggtgagaccgcctcaaagtgtgactcatggtgcttcactgatttgccatccgcattggtctgtgaagtgcttgaacacctcgatccaaaggaacttggcattgtatcttgcgtctccaccctactgcataccctagccacagatcatcaggggtggaagaagttctactgtgaaaggtgggggattcctactcctccagtcaccctcaatgggaacttggcattgtatcttgcgtctccaccctactgcataccctagccacagatcatcaggggtggaagaagttctactgtgaaaggtgggggattcctactcctccagtcaccctcaatgggcccttggttccaggaggaacttcagattggaagtcttggaaaacattatttgtggagcgggagtttcgaagtaaatcattcatgggaagattcagtgtggatgttctccgtgaccacagtgaggatgtacgcactgtgttccttctagcatcagtaaatctgatatttactggtggtaatgactctgtgatccgaatgtgggacttggaggaagggcttttgattgataagtcccgcccactttgttgcaccatccgggccattgcagctgacactaggcttttggtcactgcaggaaccaatgcctttattcattgttggagggctgttgaaggtaattcttaccctttccacatctctgggaatggcactgaccagagtcctgagtttcgcctttgggggcatgaaggacctgtgacttgtcttgccttggattcattgaggattttcagtggtagctgggatatgactgtccgtgtttgggacagatccgaaatgaaatgtgttcagaagttcatgcatgcagattgggtttggagcgtggcacctcatggaaatactgttgccagtacagctggtagggatgcctatgtatgggatatcaggagtggtgagttggaaaatgttatttccaatgcccattatggtaatgcattttctttagctcgaacacacctagctgatgtgctgtttaccggaggagaggatggggcaattcgcctgttcaatgtttctgaggtctctgatgatgaagatattaagccagctgctacttgggttccacataccggccctgttcattccctcgcttttgagtatccatggcttgtctcagcctctagtgatggcagggttgcactgattgatttgaggaagcttctgaccccaagaaagtcatcaaaacaaccattcagggttaagaactttgatccaagttccattgaacctccacagagaatgcttcatggctttgggtgcgatcttttttctgtcgccattggtgcagacaggattgtctgtggaggcgaggatggcgctgtcaaagtctggaacttctcagaagcactggagattgagaagagggcacaagctctaagaagtatgaggcaggagaaccgcatgaggcgaaaaaaggcacaagtagagatgaatgcaaatggtagaaggtctgaccaatgtggctcaatagccatgaaaagaaaccaactgaagggtgataagagtgtcacttggcacagcaagcgtgccatcaatgataaggtcaagtcttagattaggatttgtacccttcacaactttacactctacagtagccatgagttgatagttcttttcttggaagtacctttgctgatcccaattaggcttgctgtgtaggttaacattggcattttcactattgaattttataaggttaccaatgcagtgtagccatgcatgaaatccgcatatgcaattcttattcgatatggcatatattgatctaacagaagctctcattgtcttactgttttgagctctagttgcatttgggttttgttcgtatctttctgctggtagctgttatgaatgggaatctacattgaactattccaggaaaaaaaaaaaaaaagggcggccg

SEQ ID NO: 98092 - DNA, 594 bp, Oryza sativa
  Clone ID: PAT_MRT4530_96030C.1
ccctcgaggccgggcgggaactcatcactcacgaagtaattaacattcgcattcatcatgtgcaagctagcgcgagataaagattaagggagagatacacaccatggatgtccagggttgagtggctggtggaggtgacgtcgccggccaccaatgtgaggacgacgctgcgcgactctaaggagctgttcccctagatcttccccgagcagcacaacagcatctagaccgtgcagggcgcagtgatgtctgcccccaccgtccgcctcctcgagactccgaatgtgagccaatggtgacgttcgcaactgacaagctggatgtcgtcgttaccactataacaacgtggagccgtccagcgagatgaacgacgagctggtcagtgttctaacagaacttcagggagacgctgcagacgacccccaagggttgcgataccgccccagacgacgcacgtgcgcgctgatgagctggaccatggactgctactcggcagcgcggagtagcccgacccgcacgtgatcacggagatcgccgccaagaccttctccgacctcgacgactacctcctcaagaactagccagacagccaga

SEQ ID NO: 98093 - DNA, 2299 bp, Oryza sativa
  unsure (1)..(2299): unsure at all n locations
  Clone ID: PAT_MRT4530_96031C.1
ccatcccatccatccatcaatccaccgccccgccgcgtcttctcctcgtcggcggcggcggcggcggcggcggcggaaatctcaacagtttaatgctctcgatcgcgtcggctccccgtgtacccatcaatccgtcaccgtctttttgcttggttcggtcggaaagttacgcggctttcttcttcttcttttcttcttctcccatccgtccctgtccctggggattgatacatttactccgatttggttgctggaattcgcggcgtttacacgtgaattcatccgctttcccgtgctgttttttccgtaaatgggcggcagttgccagtgagaagtaaccgcgtttccggtgttgtatttcagctctccgcctccaggttgtggtcaggcgccattgctatttcttggcttgttcgagctccgcgttttggtttataggatttcagttcattctttcataggccgccattggttggtgttttgatcgagcttgcctctgttcggatcgggagatctttggagcttcttggttgggttccaattcttggattcccaatcatccaggaggccgtataaatcgcctgctgcgattgggaggaacggaatggcggatctcgccgtgctccagtggtggctcggcgcgatggtggcaatggcggcggccgcgtcgtggtccggcggtgtcctgccggcggcggaggcgctggggatgaactggggcacgcaggcgtcgcacccgctgccgcccaagatcgtggcgcagctgctccaggacaatgggatcaagaaggtgaagctgttcgacgccgaccaggacaccctcagcgcgctcgccgggaccggcatcgaggtcatggtcgccatccccaacgtcatgctcgactccatcacggactacgacaccgccaaggagtgggtccgccgcaacgtctcccgctacaacttcgacggcggcgtcaccatcaagtacgtcgccgtcgggaacgagccgttcttggcggcatacaatggcacgttcgacaaggtgacgctgccggcgctgatgaacatccagaacgcgctgaacgacgccggcctcggcgacagcatcaaggccaccgtgccgctcaacgccgacgtatacgactcgccgcaggaccagcaggtgccgtcggcggggcggttccgcgccgacatcgccgacctgatgacgcagatggtgcagttcctggccaacaacagcgcgccgttcaccgtcaacatctaccctttcatcagcctctacctcaacgacgacttccccgtcgacttcgccttcttcgacggcggcgcgacgccggtggtggacaacggcatctcctacaccaacgtgttcgacgccaacttcgacacgctggtggcggcgctcaagggcgtcggccacggcgacatgcccatcgtcgtcggcgaggtcggctggcccaccgacggcgacaagcacgccaccgccacctacgcgcagcgcttctacaacggcctcctcaagcgcctcgccgccaacgccggcacgccggcgcggccggggcagtacatcgaggtctacctcttcggcctcctcgacgaggacgccaagagcgtggcgccgggcgacttcgagcgccattggggcatcctccggttcgacggccagcccaagtaccccgtcgacctcaccgggcagggccagaacaccatgctcgtgccggccaagggcgtgacgtacctgcccaggacgtggtgcgtcatcaacaccaacgccaaggacaccagcaagctcgccgacaacatcaacttcgcctgcaccttcgccgactgcacggcgctcggctacggctcaacctgcgccggcatggacgccaatggcaacgcctcctacgccttcaacgcctacttccaggttcagaaccagaaggacgacgcctgcgacttccaggggctcgccatgcccacgcagaccgacccctccaccccggcctgcaacttcacaatacagatcgccgccacctcggcgggtcaccggcggcgagccggcgccgccgtgctagcgctgctggctttgttccgtttgttcttgctgcattagcattgatntactgcagttatattacacaggcttttgattttgttgcagcattcttggtgttgttagtaattagtaaagcctttgtactggagatacgttttcagtatatacatactgagataattttcncaaacttgatgtgctcaaatggcgacataagattgcaaattagaagttgatttcgatggctaaaaaaaaaaaaaaaaaaaaaaaaaaaaa

SEQ ID NO: 98094 - DNA, 345 bp, Oryza sativa
  Clone ID: PAT_MRT4530_96032C.1
tttggggtttttttttttttgggttttttttttttttttttttttttttttttttttttcattttaaaccaacccccccccttgggaatgcatttcatttttccaacccaaaaaaataccggcccgaaattttaccaaaggaagacttcccccattctttttattcaacaaaaaaaaaaccagctttgaaccttttaatacacttaatactcccaaggtggggtatccccccctggtgatgctctccaaaccttttggtcccatttttgcagggaaccccttgtacagggccgggtttgatgccctggggctcccaacaaaatgggacctaggcctatctgatgc

SEQ ID NO: 98095 - DNA, 2184 bp, Oryza sativa
  Clone ID: PAT_MRT4530_96033C.1
aacagcgtcgcctcgcgtcggcgtcgcctctcaccacccaaccatcagtccaccacccacctctctccctcccctcccctccccaaacccaacccgagccgaggccggaatttcctttttggtgcgacgacgacgaggtgagggtgagccaaccgccggatcgcgccgccatgtcgctcgacgagcttccgcacaagaagctggcatcctcggagggaattcggttcgcgcggtcggattccaggttccggagccttagcccagcgcccatcccaatcccaactgccccaagcttcagatcattggtcgacccggtttctgatgagagagtaaaccatgatactgtgacctcacatgaaagtgaaattgggtctgggtccatctccacagttagctcaacagttagttcagtagaatcagagaaagcagcttatgaattccttgctcaaactcctatcaagtcaaccgatgcacaccttgttgagttttcagaagctatgagaactgttgcaaaagcattgcgacgagttgcagaagggaaagctgctgctcaagctgaggcggaagagtggaggcgtaaatatgaattagagatggcacacaaacagcagagaaaaatcaaaggctatggcagttgtgccaataatgaattagaaaagttggccagccaactaacactggagacgcctgcatctgatcaagcgggatgttgtggaaatcatggtatatgttcacatgaggttcttcaggatgaaagtcctggtcctaacccccgatctagtcacaagctggtgagtagaaaggcatcatttagactttcatggggatgcaatggggataaaaacggccagcacaagcatgattttgtatcatttgaaaagggagatataacaacagcagagcgcagcaacaagcagattttgctgaaatgggaatcctcgccacaaactgttcttttcataaccaaacctaattctaactccgtgcatgttctttgtgctgaaatggtcagatggcttaaggaacataaaaagataaatgttgttgtagagccacgtgttagcaaggaactcttaacagaagattcctactacaatttcatccaaacatgggatgatgatttttatgaaatcatccaatcacatctcaataaagatttcggtaaaaatccccttctactgcttgaatttgtgatgtttattacctctataattctgatagatgaggagaaaaagatgttgcacacaaaggttgatctcattgtaactcttggtggtgatgggactgttttatggaattggctgacagctgaaatggaagcaagtgagcaatatcgtgattgtctggacaatgtgctgaatggaccatttagcatcacattgagaaaccgtctacagtgccatgtaatccgtgatgcagcaaaggatgaacttgagactgaggagccaattttagtgttaaacgaagtcacaattgaccgtggaatatcatcttaccttacctacttggaatgctactgtgatagttctttcgttacatgtgtacaaggggatggactgatcatatcaacaacatctggaagcacggcatattcattggcagctggaggatccatggttcatccacaggtcccaggaatcctattcacgccgatctgcccgcattccctgtcattcaggcctttgatactgcctgaatatgtgaccctgcgcgtacaagtgccacataacagcaggggccaagcttgggcatcattcgatggcaaagatcggaagctgctgtcacccggggatgctctcatctgcagcatttctccatggcctgtgcccacggcttgcctggtggattcaacaaccgatttcctacgcagcatccacgagggtctccactggaacctgaggaagtcccagtcattcgacggcccgcgtgattgatcccagctcctggatacagtccagtgtcagagttgagagtttcagctggccatcagaagagtttcccacgagtccagctaacaccgagcggataaatgtacctagcagagtttgttgcttgttaccattccatatacatatacatatacatatacatatactagaaggctgctgcgtgtagatttggggtaagtactggggactgaagaatgaatcgaaatagaaagtatcgagaaaaaaaaaaaaaaaa

SEQ ID NO: 98096 - DNA, 498 bp, Oryza sativa
  Clone ID: PAT_MRT4530_96034C.1
atggaaatggacacgcatccttgcgataatccagtacccaatcgagagcacgcacgtaccgggtcgaccaatgatctgaagcttggggcagttgggattgggatgggcgctgggctaaggctccggaacctggaatccgaccgcgcgaaccgaattccctccgaggatgccagcttctggcacacagagagaaaccaaaccacccatcagcgaaccccaaaaacagatttcagaaccaccctccccgaaatgctcaattcgaagccgcagccacgcagattgccaaaacccgcggttaccttgtgcggaagctcgtcgagcgacatggcggcgcgatccggcggttggctcaccctcacctcgtcgtcgtcgcaccaaaaaggaaattccggcctcggctcgggttgggtttggggaggggaggggagggagagaggtgggtggtggactggtggttgggtggtgagaggcgacgccgacgcgaggcgacgctgttga

SEQ ID NO: 98097 - DNA, 341 bp, Oryza sativa
  Clone ID: PAT_MRT4530_96035C.1
taccacagacggaaagcggatgatggtcttgctgtgctcaggctggctgcaaatggcttcaaatgacatgtgtctatgcttgcaaaatttgagttttgtttgggttggacagaattttgccatgcctagttgaaatgtagttgcacagtgaattactggttaagtgtgcagagactgcgcatgcctgtgttgctgactggttgatgttgcatggttatccgacgccattttattgtgttcatcttttggccttgaacctaccaaaatggctgagaccgttatcatcatcagtcattataatgaacagtacaattacccatcaaaaaaaaaaaaaaaaaaaa

SEQ ID NO: 98098 - DNA, 284 bp, Oryza sativa
  Clone ID: PAT_MRT4530_96036C.1
acaccttcgcctcttacccggtcctctcccccttcgacttctcctccgctacgctcttcttgggcctcgccgcatcccgcatcgagcaaattcaaagaggcaatattaggcatcaggtcgggcatggttttgctctacccgtgcccgacccgacccattgccatccctacctccaccgacacctccttgccgaggagctccgccgccacccgctcctcccattcgacgccaccgctccgggcctcggcgacggcggcgtgcaggcgaggggagctgggacttgg

SEQ ID NO: 98099 - DNA, 312 bp, Oryza sativa
  Clone ID: PAT_MRT4530_96037C.1
ctgacaaagagaaatgtgcttcatttgaagacgttctgcgtgctgcccaagaagccattgtgctgcccccatgtgttgcactggccatcaggcggccaaggtctggtgtctgggactacatttgggtgaatgtgagtgagttggctgtggaggagctgagtgttcctgagtacttggaattcatggaacagcttgttgatggacaatgggtgcagttccttaaccgtcacttgtcgtccaagttgttccaggacaaagagagcctctaccccttgctgaacttcctggaagaccatgaccactgtgggcacg

SEQ ID NO: 98100 - DNA, 617 bp, Oryza sativa
  unsure (1)..(617): unsure at all n locations
  Clone ID: PAT_MRT4530_96038C.1
ggatattcgtgtgtttccgtttgggacatcccgatttgttggaagagagttccagacccggaagaggctgaagggaagacatgaccagctggatgccacagttcctggtnttgtttctaggagacccgttccntaagcagcagtgaagctctcccttgttgagacgagtgtctggagtgtggggctttcntgtgtggagttcccgcgggggatcgtttagangtgcagggagtttccgttgngtggagttccgtntagtnatgctgtgtgttggagggagtggctagagccatccagtntccccttcgtgttgcgtagtcagtcatgttcataagtntatatcnatatgttgtntttggntgtttcaggtgggatcctcttttaggtattaaatgtgttttcctctatatatgtttgattctctcttctgtatgccacgtatgccgtagagctgtctgtatttgttgggtttttatgtactatttactattatatatgttggagaaatgatgtgttagtggcatcactgtataattgagggtatcgcaattttgtagactcatgtaatttctgataagatttagaagacttatccatcccttaaaaaaaaaaaaaaa

SEQ ID NO: 98101 - DNA, 523 bp, Oryza sativa
  unsure (1)..(523): unsure at all n locations
  Clone ID: PAT_MRT4530_96039C.1
gcctgcagtggcggcgggtgcgggggcgggggcgagcgggggagggaggcgggtgttctccgtggagctacggcccggggagaccaccattgtgtcgtggaggaagatgctcaaggaggctgacctcggagctgccttgccgcccccgccgctggcggcggcggcacagccggcggtcgcccccctccctggaccatctggtgcgacacatcctacagaaaatgactgcgcacaatcaaatcggttcaattcagttattgagaaaattgagcgcctttacatgggcaaaaatagtagtgatgaggaagacttggatgatgcgcctgatgatgatcagtatgacacagaagattcgtttattgatgatgatgaattggatgaatattttgaagttgacaattttgcaaccaagcacaatggttattttgtgaacaaaggaaaattggaacaaattgantttgattcagnacagactgtgaaccacagcaatgaagacgaaaagactcatcaagttcttatattg

SEQ ID NO: 98102 - DNA, 260 bp, Oryza sativa
  Clone ID: PAT_MRT4530_9603C.1
cggacgcgtccgatgcacgccgtggtggatgttgtcgccagctgcactgatgagaacagacaggatcagtgaggatcatgatgcatcttggtgcaacggtggagacctcctacatctgcctgggctgcaggacacacatggttcaagttgtactggattgcccactctacattattaaaggtgatggtcaaagatcttgtttgtaattattagcagctgtgtagttgctgttgttcttttaacatggggattggaaagct

SEQ ID NO: 98103 - DNA, 381 bp, Oryza sativa
  Clone ID: PAT_MRT4530_96040C.1
atgaagcttcttgtcaacaagcgcgtccgcgtctgcgtctccctctttggcgcttcgataggacacgcagcacggcgcacccccaccctccttgtacgcgcgatcgaattcgattggcgcctctcggctttttttttcccagatagcccgcacacacacacacctggttggatggaggctggcacgacggccactcgcaccggaaaatgtatgcatatgcatgcgtgccatggcgtgccgcgtcgggtggatggcgacgtgttaccggtggacgacgacgacgactcgggtgatggatacgtagccggaaaaggatcagattatcaatcgatccaacatgctcggatcgatgcagagtaccagccggtgtacgtgctttaa

SEQ ID NO: 98104 - DNA, 2781 bp, Oryza sativa
  Clone ID: PAT_MRT4530_96041C.1
cgaggctcagcagcatcatcgccttcgccttcgcctccgcctccctcccttctccccgtctccatttcttttgtctctctctcgctcttcaaatccagctgctgccgtacgaacgcgcattgcctcagcagttcttggctcctcgcctcgcctccggttcgcccccatctcggggttggaggtgagcttggagctccctgttcttggaggagccgctggttcagctggtggtgttcttcgatggggaggggcagccatggctgctccgttcttgggtcgtcgctgctgctgctgttctgtctgggctccgccgccgcgcagaaggcctcgacttggaagacactgagcggcaatcctccagcaatcatcgccaagggcgggttttcaggcctttttcctgattccagtgattttgcttatggctttgttgcggcggccagctctccggatacagccctgtggtgtgatgttcaattaaccagggatggtgcaggcatctgccttccggacatacgaatggataattgcacaaacatagctaatgtttatccaaaggggaagaagacttacagtgtcaatggtgtatctacgcctgggtggttttccgtggactatgacagcactgggttgagtaaagtaaacttggtacaatccctattctcccgtgtgccttactatgatggaactttacccatacttcctgttgaatctgtatttgctaattataaggcccctgctgtttggctaaatgtgcagcatgacagtttctatagccagtttaatctgagtatgagaagctatatcctgtctgtttcaaaacaatatattgctgactacatctcatcacctgaagtgaacttccttaccagtttatcaggaagagttaacaagaagacaaagcttgtgtttcggcttcttaatgaactcgctgttgagccatctacaaaccagacatatggctcaatgttgaaaaatctaacattcatcaagacttttgcatctggaatacttgtccctaagaactatatctggcctgtaacacaagacaattatctgcagcccagcacatcggtcgttggtgatgctcataaagcaggactagaagtttatgccgctgattttgcaaatgactttttgctcagctacaactacagctatgatccattaacagaatatcttaacttcattgataatggtgccttctctgttgatggtgtattgactgatttccctattaccccttcagaggccattggttgctttagtaacctcaacaacagcaagacagacaatgcgaaacctctcatcatctcccacaatggtgctagtggtgactacccagattgcactgacctagcttatcaaaaggcagttactgatggtgcagatgtcatcgactgtcccgtacaagtaaccaaagatggcatacctatatgcatgagttccattgacctaatggatgtcactactgtttcaacgtcacaattttcttctcaaacgactgtcataaaagatatcaagaatggtgctggagtctattccttcaacctcacatgggatgatattgcgaagaacctgaagcccaagatatcaaacccaatgaccacatttgatgtgtacagaaatcctagaaacaagaatgcaggaagtttcatgagactatcggacttcttggcctttgcaaaaggaaaggagttgtcaggagtcatgatcagtatagagcatgctgcattcatggcagaaaaacttggatttggtgtagtagatgcggtgatcaaagcccttgatgactccggctatagcaaacagactgcccagaaagtcatgattcagtcaaccaacagctcagtactagtgaagttcaaggagcaaaccaagtacaaccttgtttacatgcttgaggaggatgtcagagatgctgcaccttcctcccttgcagatatcaagaagtttgctaatgctgtttcagtccgcacaacgtccatttacccggagagcaaacattatttgataaaccagaccagtcatatcgtccagaccctgcagtccgctggccttcccgtttatgtttacgtgctcatgaacgagtttgtttcgcaaccgaatgacttcttcgcagacgccacaacacagatcaacacatacgtgcagaagaaaggtgctggagtggatgggatcatcacagatttccctgcgacggtgcacagatacagactgagcccctgcacgagcaaggaaagcaacttgccgaccttcatgctgcctgtccagcccggtggcctcagcgggaccatcatcgatccagctgcacagccaccagcaatggcgccaatgcctctcttgacggactccgacgtcgcggaatcacccctaccgccggtcaagaacgtcacagctccagccccgggcgcttcacgagccatcaagatgcggaccgacgcctcgatcatcgtcgcgctgctggtgctatgcgcttctctgatcatatgatctaagtgtagtcttcacctctcctgtgtagcagaagcatggcggggctagagcttttgagaatttgtgttgagctacggatagttattctttttattttaccactcctacgtagccattcttttctcttctttttttttcttttgctgtattcttggggatggatgttcagcttgataccttgacgcctggcactattgtgggctgccgcccctagctactacattttggtacatatgtgtgatgcaatgaattgtttcagtttctggccgtaaaaaaaaaaaaaaaaaa

SEQ ID NO: 98105 - DNA, 671 bp, Oryza sativa
  Clone ID: PAT_MRT4530_96042C.1
cttcttctgctcctcctcctcctccttctcctccacatttctcattccttcaccgtcgctaaaccaatcaccgagctccacgctcttctctcactcaaatcctccttcaccatcgacgaacactcacctctcctgacctcatggaacctttcaacaactttctgttcatggaccggtgtcacgtgcgacgtctctctccgtttttgacctctctcgacctctcaggtcttaacctctccggaactctctcctccgacgtagctcatttacctctgctacagaatctatcactcgctgctaatcagatctcaggtcctattccgccgcaaatctccaatctctatgagcttcgtcacctcaatctctccaataatgtcttcaacggttcatttcccgatgaactctcctctggattggtgaatctccgtgttcttgacttatacaacaacaatttaaccggagatttaccggtttcactcactaatctcactcagctccgtcatcttcacctcggtgggaattacttctccggcaaatcccggcgacgtacggaacctggcctgttctcgaatacttagcggtttccggtaacgagctaaccggtgaaatccctccggagatcggaaaccctacgactcttcgtgaacttacatcgggtattacaacgcttt

SEQ ID NO: 98106 - DNA, 386 bp, Oryza sativa
  Clone ID: PAT_MRT4530_96043C.1
tcgtgataattcgaagcaaaaaaaggagaacaaaggggatggttaaaaagaataggtaaacaaaccctagccgcaccgatcgaagccagtgagacgccgccgacggctatgcgtgaggcgaacgtcggtgaccacgatcgccgccgccggcgcacccgcatccagtgaaaccctgcactgtcgtctcgttcggttgtgaggagatgagggcggcggcggcggctgcggggcaaatcgatccgtcccctggggcgccggctaaatccctgggtgaagaggctgttcgagaggcagctgctgcgggtgtcgcctgcggagaggctcccgactgtcgcggttgtcgacgagaaggatgagtccgcggactcgaacttcgtgtgcctgga

SEQ ID NO: 98107 - DNA, 318 bp, Oryza sativa
  Clone ID: PAT_MRT4530_96044C.1
tcagactgtcctcaaggggccaatgtccgacgtggtgtcgggggctactgtcggagatatgggccagtctgtgaccggcctgtcgccggtcatgtctgactggacgggcagccgcgcccccacgtcgcctctgtctctggcggagtggaggtaggtgtgtccgcggcttagcttccgggcaaaggcacagatcgtggtccggtcaaggtagagtgggtccccatcccgtagaagagtaggtagaggcggtgcatgtggtatccccgttgtaacactcaaccataacctcacacacaggagtagggtattacgctccat

SEQ ID NO: 98108 - DNA, 962 bp, Oryza sativa
  Clone ID: PAT_MRT4530_96045C.1
caaccgttaaataggggggaagagagatttccctcgcgcgcttgtcgttcgccttcttcccctttgcggatttgaatccgctcgggggcgctattacctattggcgccgcggcggcggcggcggcgatttgagtcgggatcccgctcgatggcggagggcttcgggcggtgggaggcggatccgctcttccccgccgccgagtgcgtgcaggactccgccgacaggatggagggtgtgtaccgcttgctcttgcatgaaagaaaactgatacaagatgatacctcacatacaaaacgtcgtgtatcaatgcagtatgagagagatgtgtgcactgctcttggaacaacaaagtggcagttggagcaatttgagcgagaagtgaatgcagcggcatttgtctaataaagcaaattcaagggaaaatgccatcttgcaatttaggcaatttattagagctatagcggagcaaatttctcaggtggaagatagtttggagagtcttaggaatgattccattagaacaccaaaacattcatacttgactgaacatgatggagatgaattggcatcttttctttctgtaaatggttaacggataatcaaagaacgtacatcatgtgaattcagatattcaggagaagatgtggaaggagcagccaagcctcaatgttcatgcggggaaaatgcatgtgagaggagatcataatggtagcagtatgcgtggtttggattctgatgattcaataggtaggaagcatcatttcaggagcaaactgagcaggaaataccacagttttatgcggcatttatggttgacaaatagaggacgtgagagttttacaaagaggaggaaagatggagaagttatggatagcttgagaaatggaagtacattaccttcattcaatctaactccagctggaagggctatgtatttctggcctgagcttatcaagaggag

SEQ ID NO: 98109 - DNA, 115 bp, Oryza sativa
  Clone ID: PAT_MRT4530_96046C.1
atggccggttttggaaggactaaaggaaaggaggagcgttgtctttggaccaggggacgcaccggccacaaaaatggcctcataaggagcaatgacatgtctccatctgcaaata

SEQ ID NO: 98110 - DNA, 633 bp, Oryza sativa
  Clone ID: PAT_MRT4530_96047C.1
cgggctgcaggcaatttcatcccgaagattttttcgtcaccccctccacaccagctagccgagaatccattctcaggcaggagaggcttgagacggcgtctggccgtatttatcagtttagcccctggacgactgataggcatgggcaatgcgtgaagttccgctatcgcgttcgcctatgccttgagggcatccctatgcacgggagaactgaggcgattgtggccaagttgatcggctggcagtgttctatccactttgtggaagaatactcttgccggcgaaactacaatcgcacctacgacctttgggtgtggacctctgacctgtcgttcattcacaaggcttcgtggctcatcctggcggacccagatgaagaaggtctggctattgacatccctctccctgatgttgatcccaaccgcaatcctcctcccacagatgagaaaccaggctggctctatttttgtcatcatccatgttgacattgtagaggatcaacgtaccaggcaatcctttactgttccctggcgatatggggttcaagacatcttcgaccgcccaagcgcggctcccctgtcttgccgggcagctcctgagcctactcggaacccggaagataatgaggaccat

SEQ ID NO: 98111 - DNA, 1957 bp, Oryza sativa
  Clone ID: PAT_MRT4530_96048C.1
atgagcggcgcggcgctgtgcgcggcgctgacggagctggggttcgacggggaggacccgctggacgcggacgcgctcgagtggccgttccagtacgaggaggcgcggcccctcctcgcctggatctgctcctgcctccgcccctccaacgtcctctccccctcccacctcgcgcagtatgagcaacttgtggaagagggtaggctgctagagggtgaggatttggactctgcttttgatagtatttcagccttttcaagcaagaaagataatcaagaggctgtatttggatcagaagaaacaatccttgatatccgagaagaaaaactagcatacagagctgaggtttttgaattacagaagcagcttgcgcggcaacaagcacagtttgatttgcttgcagggcaagcttctactcttatccaaggcagacgggcacgtgtaactgccatgtctgcagttagtggacaacttatatcattggatgaacaactttcttctagaaacttagagatgaatgcagttctcggaagaatcactgctactacccaggaattggcccattatcattcaggagatgatgaaagtatatacttagcatattcagacttccacccttatgttgttggagacttggcttgtacaaaggagctgaaccgctggttctcgaagcaatttgagaaggggccatttcgacttgttgctgaggaagggaagtccaaatgttcctgggttagtcttgacgacatcaccaatggcttgataagaggagattctgaaaaatcacatcatcaccagcgtgtggctgaattgcaacgacttcgttcaatatttgctacaagtgaaagacagtggattgaggcacaagttgaaaatgctaaacaacaggccatactctcgattttaaaatcacaagtgtcatctgacgaggctcatatacatagggatattcattctcttaggagaaaaggttctgagcttgctggagaactctcgactctttctcaaaaagtacaggcttttgtatctgagttcatcagtcacttggctaatcagctagccagacaccagtttctgaagattgcttgccagcttgaaaggaaaaacatagctagcgcctattcactgcttagagtaatagaatccgagttgcaaagctacctatcagctgtcaatacccgtttgggccattgtacttcattaattcaagctgcgaccgaggtgcgtgagcaaggtgcaattgatgaccgtgacactctcctccatgccgtacgggatctcttatgtgttcactcaaatgtccaagcaacaatgccaacatacatgtcagcgcatgccttggttcagcagatatcagcccttcaatctgatttgctttctcttcagtctgaacttgaaagtgctctgccagccgatcgcaaaagatgtatcaatgaacttgtttcttctgatctaagcaaacctacccacattcttggtttagtgaatagaacagtagtgtcccatgttgttaaggcggtaaggcatcctaactcctggcagtccataggcagtatgcctctgatgcgagcactcgatgatatggaaaatgccaacgcacaagttgaagtttctgtggaagaagtaacgaaggctcgcacccaaaagataaagatctttgagaatcgcgctcatgaagttgggagggagaggcaagtgttcgtcgatttcttcagcaaccccgagcgactcaagaatcaagtcagagagcttacctcccgtgtgaaagctctccaggaatagatagatagattatccgtcgtctagtttgcatttgtgtgccaggtcgtcccgcgaaatgggaagcaacagccaagcttgatttttttttttttcttttgaaaagagaagcttgatatatgctgttgttgtaaagccttccttcctcaatgcaaaattggtggaaccaatggtttat

SEQ ID NO: 98112 - DNA, 531 bp, Oryza sativa
  Clone ID: PAT_MRT4530_96049C.1
gggcaaccaaacaaacacaaacattttttttttcattcaaactaaccaaaaattttttaaaaaaagggggggttttttccccctttccttttccaacccaaatggacatcgaaatggaaaggggggaaattctattcgggggggaattttttaaaaaaaggggggcagggggcgaattaggggccaaaaaaaaagcaaaggcgggataaggaaaagggcaggcccccccccatttgggaggggaagttttggaaacggggaaccccgggggaaaaaggggggggggggataaataatttttgggggaaaaggggggcaagccccgggtcggggttaaaaaaaaaacaaattcggggggggccccaagggggagggggtttgggaggccgggccccgttttaaaaggaaaaagggggggggggaaaacaaccctagggggaaatctggccaaggaaaacggggggtgggggggaaaaaaaacgggggaggcccttggtttgcccccgggcccaattcaaaaagagggggccc

SEQ ID NO: 98113 - DNA, 326 bp, Oryza sativa
  unsure (1)..(326): unsure at all n locations
  Clone ID: PAT_MRT4530_9604C.1
actagtggatccccgggctgcaggctttgcacttcgggtgaaatgaacgagcaccaaggtggcatcaaggataccgttgtggtcggtgctgacggcgatcgacaagatcacttcgcaccagccgggagcaaccaccgtgagccanggccccagggccaggatctccgcgcgcagggcggctccggcctcaccacggctccgggcaacggcggactaggccgggtattcgccttgttagacgccgccgcaccactcgccgccggcgccgggccggtcggttctgttcatcactcgggaggttcatcgtcgtctcacggagctggcgc

SEQ ID NO: 98114 - DNA, 1395 bp, Oryza sativa
  Clone ID: PAT_MRT4530_96050C.1
atggagcgcacggacgatgcggtggaggcggccatttgggtacttcccaatccgcccgactggagcgtgttcctgttacctcccgcaggagcacgggagggaggcggctacgacaacgacagccgtgtcgagatcagcatcaccacgggcacggggggacaccaggagcgaggcgcctcctcgtctgccggcgggctcagggaaggcggcgctgcgcgcgaggtggagcgcggtggcggagatgtaggcctcacggccaccgccatctcaggacgccgccgtggagatggaagcctcgcagcaggcagcagcatcgctggaggccacggcggaggtactgcggacgacgagccccacagcgagggcaccgtcgcgggtgcagtccaaggccatctcgctggagtgggaagcctccccacacccacagacgaggcatcgcggtttgagggcaggtatgaggatgactataacccatatgtggatctctacaaatttgggcgaccggctcctgatttctggtatagcgtctggatgcgtggccccctcgttttgcatgataagaaactgttactggctagtgattctcttggtgttcatagaggtggggagattcctgatttggcagatgctataactgatgttctagataatcatcctggaccagtttcttacttcagagtagattccaccacatggactgatgacaatcaactagtcaaatggtttgaaactctatccaacaagtctgttgtagagatcacattgctaaacattggttgtccagttagcacaatacttcctatcagtgagctcttgtctcctaacctcacaactcttcgtgttggttttatgaagattctcgattctgaccttctgtcatttgagtattcgtcgttaagcgtgcttcaactcattggttgctcatatcgaggagctgatctaaattatcttgagatacgatgtgtttcatctatcaggcaactccaagtgggtgtgaactttgcagaacgaagtcacagagctagtcttcgcaatatacttgaatgttttccagaattatcaatgcttgtgatttggaggatggatggtattgtctatgataaaggatctgatgtactattcgatagctcttttgtgggtcttggtagtgtctcttgtgtcaagacacggatacagtattttgagttagaaggttttcgtggtgggccagctgagatggacattgctcgtgggatcttaagacatgcttccaggttggctaaatttgtcctctcacatcacaaaaactacagtgaggaagatctggtggagcaacttgaagagataaaaacttgcattcgtgcttcagaagattgtattattgaagtccacccactaaaagactcaccttattaa

SEQ ID NO: 98115 - DNA, 135 bp, Oryza sativa
  Clone ID: PAT_MRT4530_96051C.1
atggcgctagggcgaggcagggtggcgcggcacgatggtcggcgggggctcggtcaccgcgacgatgaacctgaggaggctcccagcggtgcccccgggaatatccccaccgtagatgcctcatcccacgggtag

SEQ ID NO: 98116 - DNA, 325 bp, Oryza sativa
  Clone ID: PAT_MRT4530_96052C.1
cccacgcgtacgcccacgcgttcggaaactactatgcagaaacaagcaaagtgggaccgggcagctaacgcatcaactggtggcagttatgtcatactaagggaatcaaagtcatgatggcagcaaggagactatgaggaattggcagctaaataaatgtagcaatatttagagttgaaacacagattggtggttcatacttcactgcattggtggcattggtatggacttgcactataatacctactatactgagattgcttgaagctgagaagcagtgctgattgcatctgtcctgaatagccgcatgcttgggaccagcgag

SEQ ID NO: 98117 - DNA, 317 bp, Oryza sativa
  Clone ID: PAT_MRT4530_96053C.1
gtttttacctgctctgccgttgctctctggactagtggacagggatttctacgaccacgtgaggttcgagacatatgaaccaagccagctaaactatattatggttgcggcaattttaagggcactgacaggggaaacacccatacgtgactgcgacacaagcccagcatagacggctgaagtagttgacaaggtgattgttgctgatttgcaactaaaacagggggtaaagatagttacagatgataagggtactagactgtcgtatgcatctgctgatgacgctgctgtcattgaagagcttattgcaaagttag

SEQ ID NO: 98118 - DNA, 307 bp, Oryza sativa
  Clone ID: PAT_MRT4530_96054C.1
ccggccgggacgcagcgatctgaagtgaaacagcaaaaaaaatcaaacaaaaagaaaaaatatgtccccatcgtgtgaaattcgtcaaaaccctagcgcggtcggcgatgtacgaacacgagggtagttctgttgacatagaccgtacgagcggagctcgcggcgagtgcgagatcagtgtatggtaactggacatcgaaggatcgtgccagtggacggaaggagaacttagcgtgacgcactgtaccgacatagaagggctgtgtgcatccagctgcaagcctgctgtactacaaggagagcacct

SEQ ID NO: 98119 - DNA, 306 bp, Oryza sativa
  Clone ID: PAT_MRT4530_96055C.1
gttttgctcgctgcaggcaacacagatcattcggctagagatggcacaacgatttgtgtggtcctcggtcatggggggatcatatatggtgataaccttgagcctgctggcgctaatccattcgcacaatacccaggctatactgttaaccgtcaacgcactcttgtgtatgctccaaaccatgtccaaggagctttacaacacacaacttctttatatgcctaacgttagcgctgtaaatgactacctcatgatcaacatcatgaactgtgactatgacattgttgtacaacacggggtgggcac

SEQ ID NO: 98120 - DNA, 383 bp, Oryza sativa
  Clone ID: PAT_MRT4530_96056C.1
ttgtttttttttttttttgggggccaaagggggccaggtaattatttttattaaatctgggggtggattccattttattaggcaagacaaattttggccccaagggttccaggtccaacccctccaaaagggatgggttcattagaagccattgggggccctttttttgggattgtgacccccacttgttcccaattaattattattgcccagacaagggttgggacctggacctggaagcaacatggttattgtttggccttccaaaaggtaaccaaattcctccaaaccaaaagcttttagtggttcctccattgcctttgaaaaatggccattggaggggcttgcccctaaaaggacctttgggctgtttgcaagtcttg

SEQ ID NO: 98121 - DNA, 273 bp, Oryza sativa
  Clone ID: PAT_MRT4530_96057C.1
atggtgatcaaagcgaggaagagggcagctgctgccgtttgtatcatcatcctgcatggtggcatccacaaccgagaagacctcgagcagcagcactgggcggccggtggtggacggcgggcctgccgggcggccggcacggcggcctggatgggaggcggtgcggcgggcggcggcttgcgtggcggcacggaggggatgcgggaggcggcagcgggcgatgcagaggggaggaggggaggcggcaacggcattttttttgttgagtatttg

SEQ ID NO: 98122 - DNA, 381 bp, Oryza sativa
  Clone ID: PAT_MRT4530_96058C.1
tttcgaccaaacctcgtcggttccgtctcgaggtcggcgccgccgactccaccgccaagaggtggggaagcaacccgtaaccgccgactagtgagatgaacaccgacatcaccgcgtctgtgaagtcccagtacccggtgccggacctgtacccgaccttgaccaaggtctgttgggagtatctccgcgctctactaccgtgcggctctccaccatctccgccgtcttcgacaccgtcttctacctctacctgatcaagacggggatccacaggccattgatggtgaccgtatgcctcatcgcggtgctgggagggttcatgtacgcgctccaggagctcgtcatgcgcctcatggtcttgttcgcaacgactcccaggtc

SEQ ID NO: 98123 - DNA, 598 bp, Oryza sativa
  Clone ID: PAT_MRT4530_96059C.1
ccccctcctcctctccctccccctcctcctcatcgcccgcgccgcctccctcgtcgccgcctccttcccgccctccgacctccagtcccacgcgctccacgtcgccgcggccctcctcctcgccgcggccgtcgcctcgctgctcgccgcgatctcccccccgaaccgcgggctcctcgccgagaccgcgctcgcctgcgccggcgccgtgggtggcctctgggtggggcagagcggcctcgtcctctacgtcgacgcctgcgtccccgccgggtgccaccgcctcatggacgccgccgtggccacgcccgccacgcggtgcgacgtcgaggaggccaggctccgcgccgtggcgctcatggacctcgcgctgtccgtgcactgcgtggtcgtcgcggcggtggccgtgggagtgcacctcggggtggcttggtggtgcggggtggacggcggcgccggggcggggatggggacagggaggaggcataatggcgtcggtgggtcgtacgatgcaatgcccacggtggcgtctgccgaggcggagatggaacatttgccgatgaagggcgtcgtcggcaagagcattgcgcaggaataa

SEQ ID NO: 98124 - DNA, 279 bp, Oryza sativa
  Clone ID: PAT_MRT4530_9605C.1
atggggagcctgcgaaggtggggaaaacactataggtgccggttttcgctggttttagctattccagcacctataatgctgacttgcatgtgtccttttagtagtatgttttatatgataatagtagaagtatatttgccggctatcaagggggaggccgggaagtttgagggtagtaactcccctcaaccttcggtcactaagccaagaggatctagcgactccgtagggagaatgaggagcttagggaacgtgacacggagcgtaggagagaaatag

SEQ ID NO: 98125 - DNA, 472 bp, Oryza sativa
  Clone ID: PAT_MRT4530_96060C.1
ttcacgcgtccgggcgttcttttaacgtaccctgtccggcctgacacgctttttggctacagtacaccgcgggtttttcctgatgggtttaataagcttaagggtgcatacggggtcaggtttaccttggtcgccacattgcaaagcgcacacacaccctttcagcagggtatatatactcttgcgtttcagcctagtgggttcattggctttaacaggtcaatcgtcccttacacaacgacaaaccttccccatgtgcgactggatatggcttccgacacgatggtacaattgcgcgtaccttatgttaacactatagactttcttgagtacactaagtctactaagtatggggatttatttgtttctttcatctgtcccacttgagccataactggctcagcattaccgaccatgaagatgttaatccaacttgaggatgtcgaactcattggtgtcggtccgcatgcag

SEQ ID NO: 98126 - DNA, 428 bp, Oryza sativa
  unsure (1)..(428): unsure at all n locations
  Clone ID: PAT_MRT4530_96061C.1
caaacttcgtttttgaaatgcttgataagccccaagcatatgagagtacgcggttcttgaagacgtanctcagaaaagggccctcgggtcctttcacaatcaccgaagtcggtgattttatctatctccactataaggaggtagaaattgtctctctatgggtgggagacaaacctcctctcgaacctaagaggaggaaatccttaaccgcacgtaagttaaggaacaaagagtggatcgagaaacatcggtcacactgtgacaatggctgtcgccattgtaagaggtttagccgtggctaaactgtcatacacacacagtgtttgtgtgtgcgatgctgaccattattggtcagtcagaaccccccaaactggaggggcgtgaaaggcgaagtcgcacttacatcacgaaaaaaaaaaaaaaaaaaa

SEQ ID NO: 98127 - DNA, 246 bp, Oryza sativa
  Clone ID: PAT_MRT4530_96062C.1
atgcgtaggcgtggagaccgagtcgcgcggggcaccaccgagcagcattccatcgggccacgtggacggccgggacatcgagcgtgcctcgcggggagggcactggacggccgggattgggcggggggcgagtcggtggtggggacggcgcgagtggcgggcgtacgtggtgggaaagtggcgggaaaggggaatcttttcagcgcggaggaaggcctgccggaaagaacgaaagaacatcaagtt

SEQ ID NO: 98128 - DNA, 424 bp, Oryza sativa
  unsure (1)..(424): unsure at all n locations
  Clone ID: PAT_MRT4530_96063C.1
agtgccttcatttttctaggatcttttattccttttgtccctaattcattcagttacatcttgagctgcaagactaggctgttcacttgttctgaatgctgaaatcgcctgacaacgacaagttgacagcatcgcgagcttatttggagtacatttgttgagtcttggactgcacgcatacacacatgttcttggatcttgaacatgaagaattgaatatcgacaacgaaagcgagcccaagaaagaaacatgaacgctgcatcccttctttatagagaagatccgggtacaaatctcttccaccttcccagtttctcttgacccttgcgcggnttgatagctagttcattgtcttccatgagaatagccttgaaacccaatggttctagaaccttctgatagtcggtgactgtattatttgat

SEQ ID NO: 98129 - DNA, 410 bp, Oryza sativa
  Clone ID: PAT_MRT4530_96064C.1
tcgtgtagattagatttagattagtcctatgtgtctcttgccgggttcttcttctcgggactcatgctcgcattgcacctctttgctccagcgaaaatgtgagattgaccagagatctgccatcgcaaggttcagtttcagcaagagctaaactcgatcggattcagaccgcgaagctaagctttgcgaacggatgatgaagccggcgacgtcggagtccgacatgacgagcctcgcgacgtcgtcgccggcacggtcgcaccaaggcggccgcggcggcgatctacgtgcagatcagcccgtcgcgcgactcccacacgacgacggcgacaagtacgccgacgacgcacgccacgccggtgtacaacaacaggccgctcgactcgccgttgcaccacttctcctacttc

SEQ ID NO: 98130 - DNA, 3474 bp, Oryza sativa
  Clone ID: PAT_MRT4530_96065C.1
ggcacgagctcagcttcactcactagtctatctaatctcccctagtgagactgagactcgcttgccatttctgttcctgtgctaaattgctaagctacgggtagtgtcttgtgcagccagccaccactccctgcatgccatggcctcacggaggccaacgcgccgccgccgcagcagcagcagcagcaacagccaaggtctactcctactcgtgctaccactgtcaccgtggcttcctcttcatctaccacggccaccgcatcatcaagccctctagctcccgagctgcgccaagcaataatggaagctccccgtcccagtgagctcgctcaaccctcacccactccgcctcaggaacaacctgtggatgccgctaccacgacgccgcaccatattccatcctcaagcaagtcaattaggtttcctttgcgcccggggaagggtaccattggcaccaggtgcatggtcaaggccaatcatttcttcgctcacctgcccaacaaggatcttcatcactacgatgtctccatcactccagaagttacatcacgcattgttaaccgagctgtgatcaaggagctggtaaatctgtacaaggcatcttatctgggtgggaggctgcctgcatatgatggtagaaagagcttatacacggctggcccattgccgtttacttcacaggagtttcagatcactttacttgacgacgatgatggttctggttctgagaggcgacagaggactttccgagtagtaatcaagttcgccgcacgggccgaccttcaccggcttgagttgtttttagctgggaggcacgcagaagctccacaggaggcactgcaagttcttgatattgtgctgcgagagctaccatcagcaagatatgcgccatttggacgttccttcttttcgccttacttgggtaggaggcaaccccttggtgagggattggaaagctggcgtggattttaccagagcattcggcctactcagatgggcttatcactgaatattgatatgtcagctacagctttcattgagccgttacctgttattgattttgttgcacaactattgaattctgacatccattcaaggccgctttctgatgccgaacgtgttaagatcaagaaagccttgagaggagtaaaggtggaagttacccaccgtggcaacatgaggcggaagtaccggatatctggtttgacaattcagccaactcgtgagctaacttttcctgttgatgaaggaggcacagtgaagtcagttgtacagtactttcaagagacatatggctttgccatccaacacacctaccttccatgccttacagttcagcgattaaattacctgcctatggaggtctgcaaaatagtggaaggacagagatactccaagagattaaatcagaatcagataagagctcttttggaggagacatgccaacacccacgtgatcgggagcgtgatattattaagatggttaaacataacgcttatcaggatgatccttacgcaaaagagtttggcattaagataagtgatcgtctggcatcagtagaggcacgaattttaccggctccacggcttaagtacaatgagactggtcgagagaaggattgcttaccaagagttggtcaatggaatatgatgaacaagaaaatggtaaatggtggtaaagtcagaagctggatgtgcgtcaattttgcccgtaatgtgcaggaaagtgttgttcgtgggttctgccatgaacttgctctgatgtgtcaagcctcaggaatggatttcgctccagaacctattcttccaccactaaatgcacatccagatcaagtggagcgtgctctaaaagctaggtatcatgatgcaatgaacgttcttggaccccagcgcagggaacttgatttgcttattggaaaactacctgataacaatggctcgctttatggtgatttgaagcgcgtgtgtgaaatagatcttggaatagtttcacaatgctgttgcacgaagcaggtgttcaaaatgaacaaacaaattcttgcaaatcttgctctgaagataaatgtcaaggttgggggcaggaacactgtgctggtggatgctgtgtcaaggcgtattcctctggtaaccgacagacctacaattatatttggtgctgatgttacccatcctcatcctggagaggacagcagtccctcaattgctgctgttgtagcctcccaagattggcctgaggtgacaaagtatgctgggttggtttctgctcaagcccaccgacaagagctgatagaagatctatataaaatctggcaggatccacagagaggaacagttagtggtggcatgatccgtgagctgcttatatccttcaaaagatcaactggtgagaagccccagcgaataatattttacagggatggcgttagtgaaggccaattttaccaagttctactttatgaattgaatgcaatccgaaaagcatgtgcctccctggagacaaattaccaaccaaaggtgactttcattgtggttcagaaacgtcaccacacaagattatttgcacataatcacaacgatcagaactcagttgacaggagcgggaacatactccctggtacggttgtagattcaaagatctgtcatccaactgagtttgacttctacctgtgtagccatgctggcattaagggtactagtcgtccagctcattatcatgtcttgtgggatgaaaacaacttcacagctgatgcattgcagattcttaccaacaacctttgctacacctatgcaaggtgcactcgctctgtatcaattgttccacctgcttattatgctcatctggctgccttccgtgctcgtttctatatggaaccagatacatctgacagcagctctgtcgttagtgggcctggtgtacgtgggccactttctggctcatcaacatcacgtactcgggcccctggtggtgcagctgttaagccacttcctgctctgaaggatagtgtgaagagggtcatgttctactgctgaagctagggcctacatagctaaagctcttcgtttcttggcaacctgcctatgatggttgtaattatgtgtcaaaaaatcccataataatctgccagctgctatcttctccattgtactatgctggtcatgtttgccaaagttaccctatatgtatgtatattatgctattgttttttttttttgcggggactattgttatcatgtattatgttttactgtcatgtctgtagttatgattcgaggagtttgcgaatgggcttgagcatttcatcttagttttttcttgctagaaattagtacttgtgtcccgtacatgtaggagtttagagtgatgagttttatatgtgctccaggcatactatttataagtagtcagtgctaccaagtatgttaatctttttattattcccacagtaatcatttattaaatcttcaaaaaacaaa

SEQ ID NO: 98131 - DNA, 2984 bp, Oryza sativa
  Clone ID: PAT_MRT4530_96066C.1
ggtatcccaaaccgttggggccggggttaccgcgccccggtggtaaagcacggttaccgcgcgccagccaccactccctgcatgccatggcctcacggaggccaacgcaccgccaccataccgaggctccagatcctggtggaagagggagagggagaggccgtgccgcccgatatgctcagcctcagcctcagcctcagcagcagcagcagcagcaaggacgaggatgccgtgctagaggtgcctcgccgccgccgccgccgcagcagcagcagcagcaacagccaaggtctactcctactcgtgctaccactgtcaccgtggcttcctcttcatctaccacggccaccgcatcatcaagccctctagctcccgagctgcgccaagcaataatggaagctccccgtcccagtgagctcgctcaaccctcacccactccgcctcaggaacaacctgtggatgccgctaccacgacgccgcaccatattccatcctcaagcaagtcaattaggtttcctttgcgcccggggaagggtaccattggcaccaggtgcatggtcaaggccaatcatttcttcgctcacctgcccaacaaggatcttcatcactacgatgtctccatcactccagaagttacatcacgcattgttaaccgagctgtgatcaaggagctggtaaatctgtacaaggcatcttatctgggtgggaggctgcctgcatatgatggtagaaagagcttatacacggctggcccattgccgtttacttcacaggagtttcagatcactttacttgacgacgatgatggttctggttctgagaggtcgcctgctcactttgcctcacctcccgcacttgtacaaaagcaacagtattatgtggccaatcttgctgacttagttgttttcttttcatttaggcgacagaggactttccgagtagtaatcaagttcgccgcacgggccgaccttcaccggcttgagttgtttttagctgggaggcacgcagaagctccacaggaggcactgcaagttcttgatattgtgctgcgagagctaccatcagcaagatatgcgccatttggacgttccttcttttcgccttacttgggtaggaggcaaccccttggtgagggattggaaagctggcgtggattttaccagagcattcggcctactcagatgggcttatcactgaatattgatatgtcagctacagctttcattgagccgttacctgttattgattttgttgcacaactattgaattctgacatccattcaaggccgctttctgatgccgaacgtgttaagatcaagaaagccttgagaggagtaaaggtggaagttacccaccgtggcaacatgaggcggaagtaccggatatctggtttgacaattcagccaactcgtgagctaacttttcctgttgatgaaggaggcacagtgaagtcagttgtacagtactttcaagagacatatggctttgccatccaacacacctaccttccatgccttacagttcagcgattaaattacctgcctatggagatggttaaacataacgcttatcaggatgatccttacgcaaaagagtttggcattaagataagtgatcgtctggcatcagtagaggcacgaattttaccggctccacggcttaagtacaatgagactggtcgagagaaggattgcttaccaagagttggtcaatggaatatgatgaacaagaaaatggatttcgctccagaacctattcttccaccactaaatgcacatccagatcaagtggagcgtgctctaaaagctaggtatcatgatgcaatgaacgttcttggaccccagcgcagggaacttgatttgcttattgggatactacctgataacaatggctcgctttatggtgatttgaagcgcgtgtgtgaaatagatcttggaatagtttcacaatgctgttgcacgaagcaggtgttcaaaatgaacaaacaaattcttgcaaatcttgctctgaagataaatgtcaaggttgggggcaggaacactgtgctggtggatgctgtgtcaaggcgtattcctctggtaaccgacagacctacaattatatttggtgctgatgttacccatcctcatcctggagaggacagcagtccctcaattgctgctgttgtagcctcccaagattggcctgaggtgacaaagtatgctgggttggtttctgctcaagcccaccgacaagagctgatagaagatctatataaaatctggcaggatccacagagaggaacagttagtggtggcatgatccgtgagctgcttatatccttcaaaagatcaactggtgagaagccccagcgaataatattttacagggatggcgttagtgaaggccaattttaccaagttctactttatgaattgaatgcaatccgaaaagcatgtgcctccctggagacaaattaccaaccaaaggtgactttcattgtggttcagaaacgtcaccacacaagattatttgcacataatcacaacgatcagaactcagttgacaggagcgggaacatactccctggtacggttgtagattcaaagatctgtcatccaactgagtttgacttctacctgtgtagccatgctggcattaagggtactagtcgtccagctcattatcatgtcttgtgggatgaaaacaacttcacagctgatgcattgcagattcttaccaacaacctttgctacacctatgcaaggtgcactcgctctgtatcaattgttccacctgcttattatgctcatctggctgccttccgtgctcgtttctatatggaaccagatacatctgacagcagctctgtcgttagtgggcctggtgtacgtgggccactttctggctcatcaacatcacgtactcgggcccctggtggtgcagctgttaagccacttcctgctctgaaggatagtgtgaagagggtcatgttctactgctga

SEQ ID NO: 98132 - DNA, 1137 bp, Oryza sativa
  Clone ID: PAT_MRT4530_96067C.1
aatgaagggctggcttttttattgcagtgaaccgttacttttcaagacatgataattgcaaactgttttgcaaactgttttctttgcttcacagggctagaataaactgtatcaccttcggaatgttcttatacccttacaactataccaaaagagagtgacaatattaacacaggctgcggagtgaatgcaattagacagaaatatgtgcgtacgattgctcgatgtctcgatgtatctgagaacgagactgtaaaagaactatatcaggtgcaagtaactcctatccacaactgttcaagttccttccactaagcccaagaatttgctagtctagttgatgtagtgatggacacctagtcagtgaacataggtcacagccagaactgcaaactaagctgccgtagctgggatgttgtagcggctgcgcagtccatcaatagctctgtctgccgacttcgccatctcagggatagtcaccttgcacacacgagatgtagaagcctgcacctccgccacaaacttcttgtacgaggccttcactgcctcagcatgctcggagatcttgtcggccatcttcctgtgctccttctccgcctcatccgccagctgcaggcagctctgagtctgcatcttgaagcgcttggagatgcgggagtgggaggcctcgaggtcgcgggcggagtcgccgtggagcgcgtcgagccggcgcttgagggagtcgaggtgggacgcggcgaggatcctcaggtccgcgacggtggagacggaggcggaagcgggggaggcgtagggggagatgggggaggaggccggggcggcgagcggtgacctcggcttgggcttcaccaccggcgaggagggcgagaggaagctgaggtcgtcggccgcgtcgccggatgccggcgaagagccgccggagaggagggaggcggggctgggcttcgtcttgggcttgggcttgggcttggccctagccgtggccctcggcttgggcttggacgccgcggcggttgctctcgccttcctcatcgctggccgccgccgccgcctgcgcgcgccctgtgcgaaagggccaaaggggtagagagaagagaagaggagagggggtggttttgggatttgcttttttctttt

SEQ ID NO: 98133 - DNA, 5484 bp, Oryza sativa
  Clone ID: PAT_MRT4530_96068C.1
atggagaaacctaagagccctctgaatcctttttcattgcatatgttcttcgcaattggatttgttccgggaaaatggggatctgttcttgtggttcaagggaaaaatcttggtcgctcgtttaaaatggccggtcacccacccaaccaccgcggagaaggcatgattgatttcgtggcagagttggcacgcatgacactggtagtgggctaccccgacgcgccggaatacacgaccatcccaccgctcagtggcgagcttccttaccgtgtccgcttggaggtccatggctacgtggggacttgcctcgctaacatggcggtcgaggcatcaggaggcacagcagatcacgcctgtcaggaggcagcctacttgatgatggccaggttacgggagcgccacgactacatcttccacgacacggcgtaccgctaccacccccgtcgagcccatggtgatggcgtcagctccttccgtccgacagctggcgagaacgacaccacctttggtcacatgtgtgctgtgatgaggggattggacaggatgcactcggacctgcacaaggcgaccaaggccttgaatgatgggaagctcatgaggatcgtcgctctgaaggacgagatagcgcgcctgaagaaggagaatgctcagttgaagggtcttccagcaccaggaggagtccggatccgcactacgccccgtaagaggacgactgcacccgtgcgcatccagcttgcgcccaggaacccacctccaccagcagctcccgcagcacctccagttccgcccgcagctccggcagttcccgcagttcctccagctccagctccagctccaactcccgcgttcactctctccttcgctccagcatcagccgccagaggttcagccagtggtaccggaggttgcttgtttgggatggtctacaccaggactggtagccgcgcaacaggcgagggcagcaacggcgaagaacgcgctgatggtgtgcaccccaacggtgattctggcaatggtccaccaccacttcccgagaatccgacgcttgcccaagttatggcacatcagactcagatgatggcagccatgatgcagcagatgcagcagcagcaccagcagatgcatcagaggatgatgcagcacgccgaacagcagcaccagcagtttggtccccctcccccccagtccaagttgcctgagtttctacgtgtcaggccacccaccttctccagcaccaccaaccctatggaggcaaatgactggctccatgcgatagagaagaagctgaatctcctgcagtgcaatgatcaggagaaggtcgctttcgccacacaccagcttcagggtcctgcgtcagcttggtgggacaaccacatggccacccgcccaccgggtactgaagtcacatgggcagagttctgccgtagcttcaggaaggcacaggtgccagacggggtcgtggcacaaaagaagagggaattccgggcgctccatcagggcaacatgactgtgacagagtacctccacgagttcaatcgcctcgcgcgatatgcaccagaggatgtccgcaccgacgccgagaagcaggagaagttcatggcgggtctggatgatgagctgaccaaccaactgatatctggggactacgccgactttgagaggctggttgacaaggcaatccgccaggaggatcagcgcaacaaaatggacaggaaaagaaaggcggcgcaattccggtccaaccaaggtagtcagcaccgaccgcgcttcactcccggacagcagggtggacctaccaccatgatcgtccgccagcaccgcccgttcaactccagcaacttccaccagggcactagtggcagtcagaaccaccagggaggccagcccaaccgcggtgcagctccacgcccaccaatggcaccggcacagtcagcccagcccgcgcaagccaagaaggagacgggagcaaaaccagggtcctgcttcaactgtggcgagcttggccacttcgctgacaaatgcccgaagcccaggcgtgccgggccaaggtttatccaggctcgtgtcaaccacgcgtctgcggaggaggcacaagcagcaccagaggtcgtactgggtacgttccctgttaactcaatccctgcaacagtactttttgattctggtgcaacgcattctttcatttcaaagaaattcgtgggaatgtatgggctaaggaaagacgagcttagcacaccaatgagggttcgtaccccgggaaatagttcaacctcagtcagttttagcccttcagtgctaatagaaatccaaagatcaccatttctagccaacctcattcttctcgaatccaaagacctagatgtcattcttgggatggattggctgaccaagtttaagggggtcatcgattgtgcgagtcgcacagtcaccttgaccaacgagaagggagaaaccgtagtgtacaaatcaccagactcaccaaagcaaggagtctccttgaatcaaattgaaacggaaatcccagtggacaccgtggggaagaacttgagaaaattggaagatatacccatagtctgcgagtatccggaagtgttccccgaagacctcactaccatgccacccaagagggagattgaattccggattgacttggcaccgggaaccgctccaatttacaagagaccatacaggatggcggccaacgaattagcagaggtcaagaagcaagttgatgaacagctgcagaaagggtacatacgaccaagcacttcaccttggggcgctccggtcatttttgtggagaaaaaggataagacgaagaggatgtgcgtcgattatcgcgcacttaacgaggtcacaatcaagaataaatatcccttaccgcgaatcgacgatttatttgatcaactgaaaggagctaaagtgttctctaagatagacctgcgatcaggctaccaccagctgagaatccgggaagaggatattccgaagacggccttcaccactcggtacgggctatatgagtgcacggttatgtctttcggacttaccaacgcacccgcattcttcatgaatctgatgaacaaagtgttcatagaatttttggacaagtttgttgtggtgttcatcgacgacattcttatctattcaaagtccgaagaggaacatgaacaacatctccgtctggtactcgagaagttgaaggagcaccagctatacgccaagttcagcaagtgtgacttctggttgacggaagtcaaatttctgggccatgtcattacagcccagggtgtggcagttgatccatcgaacgtggagtcagttacaaaatggaccccaccaaagaccgtgtcgcagattcggagttttctaggactggctagttattaccgtcgtttcatcgaaaacttctcaagaatcgcccgacccatgactcagttgcttaagaaagacgagaagtttaaatggacagctgagtgcgacaagagctttgaggagctcaaaaggaaattagtatccgcaccggttttgatcctgcccgaccagacgaaagacttccaagtctattgtgatgcatcccgtcacggacttggatgtgtcctaatgcaagagggcagagtggttgcgtatgcctcgcggcagttgcgtccacacgaaggaaattatccaactcatgacttggaattggcagcagtggttcatgctttgaagatctggaggcattatctgattggaaaccgctgcgaagtatatacggaccataagagtctgaaatacatcttcacccaaccggatctaaaccttcgacaacgaagatggttggaactaatcaaagactatgacatgagtattcactaccacccgggtaaagccaatgtggtggcagacgctttaagccggaaaagttactgcactgccctatgcatcgagggcatgtgtgaggaattgcggcaggaatttgaacatctcaacatgggaattgttgaacacgggtttgtagccgctttggaggcacggcctacgctcgtggatcaagtcagagccgctcaagtaaatgatccggaaatagcagaactgaaaaagaacatgagagtcggaaaggctcgggatttccatgaagatgagcatggcacaatctggatgggagaaagattgtgtgtacctgacgacaaagaactgaaggatctgatactcaccgaggctcatcagacccagtactccattcacccaggcagcaccaaaatgtatcaagacctcaaggaaaaattttggtgggtcagcatgaggagagaaatagctgaattcgtcgcactctgcgatgtttgccaacgagtgaaagcagagcaccaaagaccagcaggtttactccaacctcttcaaatcccggaatggaaatgggaggagattggaatggactttataacaggactgccccggacatcatcgggacatgattcaatctgggtagtcgtggatcgacttaccaaggtggctcactttataccagtacataccacctatacgggaaagagattggcagaattgtacctcgcaaggatcatgtgtttgcatggggtacccaagaagatagtatccgaccgaggtagtcagttcacctcaaagttctggcagaagctgcaggaagagatggggacccgtttaaatttcagcacggcctatcacccgcaaactgatggtcagacagagcgagtcaatcaaatcttggaagatatgttgagagcttgcgctcttgattttggtggagcttgggacaaaagcttaccatatgcggaattctcgtataacaacagctaccaggccagtctacagatggcaccgtttgaagctctatacggccggaagtgccgcacacctctcttctgggatcagacaggcgaacgtcagctgttcggaacagaagtattagcggaagcagaagagaaagtcagaatcatcagggagagattgaggattgctcagtctcgacagaagagctacgcggataaccgtcgaagggagctaacttttgaggccggagattacgtgtatcttcgtgtcaccccgctccggggagtacaccgctttcagacaaaaggcaagttggcaccacgcttcgtgggaccgtacaaaattttggaacgaaggggagaagttgcctatcagctagaacttccatccactatgatcggcatccatgacgtgttccatgtgtcccaattaaagaagtgtttaagggtacctgaagaacaggctgattcggaacacattgatatccaagaggacctaacatatgtggagaagccggttcacatacttgacactagcgaaaggagaaccagaaacaaggtcacccggttttgccgagttcagtggagtcatcattcggaagaggaagcgacctgggaaagggaagatgagttgaaagccgcccatccgtacctcttcaccagctccaccgaatctcggggccgagattccgtttaa

SEQ ID NO: 98134 - DNA, 3663 bp, Oryza sativa
  Clone ID: PAT_MRT4530_96069C.1
atggtctacaccaggaatggcacccgcaccacgggcgagggcagcaacggcgaagagcgcactgatggtgtgcatcccaatagtgattccggcaatggtccgccaccactccccgagaatccgacccttgcccaagtaatggctcatcagacgcagatgatgacagccatgatgcagcaaatgcaacagcagcaccaacagatgtaccagaggatgcagcagcaagccgagcagcaccagcagcagtttggcccccctccccctcagtccaaactgccagagtttctacgcgtcaggccacccaccttttctagcaccaccaaccctatgaaggcaaatgattggctccatgccatagagaagaagctcaatctcctgcagtgcaatgatcaggagaaggtcgccttcgccacacaccagctccaaggtcccgcgtcagcttggtgggacaatcacatgactacccgcccgccaggcactgaagtcacttgggcagagttctgccgcaacttcaggaaggcgcaggtgctagatggggtcgtggcacaaaagaagagggaattccgagcactccaccagggcaacaggacagtgacggagtatctccatgagttcgatcgcctcgcgcgatatgcaccggaggatgtccgtactgacgccaagaagcaggagaaattcctagcaggtctggatgatgagctaaccaaccagttgatatccggagattacgccgactttgagaggctggttgacaaggcaatccgtcaggaggatcagcacaacaaaatggataggaagaggaaggcggcgcagttccggtccaaccaagcaagccaccagcgaccgcgcttcattcccagacagcagggtgaacctaccaccatgatcgtccgccagcaccgccctttcaactcaagcaacttccaccagggcgctagtggcagccagaaccaccgtggaggtcagcccaaccgcagtgcaactccgcgcccaccaatggcaccagcacagtcagctccgtctgtgcaagccaagaaggagaccggagcaaagccagggtcctgcttcaactgtggtgagcttggccacttcgctgacaaatgcccgaagcctaggcgtgctgggccaaggtttgtccaggcccgtgtcaaccacgcgtctacagaggaggcacaagcagcaccagaggtcgtactgggtacgtttcctgttaattcaatccctgcaacagtactttttgattctggtgcaatgcattcgttcatttacaagaagtttgtcgggatgcatgggttaataagagaggaacttagcacaccaatgcgggttcataccccagggaatagctccacttcggtacaattcagcccttctgtaacaatagaaatccaaagatcaccatttctagccaacctcattcttctggaatccaaagacctagatgtcattcttgggatggattggctgaccaagttcaagggagtcattgattgtgcgaattgcacagtcaccttgatcaatgagaagggagaaacagtagtgtacaaatcactagtctcaccaaaacaaggggtctctttgaatcagattgaggtggagatcccagtggtcaccgaggagaagaattcgaggaaattggaagagattcccatagtctgcgagtacccagaagtgtttcccgaagacctcactaccatgccacccaagagagagattgaattccggattgatttggcaccgggaaccgctccaatttacaagagaccgtacaggatggcagccaacgaactagcagaggtcaagaagcaggttgatgagcagctgcagaaagggtacattcgaccaagtacttcaccttggggtgcaccggtcatttttgtggagaaaaaggataagacgaagaggatgtgcgtcgactatcgcgcactcaatgaggtcacaatcaagaacaaatatcctttaccgcggatcgatgatttgtttgatcaactgaagggagctaaagtgttttctaagatagacctacgatcaggctaccaccagttgagaattcgggaagaggatattccaaagacggccttcaccactcagtatgggttgtatgagtgcacggttatgtctttcggacttaccaatgcacccgcattcttcatgaacttgatgaacaaagtgttcatggaatttctggataagtttgtggtggtattcattgacgacatactcatctattccaaattggaagaagaacatgagcaacatctccgtctggtactcgagaaattgaaggagcaccagttgtatgccaagttcagcaagtgtgacttctggttgtcggaagtcaaatttctgggtcacattattacagctcaaggcgtggcagttgattcatcgaacgtggagtcagttaccaaatggaccccacctaagaccgtgtcgcagattcggagttttcttggacttgcagggtattaccgtcggttcattgaaaatttctccaggatcgcccgacccatgactcagttgcttaagaaagatgagaaatttaaatggacagccgagtgtgacaagagttttgaggagctcaagaagaaattagtatccgccccagttctgattctgcccgaccagatgaaagacttccaagtctattgcgacgcatcccgccacgggcttggatgtgttctaatgcaagagggtagagtggtcgcatacgcctcgcggcagttgcgtccacatgaagggaattatccaactcatgacctggaattggcagtagtggttcatgctttgaagatctggaggcactatctgattggcaaccgctgcgaagtatatacggaccacaagagtctgaaatacatcttcacccaaccggacctaaatctccgacaacgaagatggttggaactaatcaaagattatgacatgagcattcactaccacccgggtaaagccaatgtggtggcagatgcattaagcaggaaaagctactgcaatgccctatgcaccgaggacatgtgtgaagaattgcagcaggagcttgagcgtctcaacgtgggaattgttgaacataggttcgtagccgctctggaagcacggcctacgcttgtggatcaattcagagcagctcaagtaaatgaccccgaaatagttgaactgaaaaagaatatgagagtgggaaaagcccgggacttccttgaggatgaacatcgcacaatctggatgggagaaagattgtgtgtacctgacgacaaggaactgaaggatctgatactcaccgaggctcatcagactcagtactccattcatccaggcagcaccaaaatgtatcaagacctcaaagaaaagttttggtgggtcagcatgagaagggaaatagctgaattcgtcgcactctgcgacgtttgccaacgagtgaaggcagagcaccaaaggccagtaggtttattccaacctcttcaaatcccgaaatggaagtgggaggagattggaatggactttataacaggactgccccggacatcatcgggtcacgattcaatctgggtagtcgtggatcgactcactaaggttgctcacttcataccagtacataccacctatacggggaagaaattggcagagctgtgcctggcaaggattgagtttgatctattgagataa

SEQ ID NO: 98135 - DNA, 284 bp, Oryza sativa
  Clone ID: PAT_MRT4530_9606C.1
aaaaagggaaaaaggtttttttttaattttttttgcccttaattttaaacagtcccccatgaggatgtttgtttttttttttaacatccaaatttttttttggttccatttcagtcccagaccccaccaacaggggcattgttcttgggagcactttagtagttagggtagatcccacatatggttggcaagttgaaggtcaacaaattttgggtttgagcttgagtctgatcaaagtagaccccactaatttgttgcagttgtagttgttgcacaatcgtttg

SEQ ID NO: 98136 - DNA, 533 bp, Oryza sativa
  Clone ID: PAT_MRT4530_96070C.1
gataccacgcctatgccaagaccccttacaagttgggttgcctgccccccagttggccacaccaaattgtgggaggcctttgaattgcaccttggttccaagtaagataagggaaaaaggaaaaccccacaggttggaaaaaggaaaaaaaggaaggccccccggaagttcctgccagaagaatattccgccaaggcaccaaggggtaaagggcccttaaggaggaaaagggaaagccttttgcccccccccgtgttccttgcccttggttttcgtttaagaatccaaggaatttaatttaataattaagccctggttggcctttttttggccttggaaggttggaaaatttttggccttggtttgtcccgcctttggtttggcccttaattccgggaatgttcgggaatacttacttagccttccataccttggccaaacccgtaatctcggggtaccggaatctattactatgttcccaaacccaatccttggaggtgtttggattttctttaaaaaaaaaaaaaaaaaaa

SEQ ID NO: 98137 - DNA, 484 bp, Oryza sativa
  Clone ID: PAT_MRT4530_96071C.1
ggagcaaccacggcttgagctcagcagcctggaaggtcaccggagtagcgaaaatccagagagcagagatgagaaaaccgaagaggaggtagacgactgcccgatcgaggaggtgcggctgacggtgccgatcaccgacgacccggcattgccggcgctgacgttcaggacatggctgctggggctcatctcctgcgcgatgctggccttctccaaccagttcttcggctaccggcagaatccgctctacatctcgtcgctgtccgtgcagatcgtcgtcttgccgctgggcaagctgatggctgcttgcctccccaagaaggtgttcagggtgaagggcacggcatggtcgttctcgctcaacccggggccgttcaacctcaaggagcatgtgctcatcaccatcttcggcaacaccggatccaactccgtctacgccgtcgggattatcaccattgttaaaggccttttaccgccgggagat

SEQ ID NO: 98138 - DNA, 5392 bp, Oryza sativa
  Clone ID: PAT_MRT4530_96072C.1
atggccggtcacccacccaaccaccgcggtgaaggcatgatcgactttgtggcagagctggcacgcatgacactggtagtgggctaccccgacgcgccggagtacacgacgattccgccgctcagtggcgagcttcctcaccgtgtccgcttggaggtccatggttacgtggggacttgcctcgctaacatggcggtcgaggcgtcaggaggcacagcagatcacgcttgtcaggaggcagcctacctgatgatggccagactacgggagcgccacaactacattttccacggcacggcgtaccgctaccaccccagtcgagcccacggtgatggcgtcagctccttccgtccaacagctggcgagaacgacaccacctttggccacatgtgtgcggtgatgaggggtttggacaggatgcactcggatctgcacaaggcgaccaaggccttgaatgatgggaagctcatgaggatcgtcgctctgaaggacgagatagcgcgtctgaagaaggagaacgctcagctgaagggtctcccagcgccaggaggagtccggatccgcactacgccccgtaagaggacgactgcacctgtgcgcatccagcttgcgcccaggaacccacctccaccagcagcccccgcagcagctccagctccgcccgcagttcctgcagctccagctccagctcccgcgttcactctctccttcgctccagcatcagccgccagaggttcagccagtggtaccggaggttggctgtctgctactcccagtggcagcggcgagactgatccgtcagactccaggagtcgctcagagggaccggatggtctacaccaggactggtaaccgcacgacaggcgagggcagcaacggtgaagaacgcgttgatggtgtgcatcccaacggcgatcccggcaacggtccgccaccacctcccgagaatccgaccctggcccaagttatggcgcatcagactcagatgatggcagccatgatgcagcagatgcagcagcagcaccagcagatgcaccagaggatgatgcagtacgctgaacagcagcaccagcagtttggtccccctcccccgcaatccaagttgcctgagttcctgcgagtcaggccacccaccttctccagcaccaccaaccccatggaggcaaacgactggctccatgcaatagagaagaagctgaatctcctgcagtgcaatgatcaggagaaggtcgctttcgccacacaccagcttcagggtcctgcgtccgcttggtgggacaaccacatggccacccgcccaccgggtactgaagtcacatgggcagagttctgccgtagcttcaggaaggcacaggtgccagatggggtcgtggcacaaaagaagagggaatttcgtgcactccatcagggcaacaggacggtgacagagtacctccacgagttcaatcgcctcgcgcgatatgcaccggaggatgtccgcactgacgccgagaaacaagaaaagtttatggcaggcctggatgacgagctgaccaaccaactgatatccggggactacgctgactttgaaaggctggttgacaaggcaatccgtcaggaggatcagcgcaacaaaatggacaggaaaagaaaggcggcgcagttccggtccaaccaaggtagtcagcaccgaccgcgcttcactcctggacagcagggtggacctaccaccatgatcgtccgtcagcaccgcccgttccactctggcaacttccaccagggcgctagcggcagtcagaaccaccagggaggccagcccaaccgcggtgcagctccacgcccaccaatggcaccagcacagtcagcccagcccgcgcaagccaagaaggagacgggagcaaaaccagggtcctgcttcaactgtggcgagcttggccacttcgctgacaaatgcccgaagcccaggcgtgccggaccaaggtttatccaggctcgtgtcaaccacgcatctgcggaggaggcacaagcagcaccagaggtcgtactgggtacgtttcctgttaactcaatccctgcaacagtactttttgattctggtgcaacgcattctttcatctccaagaaatttgtcggggtgcatgggttaataagagaggaacttagcacaccgatgcgggttcataccccagggaatagctcctcttcggttcaattcagcccttctataacaatagaaattcaagggtcaccgtttctagccaacctcatccttctcgaatccaaagacctagatgtcattcttgggatggattggctgaccaagtttaagggagtcatcgattgtgcgaatcgcacagtcaccctgaccaatgagaaaggagaaaccgtggtgtacaaatctctagtctcgccaaagaaaggagcctcgttgaatcagattgagacggaaatcccagtggacaccgaagagaagaacttgagaaaattggaggacatacccatagtctgcgagtatccagaggtgttccccgaagacctcaccaccatgccacccaagagggagattgaattccggattgatttggcaccaggaaccgctccaatctataagagaccgtacagaatggcggccaacgaattagcagaggtcaagaagcaagttgacgaacagctgcagaaagggtacattcgaccaagcacttcaccttggggcgctccggtcatttttgtggagaaaaaggataagacaaagaggatgtgcgtcgattatcgcgcacttaacgaggtcacaatcaagaataaatatcctttgccgcgaatcgacgatttatttgatcaactgaaaggagctaaagtgttctctaagatagacctgcgatcaggctaccaccagttgagaatccgggaagaggatattccgaagacggccttcaccactcggtacgggctatatgagtgcacggttatgtccttcggacttactaacgcacccgcattcttcatgaatctgatgaacaaagtgttcatggaatttttggacaagtttgttgtggtattcatcgacgacattcttatctattcaaagtccgaagaggaacatgaacaacatctccgtctggtactcgagaagttgaaggagcaccagctatacgccaagttcagcaagtgtgacttctggttgacggaagtcaaatttctgggtcatgtcattacagctcagggtgtagcagttgatccatcgaacgtggagtcagttaccaagtggaccccaccgaagacagtgtcgcagattcgaagttttctaggactggctggttattaccgtcgtttcatcgaaaacttctcaagaatcgcccgacccatgactcagttgcttaagaaagacgagaagtttaaatggacagctgagtgcgacaagagctttgaggagctcaaaaggaaattagtatccgcaccggttttgatcctgcccgaccagacgaaagacttccaagtctattgcgatgcatcccgtcacggacttggatgcgtcctaatgcaagagggcagagtggttgcatacgcctcgcggcagttgcgtccacacgaaggaaactatccaactcatgacttggaattggcagcagtggtccatgccctgaagatctggaggcactatctgatcggcaaccgctgcgaagtatatacggaccataaaagtctgaaatacatcttcacccaaccggacctaaaccttcgacaacgaagatggttggaactaatcaaagactacgacatgagtatccactaccacccgggtaaagccaatgtggtggcagacgctttaagccggaaaagttactgcactgctctatgcatcgagggcatgtgtgaggaattgagacaggagcttgaacatctcaacatgggaattgttgaacacgggttcgtagccgctctggaggcacggcctacgctcgtggatcaagttagagccgctcaagtaaatgatccggaaatagcagaactgaaaaagaacatgagagtcggaaaggctcgggatttccttgaggatgagcatggcacaatctggatgggagaaagattgtgtgtaccggacgacaaggaattgaaggatctgatactcaccgaagctcatcagacccagtactccattcatccaggcagcactaaaatgtaccaagaccttaaagaaaaattttggtgggtcagcatgagaagggaaatagctgagttcgtcgcactctgcgatgtttgccaacgagtgaaagcagagcaccaaagaccagcaggtttactccaacctcttcaaatcccggaatggaaatgggaggagattggaatggactttataacgggactgccccggacatcatcgggacatgattcaatttgggtagtcgtggatcgactcaccaaggtggctcactttataccagtacataccacctatacgggaaagagattggcagaattgtacctcgcaaggatcatgtgtttgcatggggtacccaagaagatagtatccgaccgaggtagtcagttcacctcaaagttctggcagaagctgcaggaagaattggggacccgtttaaacttcagcacggcctatcacccgcaaactgatggtcagaccgagcgtgtcaatcaaatcttggaggatatgttgagagcttgcgctcttgattttggtggagcttgggacaaaagcttaccatatgcggaattctcgtacaacaacagctactaggccagtctacagatggcaccgtttgaagctctatacggccggaagtgccgcacaccgcttttctgggatcagacaggcgaacgtcaactgttcggaacagaagtattagcggaagcagaagagaaagtcagaatcatcagggaaaggttgaggattgctcagtctcgacagaagagctacgcggataaccgccgaagggagctcacttttgaggcaggagattacgtgtatcttcgtgtcaccccgctccggggagtacaccgctttcagacaaaaggcaagttggcaccacgcttcgtgggaccatacaaaattttggaacgaagaggagaagttgcctatcaactagaacttccgtccaacatgatcggcatccatgacgtgttccacgtatcccaattaaagaagtgtttaagggtacctgaagaacaggctgattcggaacacattgatatccaggaggacctaacatatgtggagaagccggttcgtatacttgacactagcgaaaggagaaccagaaataaggtcaccaggttttgccgtgttcagtggagccatcattcagaagaggaagcaacctgggaaagggaagatgagttgaaagccgcccatccgtacctcttcaccagctcctccgaatctcggggccgagattccgtt

SEQ ID NO: 98139 - DNA, 548 bp, Oryza sativa
  unsure (1)..(548): unsure at all n locations
  Clone ID: PAT_MRT4530_96073C.1
gtgttctacccattcctttcacatcgatgctgcgccgggggcccacccgcatcgagctccgctcctccgaccgcgacgagctcgaagaccacctccgcgccgccgccgccgccgccgcagcggccagcacccccaccgcctcatccactccgaccacgaccccgccgccctccaactccaaccccctcctccacctcctccacccgccgcctggcgccgcgccctccaagtcccaccgcatcggcctccctaccaatcccaatcccaaccccaaaccctagcctctcctctccccccttcgcccgccttgatggaggtcgagatcaagctccgcctccccgacgccggcgcgcaccgccgcctctcctccttcctcgcgccccgcctccgccgcaccgacgcccagcgcaacctcttcttcgacgccgncgcgcgccccctcgccggcgncaccgncgngctccgngtccgcctntacgggctcgacgaccgcgccccctcccgcgccgtcctcgcgctcaaggcgccgccgcgcatcgacgcgggcg

SEQ ID NO: 98140 - DNA, 2502 bp, Oryza sativa
  Clone ID: PAT_MRT4530_96074C.1
atggagcaaccacggcttgagctcagcagcctggaaggtcaccggagtagcgaaaatccagagagcagagatgagaaaaccgaaattcctttttatgctcaaagatatgagagtgttcgatgttcttgtggtgcagaagaggaggtagacgactgcccgatcgaggaggtgcggctgacggtgccgatcaccgacgacccggcattgccggcgctgacgttcaggacatggctgctggggctcatctcctgcgcgatgctggccttctccaaccagttcttcggctaccggcagaatccgctctacatctcgtcgctgtccgtgcagatcgtcgtcttgccgctgggcaagctgatggctgcttgcctccccaagaaggtgttcagggtgaagggcacggcatggtcgttctcgctcaacccggggccgttcaacctcaaggagcatgtgctcatcaccatcttcgccaacaccggatccaactccgtctacgccgtcggcattatcaccattgttaaggccttctaccgccgggagattcatcctcttgctgccatgctgctcacccagacaacccagctgatgggatatggttgggctggcctcttcagaaagtttcttgtggactcaccttacatgtggtggccttcaaacttggtacaggtttcactcttcagagctctgcatgagaaggagaagaggccaaagggagggacgacgaggctgcagttcttcctgaccgtgctcatcaccagcttcgcctactacattgtgccgaactacctgttcccgaccatctccaccatctcggtggtgtgcctggtgtggaagaagtcggtgacggcgcagcagatcggctccggcgtgtacggcctgggcgtcggctcgttcggcctggactgggcgacggtggccggcttcctcggcacgccgctgtcgacgccggcgttcgccatcgtcaacatcatggccggcttcttcctcatcgtctacgtgatcgtgccggcggcgtactgggccgacgcgtacggcgccaagcggttcccgatcatctcctcccacgtgttctccgccaacggcagccggtacgacgtcaaccaggtgctcgacacggcgacgttcgagttcagccaggccgggtacgacgccgcgggcaagatcaacctgagcatcttcttcgccttcacctacggcctcagcttcgccacgctcgccgcgacgctgtcgcacgtcgcgctcttccacggcgggtcgatatggcggcagaccaaggcggcggtgagcgggcagggcggcgacgtgcacaccaggctgatgaagcgcaactacgccgcggtgccgcagtggtggttccaggtgatgctcgtcgccgtgctcggcctctccgtgttcacctgcgagggcttcggccagcagctgcagctcccgtactggggcgtcctcctcgccgccggcctcgccttcttcttcaccctccccatcggcatcatcaccgccaccaccaatcagcaacctgggctgaacgtgatcaccgagctgatcatcggatacctgtacccggggaggccgctcgccaacgtcgccttcaagacgtacggctacatcagcatgtcccaggcgatcatgttcttgcaggatttcaagctgggccactacatgaagatcccaccacgctccatgttcatcgtccaggtgagcccccatcggctgaatccggacatcgattcgtcggaggagaatctcgtcgggacggtgctggcgtcgtcggtgtacttcgggacgtcgtggtggctgctggagagcgtgagcaacatctgcgacccggcgaagctgccggaggggagcccgtggacgtgccccggcgacgacgtcttcttcaacgcctccatcatctggggggtggtcggcccgctgcggatgttcggccgcctcggcctgtacgccaagatgaactacttcttcctcgccggcgcgctggcgccggtgccggtgtgggcgctgtcgcgggcgttcccgggcagggcgtggatcgggctcgtcaacatgccggtgctcctcggcgccacggggatgatgccgccggcgaggtcggtgaactacctcatgtggggcgccgtggggctcgccttcaactacgtcgtgtaccgccggtacaaggggtggtgggcgcggcacaactacgtgctgtccgccgggctggacgccggcgtggccttcatggggatcctctcgtacgccgtgctgcagtcgaggggcatcaatggcgtcaactggtgggggctgcaggtggacgaccactgcgccctggctcgttgccccacggcgcccggggtcagcgcccccggctgcccggtgcagtgagcagagcagaccattggcatcaatcagctgggaaaacttagggcagttaggattataggtctatatagctcctcaagtttataaatgatcgttgaccaaaaatggcattggaaaaaaaaaaaaaaaaaaaaaaaaaaaaaa

SEQ ID NO: 98141 - DNA, 1521 bp, Oryza sativa
  Clone ID: PAT_MRT4530_96075C.1
atgggggaaggcgcctcctcatctggagtgccacgttcctcctcacgaggcggccctccccccacgctcacccctggagggacgggttgtagggccttcgtggcgagtctgcggaacgtccggtggcccccgaagtttcgccccaaccttacggagaagtatgatggcagcatcaatccctccgagttcctccagatctacaccacgatcatcgtagcggcaaggggcgatgaccgggtcatggcgaattatttccccatggccctcaagggtcaggcgcgtggctggttgatgacccagccccccgactccatctactcctgggaggacctgtgccagcagttcatcacgaacttccagggcacatatccccgcccaggagaagaggcggacctgcacgttgtgtggcggaaggacgacgagtcccttcgctcgtacatacagcgcttctgccagggaaagaccaccggcgacaagccgagctccactgctccatccggcgagggccggtcggcagacaagtggtactcggtgcacaacacttatcggcacagtctcgctgactgccgctcggtcaagaatttggccgagcggttccggaaagccgatgaggagaagcggcagggccgacgagagggcaaagcccccacgacctcagccgatgaccagcgaggggaggccaagaagaaggcccccgccgatgatggcgatgacagtgagaagttggccctcgtggtctccccgaccattcacaacgtcaggatgaagcgcgtcctggttgacgagggagccagcctgagcatcatctccccagccgccttcgacgcgctcaaggccccggggatgaagctccagccgtcgctgccgatcatcggcgtgactccgggacacacgtggcccctcggccacgtcgagctcccgatgaagatgccgggccctagtggtcccatcaccgtctttggcgatgtcaaaatcgccctcgcctgcacggagcaaagcgccgacaacctagcggtggccacggaaccacaggcccgagaggcctccgcgtcccgcgcctccaagaagcgcctcgcctcggctgatgaggaaagcgcgctcgtctccttcctgtgggcaaattccgacgtcttcgcatggaagccgtcggacatgcccgaggtccccagggaggtgatcgagcaccgcctcgccgtgaggccggatgcgcgacccatccggcaaaaagtgcggcgtcaagccccggagcaacaggccttcatccgagaggaagtggcgcggctcctagaggccgacttcatccgcgagtatatccatccggagtggctggcgaactcggtggttgtcccgaaggccaacggcaagctctggatgtgcatcaactacacagacctcaacaaggcatgccctaaagatcccttccctttaccacacagatcagatagtcgactccactacggggtgcgaccttttgtgttttctagatgcctactctgggtatcaccagatccgcatggctag

SEQ ID NO: 98142 - DNA, 5483 bp, Oryza sativa
  Clone ID: PAT_MRT4530_96076C.1
aggggcgaccacccaaccaactaccgcggagaaggcattgacgattttgtggcagagttggctcgcatgaccctggtggtgggctaccccaatgcgtcggagtactcgactgttccgccgctcagtggcaagcttcctcaccgtgttcgtctggaggttcatggctaagtgggcacctgcctcgctaacatggtggttgtggcatctggaggcacagcagatcacgcctgtcaggaggcagcatatctgatgatggccagacttcgtgagcgcgacaactacatcttctgcaacacggcgtaccgtttccaccctcgccgagcaagtggtgacggtgtcagcaccttccgtccgacagccggtgagaacgacaccaccttcggtcacatgtgcgcaatgatgaggggaatggacaggatgcactcggatctgcacaaggcgtccaaggccttgaatgatgggaagctcgtgaggatcatagctctgaaggatgagatagcacgcctgaagaaggagaatgctcacttgaagggtctccccattcccggaggagtccggatccgcaccatgccccgcaagtcgacgactgcacccgtgcgcatttagcttgcgcccaggaacccacctccgcccgcagctctcgcagctcctccagttccgcccgcagttcccgcagctcctgcagctccacctccagtcccggctccagtcccagtgtcagctcccgcgtctgctctctccttcgctccagcatcagccgccaggggtccagccagtggcaacggaggttggttgcctgctactcccagtggcagccgcgaccacagtagcagcagttccagtggctcagagctgggcagcggcgagacgtatctgctagactccaggagccgctcagagggacctggcctcttccttcagatggccaacaccaggaatggcagccgtgcagcaggtgagggcagcaacggcgaagaacgcaccgacggtgggtatcccaacagcgcctccggcaatggtccgcccccgctccccgagaatccgactcttgccccagtaatggctcatcaaactcagatgatggcagccatgatgcagcagatgcagcagcggcaccagcagatgcaccagaggatgcagcagcaagccgagcagcagtagcaacagtttggtccccctccccctcagtccaagctactagagtttttacgcgtcaggccacccaccttttccagcaccaccaaccctatggaggcaaatgactggctccacaccatagagaagaagctcaatctcctacagtgcaatgatcaggagaaggttgccttcgccacacaccagctccaaggtcccgtgtcagcttggtgggacaatcacatggccacccgtccggcaggtacggaggtcacttgggtggagttctgtcgcagctttaggaaggcgtaggtgcccgacggggtcgtggcacagaagaagagagaattccgggcactccaccagggcaaccggacggtaactgagtacctccatgagttcaatcgcctagcgtgatatgcaccggaggatgtccgcactgacgcagagaagcaagagaagttcctagcaggcctagatgacgagctgaccaaccagttgatctctggagactacgccgactttgagaagctggttgacaaggcaattcgtcaggaggatcagcgcaacaaagtggacaggaagagaaagccagcgcagttccggtcaaaccaaggaagtcaccagcgaccgcgcttcactcccggacagcagggtggacctaccaccatgatcgtccgccagcatcgccctttcaactcgagcagcttccacccgggcgctagtggcagctagaaccaccagggaggtcagctcaactgcagtgcagctctgcgcccaccaatggcaccggcacaatcagttccatcagcccaagccaagaaggagactagagcaaagccaaggtcctgtttcaactgtggcgagcatggccactttgccaacaagtgcccgaagccaaggcgtgccgggccaaggtttgcccaagctcgtgtcaaccacgcgtccgcagaggaggcgcaagcagcaccagaggtcgtactgggtacgtttcttgtcaactcagtccctgctacagtactttttgattctggtgcaacgcattctttcatttcaaagaaatttgtggggatgcatgggttaagaaaagaagagcttagtacaccaatgagggttcataccccgggaaatagttcaacctcggtcagttatagccctttagtgctaatagaaatacacctatcacaatttctagccaacctcatccttctcgaatccaaagacctagatgtcattcttgggctggatgggctgaccaagttcaagggagtcattgattgtgcgaatcgcacagtcaccttgaccaatgagaagggagaaaccatggtgtacaagtcaccagtctcaccgaagcagagaatctccttaaatcaaattgaggtggaaaaccctgtgaccaccgaggagaagagttcgcggaaattggaggatatccccatagtctgcgagtacccagaagtgttccccgaagacctcactaccatgccacctaagagagagattgaattccggattgatttggcaccgggaaatgccccaatttacaagagaccgtacagaatggtagccaatgagctagcagaggtcaagaagcaggttgatgagcagttgcagaaagggtacattcgactaagtacttcaccttggggtgctccggtcatttttgtggataagaaggacaagacgaagagaatgtgcgtcgattatcgcgcactcaatgaggtcacaatcaagaacaaatatcctttgccgcgaattgatgatttgtttgatcaactgaatggagctaaagtgttttctaaaatagacctgcgatcaggctatcaccagttgagaattcgggaggggatattcccaagacagccttcaccactcggtatgggttgtatgagtgcacggttatgtcttttggacttaccaatgcacccgcattcttcatgaacttgatgaacaaaatgttcatggaatttctggataagtttgtggtggtattcatcgatgacattcttatctattccaaattggaagaagaacatgagcgacatctccgtctggtactcgagaagttggaggagcaccagttatatgccaagttcagtaaatgcgacttttggctatcggaggtcaaattcttgggtcacgtcattacagctcagggcgtggcagttgatccgtcgaatgtggagtcagttaccaagtggaccccacctaagaccgtgtcacaaattcggagttttcttggacttgcgggttattaccgtcggttcattgaaaatttctccaggatcgccagacctatgactcagttgcttaagaaagatgagaaatttaaatggacagctgagtgtgacaagagttttgaggagttcaataagaaattagtatccactccagttctgattttgcccgaccagacgaaagacttccaagtctattgcaacgcgtcccgtcatgggcttggatgtgttctaatgcaagagggcagagtggtcgcttatgcctcgcggcagttgcgtccgcatgaagggaactatccgacacatgacttggagttggcagcggtggtttatgctttaaaaatctggacgcgttatctgattggcaaccgctgcgaagtatatacggaccataagagtctaaaatatatcttcacccaacctgatgtaaatctccgacagcgaagatggttggagttaatcaaggattacgacatgagcattcactatcatccgggcaaagccaatgtggtggcagatgcattaagcaggaagagctattgcaataccttatgcactgaaggcatgtgtaaggaattgcagcaggagcttgaacacctcaacttggggcttgtagaatacgggtacgtggctgccctagaggcacgacctacgctcgtggatcaagtcagagcagctcaagtaaatgatcctgaaatagcggatatgaaaaagaatatgagggtcggaaaagcccgggatttccacgaagatgaacatggcacaatctggttgggagaaagattgtgcgtacctgacgacaaggaactaaaggatctgatactcaccgaggctcatcagactcagtactccattcatccaggcaacaccaaaatgtaacaagacctcaaagaaaagttttggtgagtcagcatgagaagagaaatagctgaatttgtcgcactctgcgacgtttgccaacgagtgaaggcagagcaccaaaggccagcaggttttctacaacctcttcagatcccgaaatggaaatgggaggagattggaatggacttcataacaggactgccccggacatcatctggccacgattcaatctgggtagtcgtgaatcgactcactaaagttgcccatttcattccagtgcataccacgtatacggggaagaaattggcagagctgtacttggcaaggatcatgtgtctgcatggagtacccaagaagattgtatctgatcgagggagtcagttcacctcaaaattttggcagaagctgcagaaagaattggggacccgtttgaatttcagcacaacctaccatccgcagacagatggccaaaccgaaagggtcaatcagatcttggaagatatgctacgtgcatgtgtgctcgattttggtggagcatgggataaaagtctgccttatgcggaattctcgtacaacaacagctatcaggccagtctacagatggcaccgttcgaagcgttgtatggccggaagtgccgcacacctctctactgggatcaaacaggtgaacgtcaactgttcgcaacagaagtgttaacgaaagcagaagagaaagtcagaaccgtcagagagaggctgagaattgcccagtctcgacagaagagctacgcggacaaccgccgaagggagctcacttttgaagcaggggattatatgtatctccgtgttactccgctccggggagtgcatcgtttccagacgaagggcaagttggcaccacgcttcgtgggaccatacaaaatcttggaacaaagaggagaagtcgcctatcagctagaacttccatccaacatgatcggcatccatgtcatgttccatgtatcccagttaaagaagtgcttgagggtacccgaagaacaagccgattcggagcacattgacatccaagaagatctgacctatgtggagaagccagttcgtatccttgagaccagtgaaaggaggacaagaaacaaggtcaccaggttctgcagggttcagtggagccaccacttagaagaataagcaacctgggaaagggaaaatgggttaaaggccgcccatccgcacctcttcaccagctcttccgaatctcggggtcgagattccgtt

SEQ ID NO: 98143 - DNA, 1914 bp, Oryza sativa
  Clone ID: PAT_MRT4530_96077C.1
atggcaagaaatgaatcaagaaggttcaacatcctcaacatctgtgcagatgtacgaggctggttggaagccaactggggatgcactcggatggacccaagctccacaccacagcatcggaggctcggtctgggaaagtgccagcgagagctgatggcgggcgcctcatggcatacactaggggaacatgaacacttattcccccagatcaagcgggttgatatacatgagattgggtgcttttgtgaggtaacggaggagatttttctgggtggtgttttgaatttctgcaactttatgcgccgcatattaaaatcttttgtaatggtgaaaccttcgtccctagtccaaacaaaccaatcccctacctgtccgaacaaatctaatgctaatcccatggtggaagggattgatgaggggattgggtggcgggaggagcacgttcgtccgcctatggccatgtctggactaccgtcaaacatagaggtgacagcgtcgcagctgaccgccattatggaccaacttaagcggatggaggcaacgatggctgatcacaccatcgccatcagccgcctagacaacaagatcgctgaagtcgacacgaaggggatcgtgggcaccaaaccctcggcctcaaaccagcatcagcatgacggcacaacagacagtcggcacaccgttgaggatgagaagatttggatcgcagcgttccatctcacagacgaggcacaggagtgttacacgcatgctgaagaagcctacggcacgccgttgtggagacgcttcaaggagatggtggaactgcgcttcgggccccctcttcgccacaacaagttggggaccctcgccgaactccgccgcactggttccgttgctgactaccaggagaaattcatgtcgcttctcagccgtgctggcccacttatggaggtacaaaaaatagagttattcaccgcagggctgcagggcaagcttcgcatcgacgttgagctggaggcacccgcattgctggacacagcaatgagtttggcacgtgcatatgagttgagggtgcagatagaagacccggtcccaatcgaaccggccaagccacccgcacgcgcaccagcaactcgcccagccgcgtcaccagcagcgccacacgttgccccaatagcagcagtagcatctgctccagccgctccagcagcagcagcgcgtgccgctgcgcctgtccgggctgcacgcgtagctcggcgcactttgacgccagaagagatgcaatcccagtgtgaggcgggcctttgtttcaactgcgacgaaaaattcacgccggggcatcgttgcaagcgcttgttctggctctacgctccttcggcggacgacaatgaaaccaacccaccgaatgctgaggatggggaccctggaatctccctgtatgccatggcgggcgtccgtcttcctgggagcgagacaatgcagctccacatcaccatcaacggaaagcgactggtggcgctcctggactccgggtccacgcacaacttcatcaacgccgatgtcgctaccgaccccagcatgctcctcagtccatgccatggtcttcggattatatgggacttcaccaagttgcaactgactctcacgcgcgctggctgccagatcacttggcttagcatcggcgcccccatcgacaagccgtgtgaacacgcgttcgcgtgctctggccccgacgtgctagctggtctactggaggagttcgccaccatcttcgtcgagcctcggggactgccgtcacaatgcaatcacgaccatcacatccatctcctcccagattctaggccagtggcggtccggctgtatcgatacgcgcaacatcagaaggacgagttggaacgccagtgcgccgacatgctctcccaaggcatcatttga

SEQ ID NO: 98144 - DNA, 5475 bp, Oryza sativa
  Clone ID: PAT_MRT4530_96078C.1
atggccggccacccacccaaccaccgcggagaaggcatgattgactttgtggcagagttagcacgtatgacgctggtggtgggctaccccaacgcgccagagtacacgactgttccaccgcttagtggcgagcttcctcaccgtgtccgcctggaggtccatggctatgtgggcacctgcctcgctaacatggtggttgaggcgtccggaggcacagcagatcacgcctgttaggaggcagcatacctgatgatggccagactacgggagcgccacaactacatcttccacgacacggcgtaccgatttcaccctcttcgagccagcggtgatgatgtcagtactttccgtccgacagccggcgagaacgacactacctttggtcacatgtgtgctgtgatgaggggattggataggatgcactcggacctgcacaaggcgtccaaggccttgaatgatgggaaactcatgagaatcgtcgctctgaaggacgagatagcgcgcctgaagagggagaatgctcagttaaagggtcttcccgcgccaggaggagtccggatccgcactacgccccgtaagacgacaactgcacccgtgcgcatccagcttgcgcccaggaacccacctccatcagcagctcccgcagcacctccaattccgcccgtagctccagtagttcctgtagctccagcaccagctctaactcccgttcctgtgtcagctcccacgtccgctctctccttcgctccagcatcagccgccaggggtccagccagtggcaacggaggttggttgtctgctactcccaatggcagtcgcgatcttagcagtagtagctccagtggctcagagccgggcagcggcgagacttatctgccaggctccaggagtcgctttgagggacctgatctcttcctccagatggtctacaccaggaatggtagccgcgcaacaggcgagggcagcaacggcgaagagcacactgatggtgttcatcccaacagcgattccggcaatggtccgccaccacttcccgagaatccgacgctagcccaagtgatggcacatcagactcagatgatggcagccatgatgcagcagatgcagcagcagcaccagtagatgcaccagaggatgctgcagcacgccgaacaacagcaccagcagtttggtccccctccccctcagtccaagttgccagagtttctacgtgtcaggccacccactttctccagcaccaccaaccctatggaggcgaatgattggctccatgccatagagaagaagctgaatctcctgcagtgcaatgatcaggagaaggttgctttcgccacacaccagcttcaaggtcttgcgtcagcttggtgggacaatcacatggccacccgcccgccaggcactgaagtcacttgggcagagttctgtcgtagcttcaggaaggcgcaggtgccagatggggtcgtggcacaaaagaagagagaattccgagcactccaccagggcaacaggacggtgacggagtatctccatgagttcaatcgcctcgcgcgatatgcaccggaggatgtccgtactgacgccgagaagcaggaaaaattcctagcaggtctggatgatgagctaaccaaccagttgatatctggagattacgccgatttcgaaaggctggtggacaaggcaatccgtcaggaggatcaacgcaacaagatggacaggaagaggaaggccgctcagttcagggcacatcagggaagtcaccagaggccgcgcttcgctaccgggcagcagggtggacctaccaccatgatcgtccgccagtaccgcccgttcaaccctagcaacttcccccagggcgccagtggcagtcagaaccaccatggaggtcagcccaaccgtggtgcagctccacgcccaccagtggcaccggcacagtcaggcccgtccgcgcaagccaagaaggagactggaacaaaaccagggtcctgcttcaactgtggcgagcttggccacttcgctgacaaatgcccgaagcctaggcgtgccgggttaaggtttgtccaggctcgtgtcaaccacgcatctgcggaggaggcacaagcagcaccggaggtcgtactgggtacgtttcctgttaactcaatccctgcaacagtactttttgattctggtgcaacgcattctttcatttcaaagaagtttgtcgggatgcatgggttaataagagaggaacttagcacaccaatgcgggttcataccccagggaatagctccacttcggttcaattcagcccttctataacaatagaaattcaaagatcaccatttctagctaacctcattcttctcgaattcaaagacctagatgtcattcttgggatggattggctaaccaagttcaagggagtcattgattgtgcgaatcgcacagtcaccttgaccaacgagaagggagaaacagtagtgtacaaatcaccagactcaccaaagcaaggggtctccttgaatcagattaggcggaaatccagtggtcaccgtggagaagaatttgaggaaattggaagatatccccatagtctgcgagtatccagaagtgttccccgaagacctcactaccatgccacccaagagagagattgaattccggattgacttggcaccgggaaccgctccaatttacaagagaccgtacagaatggcggccaacgaactagcagaggtcaagaagcaggttgatgagcagctgcagaaagggtacattcgaccaagtacttcaccttggggtgctccggtcatttttgtggagaaaaaggataagacgaagaggatgtgcgttgattatcgcgcactcaacgaggtcacaatcaagaataaatatcctttgccgcgaatcgatgatttgtttgatcaactgaaaggagctaaagtgttttctaagatagacctacgatcacgctaccaccagttgagaattcgggaagaggatattccaaagacggccttcaccactcggtacgggctgtatgagtgcacggttatgtccttcggacttaccaacgcacccacattcttcatgaatctgatgaacaaagtgttcatggaatttctggacaagtttgttgtcgttttcatcgacgacttacttatctattcaaagtctgaagaagaacacgagcagcatctccgtctggtactcgagaagttgaaggagcaccagctatacgccaagttcagcaagtgtgacttctggttgacggaagtcaaatttctgggccatgtcattacagctcagggtgtggcagttgatccatcgaacgtggagtcagttaccaaatggaccccacctaagaccgtgtcgcagatttagagttttcttggacttgcgggttattacagccgattcattgaaaacttctccaggatcgcccgacccatgaagatgagaaagatgagaagtttaaatggacagctgagtgcgataagagttttgaggagctcaagaagaaattagtatccgcaccagttttgattctgcccgaccagatgaaagacttccaagtctattgcgatgcatcccgtcacggacttggatgtgtcctaatgcaagagggcagagtggtcgcgtatgcctcgcggcatttgagtccacacgaagggaattatccaactcatgacctggaattggcagcagtggttcatgctttgaagatctggaggcactatctgattggcaaccgctgcgaagtatatacggaccataagagtctgaaatacatcttcacccaaccggacctaaatctccgacaacgaagatggttggaactaatcaaagactatgacatgagcattcactaccacccgggtaaagtcaatgtggtggcagacgcattaagcaggaaaagttactgcactaccctatgcatcgagggcatgtgtgaggaattgcggcaggagtttgagcatctcaacgtgggaattgttgaacacgggttcatagccgctctggaggcacggcctacgctcgtggatcaagtcagagcaggtcaagtgaatgatcctgaaatagcagagctgaaaaagaacatgagagtcgaaaaggctcgggatttccttgaggatgaacacggcacaatctggttgggagaaagattgtgtgtacttgacgacaaggaattgaaggatctgatactcaccgaggctcatcagacccagtactccattcatccaggcagcaccaaaatgtatcaagacctcaaagaaaagttttggtgggtcagcatgaggagagaaatagctgaattcgtcgcactctgcgatgtttgtcaacgagtgaaggcagagcaccaaagaccagcaggtttactccaacctcttcaaatcctggaatggaaatgggaggagattggaatggactttataacaggacttccccggacatcatcgggtcacgattcaatctaggtagtcgtggatcgactcactaaggttgctcacttcataccagtacataccacgtatacgggcaaaaggttggcggagctctacctctcgagaatcatatgtctacatggagtacccaaaaagattgtatctgatcgagggagtcagttcacctcaaaattctggcagaagctgcaggaagaattggggacccgtttaaatttcagcacggcctatcacccgcaaactaatggtcagaccgagcgagtcaatcaaatcttggaagatatgttgagagcttgcgctcttgattttggtggagcttgggataaaagcttgccatatgcggaattctcgtacaacaacagctaccaggccagtctacagatggtaccgtttgaagctttatacggccggaagtgccgcacacctctcttctgggatcaggcaggcgagcgtcaactgttcgggatagaggtattagcggaagcagaagagaaagtcagaaccatcagggaaaggttgaggattgcccagtctcgacagaagagctacgcggataaccgccgaagggagctcacttttgaagcaggggattacgtgtatcttcttgtcactccgctccggggagtacaccgttttcagacgaaaggtaagttggcaccacgcttcgtgggaccatacaaaatcttggaacgaaggggggaagttgcttatcagctagaacttccatccaatatgatcggcatccatgacgtgttccacgtgtcccaattaaagaagtgcttaagagtacccgaagaacaaactgattcggagcatattgatatccaggaggacctgacatatgtggagaagccggttcgtatacttgataccagcgaaagaagaaccagaaacaaggtcaccaggttttgccgagttcagtggagtcaccatccagaggaggaagcaacctgggaaagggaagatgagttgaaagccgcccatccgcacctcttcgctagctcctccgaatctcggggccgagattccgtt

SEQ ID NO: 98145 - DNA, 436 bp, Oryza sativa
  Clone ID: PAT_MRT4530_96079C.1
ccatcgaggggctattttaagggccctgtggaatcacataaacgaaaaaaaacgaagaaagaaaaaaaacacatgattctcttaagagattaagtgcaaaacagagaattacaaaacacaaaaaaaacacacacgaataaccgtttgattgaactgcatgaaaacgcaagaatcgcataaaagagatagactcaaaaaagaaaattttcaagaggttaaagctcttataaattttctccaaaacctttataagattgtctatttcataggaatcctaaacgattgaagaggattcaatcctttggtataaagacttccataggaaatatttctgtgcagattgaaatcccacaaaatatttttttccaacaaatcggggcctttattaagctatgaattgctagatatggtaaaaactaagaactgggttcaaacg

SEQ ID NO: 98146 - DNA, 472 bp, Oryza sativa
  Clone ID: PAT_MRT4530_9607C.1
ccccaaaaaaaaccccctgggtttttttccaaacagccttttaacccgggggggaggggcccttcctccgtttcgcaaaatctctcccccaaaaaaaccacaacttttggcccccatgggggacaggactgggcactcagcaccatttttgccatttgcccccaacgttttataaaaaaacggggggccgggacccactaccccaagaaactgggggtttgggatcgcgcccactttccagccagtattccctttgggccctttttttttcaccccccacaaaaaaaaaaggttcggcggtttttgttttgtataaaaaaaaaatcttcttcggtggcccccaaaaaggggggaggtatccaaattcccaaaccctgtgtttgtccaggcgcccccaaactttttgacggttctttttttacccccccccccttctacgggcccaaacgcgtttttttttcaaccccccccc

SEQ ID NO: 98147 - DNA, 4393 bp, Oryza sativa
  Clone ID: PAT_MRT4530_96080C.1
ggccatgatgcagcagatgctgcagcagcaccagcagatgcaccagaggatgtagcagcaagtcgaacagtagcagcagcagtttggtccccctccccctcagtccaagctgccgaagtttctacgcgtcagtccacccaccttctctagcaccaccaaccccatggaggcgaatgattggtccatgccatagagaagaagctcaatcttctgcagtgcaatgatcagaagaaggtcacctacgccacacaccagctccagggtccctcgtcagcttggtgggacaatcacatggctacccgtccgccaggtacggaggtcacttgggcggagttctgtcgcagcttcaggaaggcacaggtgccagacggggtcgtggcacaaaagaagagagaattctaggcactccaccagggcaacagggcagtaactgagtacctccatgagttcaatcgccaagcgcgatatgcaccggaggatgtccgcactgacgcggagaagcaggagaagttcctagcaggcctggatgacgagctgaccaaccagttgatctctagggattacgctgacttcgagaagctggtagacaaggcaatccgccaggaggatcagcgcaacaaaatggacaggaagagaaaggcagcgcagttccggtccaaccaaggaagtcaccagcgaccgcgcttcactcccggacagcagggtggacctaccaccatgattgtccaccagtatcgcccgttcaactcaagtagcttccaccaggtcgccagtggcagccagaaccacccgggaggtcagcccaaccgcagtgcagctccgcgcccaccaatggccacagcacaggcagctccatcagtccaagccaagaaggagactggagtaaagccagggtcctgcttcaactgtggcgagcatggccactttgctgacaagtgcccgaagctaaggcgtgctgggccaaggtttgcccaagctcgtgtcaaccacgcgtccgcggaagaggcgcaagcagcactagaggtcgtactgggtacgtttcctgtcaactcaatttatgcaacagtacttttcgattctggtgcaacgcattcattcatttcaaagaagtttattggggaacatgggctaataagagaagagcttagtacaccaatacgggttcatacccccgggaatagttccacctcggtttaattcagcccttctgtaacaatagaaatccaaatatcaccatttctagccaacctcgtccttctcgaatccaaagacctagatgtcattcttgggatggattggctgaccaagttcaagggtatcattgattgtgcgaatcgcacggtcaccttgaccaatgagagaggggaaacagtggtgtacaagtcaccagtcgcactgaagcagggaatctccttaaatcagattgaggtggagaattcggtggtcaccgcggagaaaagttcgaggaaattggaagatatccccatagtctgcgagtattcagaggtgttccctgaggacctcactaccatgccacccaagagagagattgaattccggattgatttggcaccggggactgctccaatttacaagagaccgtacagaatggcagccaatgagctggcagaggtcaagaagcaggttgatgagcaactgcagaaagggtacattcgaccaagtacttcaccttggggtgctccggtcatttttgtggagaagaaggacaagacgaagagaatgtgcgtcgattatcgcgcactcaatgaggtcacaatcaagaacaaataccctttgccacggattgatgatctgtttgatcagctgaaaggagccaaggtgttttccaaaatagacctacgatcaggttaccaccagttgaggattcgggaagaggatattcccaagacagctttcaccactcggtatgggttgtatgagtgcacggttatgtcttttggacttaccaatgcacctgcattcttcatgaatctgatgagcaaagtgtttatggagtttcttgacaagtttgtcatggtgttcattgacgacatacttatctattcaaagtccgaagaagaacatgagcaacatctccgtctggtactcgagaagttgaaggagcaccagttatatgccaagttcagtaagtgtgacttctggttgtcggaagtcaaatttctgggtcacgtcattactgctcaaggtgtggcagtggatccatcgaatgtggagtcagttaccaagtggaccccacctaagacagtgtcacagattcggagtttccttggacgtgcgggttattaccgtcggttcattgaaaatttttccaggattgccagacctatgactcagttgcttaagaaagacgagaaattcaagtggacagccgagtgtgacaagggttttgaggagctcaagaagaaattagtgtctgctctagttctgaatttgcccgaccagacgaaagacttccaagtctattgcgacgcgtctcgtcatgggcttggatgcattctaatgagggcagagtggtcgcttatgcctcacggcagttgcgtctgcatgaaggaaactatccaacacatgacctggaattggcagcggtggttcacgccttaaaaatctggaggcattacctgattggcgatcgctgtgaagtatatacggaacacaagagtttgaaatatatcttcacccaacctgacctgaatctccgacagcgaagatggttggagttaatcaaagattatgacatgagcattcactaccatccgggcaaagccaatgtggtggcagatgcattgagcaggaagagctactgcaatgctttgtgcactgagggcatgtgtaaggaattgcagcaggagcttaaacatctcaacttgggaatcgtagaacacgggtttgtggctgctctagaggcacggcctacgctcgtggatcaagtcagagcagctcatgtaaatatcctgagatagctgaactgaaaaagaatatgagggtcggaaaagcccgggatttccacgaagatgaacatggcacaatctggttgggagaaagattgtgcgtacctgatgacaaagagctgaaagatctgatactcaccgaggctcaccagactcagtactccattcatccaggtagtaccaagatgtaccaagatctcaaagagaaattttggtgggccagtatgagaagagaaatcgctgaattcgtcgcactctgcgatgtttgtcagcgagtcaaagcagaacataagaggcccgcaggactgcttcaacctcttcagatcccggaatggaaatgggaagagattgggatggatttcatcacaggtttgcccaggacatcatctagccacgattcaatttgggtagtcatggatcgactcaccaaagttgctcatttcataccagtgcacgctacttatacaggcaaaaggttggtagagctctatctctcaagaatcatgtgtttggatggagtacccaaaaagatagtatctgatcgagggaggtagttcacctcaaaattttggcagaagttgcaagaagaattgggtacccgtttgaatttcagcacagcttaccatccgttgacagatggccagaccgagagcgtcaatcagattttggaggatatgttgcgagcctgtgcgcttgattttggaggagcttgggataaaagtctgccttatgcggagttctcctacaacaacaattaccaggctagtctgcaaatggcaccgttcgaagcgttgtatggccggaagtgccgcacacctctcttctgggatcaaacaggcaaacgtcaactgtttggaacagaagtgctaacggaagcagaggagaaagtcagaaccatcagagagaggctgagaattgcacaatctcgacagaagagctacgcagacaaccgccgaagggagctcacttttgaagcaggggattatgtgtaccttcgtgttactccgctccggggagtacaccgtttctagatgaaaggcaagttggcaccacgcttcgtgggaccatacaaaatttttgaacgaagaggagaagttgcctatcagctagaacttccatccaacatggtcggtatccatgacgtattccacgtgtcccagttaaagaagtgtttgacggtacccgaagaacaagccgattcggaacacattgacattcaagaagatctgacatatgtggagaagccagttcacatccttgagaccagtgaaaggaggactaggaacaaggtcaccaggttctgcagggttcagtggagccaccactcagaagaagaagcaacctgggaaaaggaagatgagttgaaggccgcccatccgcacctcttcaccagctcttccgaatctcggggtcgagattccgtt

SEQ ID NO: 98148 - DNA, 1190 bp, Oryza sativa
  Clone ID: PAT_MRT4530_96081C.1
tttttttttttttttttttttttgttcttgcaagaacttcagatattctctgttgttttcctagcagtaacagagttttacaggtacagtttttacgatatacagttttattattatacatggttaattcactaggttgtgcagcaaaagctgccaaattaattaaccgcaaaagaaagcagcaaaaggttaacgaccttcaaaaatggaaaagaacaaggcaagaaagcaacaagcaaaatcacacatatgtacatgcatgcacatatataggtaattttatggatcgagattaatttggtgctagagaatgcagcaggcgttgctgtcgctctcgtggtggcggcgggagcgggacaccgccttgaaggtcttgccgccggcggctgcggcggcggcgcggccggtgccggcgccggtggtggtggtggtggtggtggtcttcttcttggtggtggtggagtggttcatggggtggtagtcgtgcttctccaccagcggcgagtagatggccgggtggctgagcgccaccgcgcgggagtagctgctgccgccgtagccgtagccgccgccgccggcggccatcgccatcggcgacgggtggtactggtacgggtacgcgtacgggctgggcgccatggcgtacggcggctgccactgctgctgctggtggtacgggccgtacggcgacggctggtagtggtacggcgacgcccgcgtcgtcgccatcgccctggcggcggcggcgtccttgctccccggcgccggcggcggcatgatcatcccgcccgggaacatcgccgccgccgcctcgaacgtgtcgacggtcctcagctcgacgatctcaccggagcccaccttcctcttgagcttcttggtcagcttgttcgtgtccacgccctcgccgatcaccagcagcaggttccggtcgccgccggccagcgtcaccgactgcaccccgctgacagtagcagcctctttcatggccttcttctggcatttgtcggttttcacggaaatcgccgccgtcgcccctccgcgccactgtccctccgcgccgcccctccacagcgccgcccctccacggcgctgccctctgctttgccgacgccgtccctctgccatgattagcaaccgtgtgttgcgtgcttcactctcttaagtactgacagcccctcgccctgtgagct

SEQ ID NO: 98149 - DNA, 1632 bp, Oryza sativa
  Clone ID: PAT_MRT4530_96082C.1
atggtggctcaaagagaaagagcagtggtggcggtgcgttgtcacgcccagaaattcccgagtagaattccaagcagaatgtgcattaaaacccctgtccaggaccggccggggccttctgtaacaatagaaatccaaagatcaccatttctagccaacctcatccttctcgaatccaaagacctagatgtcattcttgggatggattggttgaccaagttcaagggcgtcattgattgtgcgaaccgcacggtcaccttgatcaatgagaagggagaaacagtggtgtacaaatctccagccccaccaaagctgggggtttccttgaatcagattgaggtggaaattccggtggtcaccgaggagaagagttcgaggaaattggaagatattcccatcatctgcgagtatccagaagtgttccccgaagacctcactaccatgccacccaagggagagatcgaattccgcattgatttggcaccgggaactgctccaatttacaagagaccgtacaagatggcagccaacgagctagcagaggtcaagaagcagaaggacaagacgaagagaatgtgtgtcgattatcgcgcactcaatgaggtcaccatcaagaacaaatatcctttgccacagattgatgatctgtttgatcagccaaaaggagccaaggtgttttccaaaatagacctgcgatcaggctatcaccagttgagaattcgggaagaggatattcccaagacagccttcaccactcggtatgggttgtatgagtgcacggatatgtcttttggactcaccaatgcacctgcattcttcatgaacctgatgaacaaagtgttcatggaatttctgtataagtttgtcatggtattcattgacgacattcttatctattccaagtcggaagaagagcatgaacgacatcttcgtctggttaaattcttgggccacgtcattacagctcagggtgtggcagttgatccatcgaatgtggagtcggttaccaagtggaccccacctaagacagtgtcacagattcggagtttccttggacttgtgggttattaccgtcggttcattgaaaatttctccaggatcgccagacctatgactcagttgcttaagaaagatgagaaattcaaatggacagccgagtatgataagagttttgaggagctcaagaagaaattggtgtctgctccagttctgattctgcccgatcagacgaaagacttccaggtttattgtgacgcgtcccgtcacgggcttggatgtgtcttaatgcaagaaggcagagtggtcgcttatgcctcgcgacagttgtgtccacatgaaggaaactatccaacacatgacctggaattggcagcggtggttcacgctttgaaaatctggaggcactatctgattggcaaccgctgcgaagtctatacggatcacaagagtttgaaatatatcttcacccaacctgatctaaatctccgtcagcgaagatggttggagctaatcaaagattatgatatgagcattcactaccatccaggcaaagccaatgtggtggcagatgccttaagcaggaaaagctactgcaacgcttcgtgcaccgaagacatgtgtaaagaattgtag

SEQ ID NO: 98150 - DNA, 3687 bp, Oryza sativa
  Clone ID: PAT_MRT4530_96083C.1
atgatcatggtcgaggtcctggaggaggaggcggtggtgttcacccccacttcgtctgggagtgaggatgctagcgagagccacggccctcgtcaccaccgccgcaactctccaactcctccccgccacgacccctcgcggagggaggaccccaaccgttcgggtggtttggccctctccccgcccccgggtggagggaggccacgacgcatcggggcatggcgccgcctcacttacggtgacggcggctcgccccgaggcacgcttcaggcggcgggtgcccttctgcggcatccccccgtgaactcggagccggagacccctgtccagcgctggttggacgacgtggccaaattggtcaccactgcccagcggcagttggccgcgggcggccgacccgccgtcaccgggggcgatgactgggtcatggcgaattatttccccatggccctcaagggtcaggcgtgcggctggctgatgacccagccccccgactccatccactcttgggaggacctgtaccagcagttcgtcacaaactttcagggcacatatccccgcccaagagaagaggcggacctgcacgctgtgcggcggaaggacgatgagtccctccgctcgtacatacagcgcttctgccaggtccgcaacactattccatgcattccggcccatgcggtcgtttatgcgtttcggaatggcgtgcggcataaccgcatgctggagaagatcgcctccaaggagaccaagatcaccgccgagctcttcgagctggcggacaaggtggctcggaaggaggaggtgtgggcctggaactcccccggcaccggcgcggcggctgcggctacccccgagtctgttcccctctctaagcggcgagataggaggggcaaaaggaaaccggcccgctccgatgacgagggccatgtccttgcggctgatgggcccacacgggccccgcgcaagggaaaggccaccggcgacaagccgagctccactgctccatccggcgagggccgatcggcagacaagtggtgctcggtgcacaacacttatcggcacaatctcgccgactgccgctcggtcaagaatttggccgagcggttccagaaagccgatgaggagaagcggcagggtcgacgagagggcaaagcccccgcgaccccaaccgaagacctgcgaggggaggccaagaagaaggctcccgccgatgatggcgataacagcgaggatctggagttccagatacctcagggaaccgtcgccacaatcgaccggggggaggagggggcttgcgttcacacctcccgccgaggcttcaaggctatgaggcgagagcttctggccgccgtcccgacccacgaagcggctcggaaggcacgctggtcggaggtgaagctcacctttgaccaagagcgaccatccaacagtgctcgctcgagccgccttcgatgcgttcaaggccccggggatgaagctccagccgcgctgccggtcatcggcgtgactccgggacacacatggcccctcggccacgttgagctctcggtaaccttcggcgactccaccaacttccgtaccgagcggatcgacttcgatgtggcggaccttaatctgccctacaacgcggtcctgggcagacctgcgttggtgaagttcatggccgccacccactacgcctacctccagataaagatgctgggccctagtggtcccatcaccgtctttggcaatgtcaaagtcgccctcacctgcgcggagcagcgcgccgacaacctggcagtggccacggagccacaggccccggaggcctccgcatcccgcgcctccaagaagcgcctcacctcggctgacgaggaaagcgcgctcgtcttcttcctgcgggcaaactccgacgtctttgcatggaagccgtcggacatgcccggggtccctagggaggtgatcgagcaccgcctcaccgtgcggccggatgcgcgatccgtccggcaaaaagtgcagcgtcaagccccggagcagcaggccttcatccgagaggaagtggcgcggctcctggaggctgacttcatccgcgaggttatccatccagagtggttggcgaacccggtggtcgtcccgaaggccaacggcaagctccggatgtgcatcgactatacggatctcaacaaggcatgccctaaagatccctgccctttaccacgcatagatcagatagtcgactccactgtgggtgccgtcctagtagtcgagcgcgaagagagcggaccggaggcccccttgactcacgatggcccttcgtcccccgaagacccggtgcccgaagcccccaacccccaggaggaccccgaggcccccgtgggaggaggggaggctttggcgagtgttcccgaggcctatggtcctgacatgactcgagacccccccggggcccctaggcaagggcgccccagatcatctgcccctggcagcacggaccggctccaccgaaaggtcctagctgacttcatcgcggagtggaccccagtggatgaccctgttccgtccaacgttccctccctccccggagatggagaggacccaaacaccgacattcgtggtgggcactgggttatgcatttcgacggctccctcaaccttcaaggtgcaggtgccggagtcacgttgacttcgccaagcggggacgtcctcaaatacgtcgttcggctcgacttccgagccacgaacaacatggcggaatacgaaggactcctcgcggggttgagggcggcggccggaatgggcatccgccgtctcctggtcctaggcgattcccagctggtcgtgaatcaagtatccaaagagtaccagtgcaccgatccacaaatggacgcatatgtccgcgaagtgcggcgcatggaacgccacttcgacggactcgagctccggcacgtgccccgacgcgacaacacagtcgctgatgagttgtcgcgtgttgcgtcggcacgagccccactccccctgggaccttcgtggaaagactcgcacagccataacggcacccagttcaccagtgagctgttcggcgactattgcgacgacatgggcatcaaattgtgctttgcctcgcccgcccaccccaagagcaacggccaagtcgagcgagccaacgccgaaatcctcaaaggcctcaagaccaagacgtacaacgtcctgaagaaacacggggattcgtggctcgaggagttgcccgccgtgttgtgggcaaatcggactactccaagtcgtgccacgggggaaacgccctttttcctggtgtatggcgccaaggcggtcctaccttcggagctttccttgggatcgcctcgcgtcgcgctgtacgatgaggccaagcaggatgatcttcgccgcgacgacctcgactattttgaagagcggagaaggcgcgcggccctacgtgcggcgcgctaccaacaaagcctgcggcgctaccatcagcgccacgtccgggaccggtcactgaaagttggcgacgtcgtcctatgccgcgtgcagtcgcgtctggggctaagcaagctctcgccaatgtgggaagggccatacaaagtgatcggcgttctccggctaggctctgttcgactaaccacagaggacggcacggagttgcctaacccctggaatatcgaacacctccatcgcttctatccatag

SEQ ID NO: 98151 - DNA, 2127 bp, Oryza sativa
  Clone ID: PAT_MRT4530_96084C.1
ctccttcaagttgaaaattttggggaaaaagcttaagctctggagtaagaatctgtccagaatcatgcttctcttgaataactcaaataaagtgatcgattttcatgatcttctggaagaagacagaagcctctctttatttgagtggaatttcaggaggcagttaagcatcatatcttaaaacttttggaatacaggaaaatatattggaaaaaacattgtactaatagatggatgatgctgggagaagaaaacaccaatttgtttcaatctattgccacagaaaggtacagaatgaacacaatttctcaagttttgaatcaaagtggtcagatagttaacctgcatgatcaaaaggcaaacttgttctatcaaagtttcaagaataggatgggtatctcttgctccccaactatagatttcaatttgaacgagctttttgttcctagaatagatttggagtgcttgattgacatgttctacacacaagaaattgataatctcatctctataatcccagttgacaaggcccctggcccagatggtttcaatggttatttcatggaaaaatgctagcatatcattgcacaagatttctacagacttgcagctcattttcatgctgagtctacagatttacagatcctgaattattcttttatcactcttgtgccaaaaaaaccctctccggaaacagttaatgatttcagaccaatttctctaatgggatcaagtcttaagtttcttacaaaattgatgactgacagattgcaaggtgtgattctcaaagtggttagtgaaaaccaatatggattcatcaaaggaagaaccatcaaggattgtttagcatgggcttttgagtacattcatcaatgttagcagtcaaaaagagaaataatcatcctcaagctagactttgaaaaagcttttgatacaattgaacacacagccatcttatctgtaatgcaaagcatggggttcccacaaaaatggctcaattgggtgcaaatggtattctcctcggcaagctctgcagttctgttgaatggggttcctagtacttcttttaactgcaagagaagagttagacagggagaccctttgtctccacttcgttttgttctaggggctgaactcttgcaaagaatagtaaacagggctttcaatcttgggttaatttcaaagccaattaatgaaaatgatggaagtgggttcccgatcatccaatatgctgatgacactttgatcatgttaaaagcttcacaaaaggaaatcttctgcttcaaggaacttcttgacatgtttgctcagtcgaccggcctaaaagttagttatgcaaaatcaagtctttatccactcaatctttctaagaaaagacagatctaattgcaagacttccaggatgttctgttagaaaactgcctttcacatatctggggcttcccctaggaactacaaggccaagagtgattgattttgcccccctaggtggatagggtggaaagaaggctaacagctagttcaatgttcttacctcaaggagatagattgactttaataatttctgtcctatcatcaatacccacatactacatgtgctccctacaattacctgtcactgtgttcaaggccattgatactgcaagaaggaattgtctttggagaggaaactgccctgaatccaccagaaaacctttggcctcatgggaaagagtttttaacccaaaagaaaagggggggttaggtatggttaacctaaaagtccaaaatgtagccttgcttatgaaacatcttgttaaaatttactctgcagctgacattccctgggttaatcttgtggctaattcctacctggcagctaaagtccctcatgtaataaacaaaggatccttttggttaaaggacattattgctttggttgatgtttttagaggaactgccaaatgcaacataaggacaggcactacagtactattctggacagatctgtggaatgatcaattcaaatgtcagcaatatcagcatctttatgcttcatctctacacaaagacgattcagtacaagctatgtgtgccagaccattggaagattctttcatgttacaactctcttatcaagcctattgt

SEQ ID NO: 98152 - DNA, 243 bp, Oryza sativa
  Clone ID: PAT_MRT4530_96085C.1
cttgaaaagaagggatccatgccgtccatcttcaacaacacgcaaatgatcaagaaaacatggccgaagttgctgcccaacaaaccctagctagcgagtttccttggatgaaagaatatagcacatcatcatcagaaagcgagctttgtcatattccctagctacaagactatgggatatgacgcatctcacttcactttacgggtacccattgtacacccaatatccatatatggatagtga

SEQ ID NO: 98153 - DNA, 5447 bp, Oryza sativa
  Clone ID: PAT_MRT4530_96086C.1
atggctgaccacccacccaaccaccgcggagaaggcatggatgactttgtggcagaattggcacgcatgatgctggtggtgggctaccccaacgcgccagagtacacgactgttccaccgctcagtggcgagcttcctcaccgtgtctgcctggaggtccatggctacgtgggtacctgcctagctaatatggtggttgaggcatccggaggcacagcagatcacgcctgtcaggaggcagcatacctgatgatggccagactacgggagcgccacaactacatcttccacgacacggcgtaccgatttcaccctcgtcgagccagcggtgatgatgtcagtactttccgtccgacaaccggcgagaacgacaccacctttggtcacatgtgtgctgtgatgaggggaatggataggatgcactcggatctgcacaaggcgtccaaggccttgaacgataggaagctagtgaggatcatagctctgaaggatgagatagcacgcgtgaagaaggagaatgctcagttgaagggtctcccagcgccaggaggagtccggatccgcacgacgcctcgcaagacgacgactgcacccgtgcgcattcagcttgcgcccaggaacccacctccgcccgcaattcccgcagctccagctccagccccagctctagttccagtgccagctcccgcgtccgctctctccttcgctccagcgtcagccgccaggggtccagccagtggcaatggaggttggttgtctgctactcccagtggcagccgcgaccacagcagcagcagttccagtggcacagagccgggcagtggcgagacgtatctgccagactccaggagtcgctcagagggacctagactcttcctcaagatggtgtacgccaggaatggtagccgcacaaccggtgagggcagcaacggcgaagaacgcactgatggggtgcatcccaacagcgattccggcaatggtccgccaccactccccgagaatccgacccttgcccaagtaatggctcatcagacgcagatgatgacagccatgatgcagcagatgtagcagcagcaccagcagatgtaccagaggatgcagcagcaggccgagcagcagcagcagcagtttggtccccctccccctcagtccaaactgccggagtttctacgcgtcagaccacccaccttctccagcaccaccaaccctatggaggcaaatgactggctccatgccatagagaagaagctaaatctcctacagtgcaatgatcaggagaaggtcgccttcgccacacaccagctccaaggccccgcatcagcttggtgggacaatcacatggccacacgcccgccaggcactgaagtcacttgggcagagttctgccgtagcttcaggaaggcgcaggtgccagatggggtcgtggcacaaaagaagagggaattccgagcactccaccagggcaacaggacagtgacggagtatctccatgagttcaatcgcctcgcgcgatatgcaccggaggatgtccgtactaacgccgagaagcaggagaaattcctagcaggtctggatgatgagctaaccaaccagttgatatctggagattacgccgactttgagaggttggttgacaaggcaatccgtcaggaggatcagcgcaacaaaatggaaaggaagaggaaggcggcgcagttccggtccaaccaagggagccaccagcgaccgcgcttcactctcggacagcagggtggacctaccaccctaatcgtctgccagcaccgccctttcagtgccagcaacttccatcagggcgccagtggcagccagaaccaccatggtggtcagcccaaccgcagtgcagctccacgcccaccaatggcaccagcacagtcagctccgtccgtgcaagccaagaaggagactgggacaaagccagggtcctgcttcaactgtggcgagcttggccacttcgctgacaaatgcccgaagcctaggcgtgccgggccaaggtttgtccaggcccgtgtcaaccacgcgtccgcagaggaggcgcaagcagcaccagaggtcgtactgggtacgttccctgtcaactcagttcctgctacagtactttttgattctggtgcaacgcattctttcatttcaaagaaatttgtggggatgtatgggttaagaaaaaaagagcttagcacaccaatgaaggttcataccccgggaaatagttcaacctcggtcagttatagcccttcagtgctaatagaaattcaaagatcaccatttctagccaacttcatccttctcgaatccaaggatctagacgtcattcttgggatggattggctgaccaagtttaagggcgtcattgattatgcgaatcacacagtcaccttgaccaatgagaagggagaaaccgtggtatacaagtcatcagtctcaccgaagcaaggaatctccttaaatcagattaaggtggaaaaccctgtgaccaccagggagaagagttcacggaaattagaagatatccccatagtctgcgagtacccagaagtgttccccgaagacctcactaccatgccacccaagagagaaattgaattccggattgatttggcaccaggaactgcccctatttacaagagaccgtacagaatggtggccaacgagctagcaggggtcaagaagcaagttgatgagcagctgcagaaagggtacattcgaccaagtacttcaccttggggtgctccggtcatttttgtggagaagaaggacaagacgaagagaatgtgtgtcgactatcgcgcactcaatgaggtcacaatcaagaacaaatatcctttaccgcggatcgatgatttgtttgatcaactaaaaggacctaaagtgttttctaagatagacctgcaatcaggctaccaccagttgagaattcgggaagaggatattccaaagacggccttcaccactcggtacgggctatatgagtgcacggttatgtctttcggacttaccaatgcacccgcgttcttcatgaatctgatgaacaaagtgttcatggaatttctcgacaagtttgttgtggtgttcatcgacgacatacttatctattcaaagtccgaagaagaacatgagcaacatctccgtctggtactcgagaagttgaaggagcaccagttatacgccaagttcagcaagtgtgatttctggttgtcggaagttaaatttctgggtcacgttattacagctcagggcgtggcagttgatccatcgaacgtggagtcagttaccaaatggaccccacctaagaccgtgtcgcaaattcggagttttcttggacttgcgggttattaccgccgattcattgaaaacttctccaggatcgcccgacccatgactcagttgcttaagaaagatgagaagtttaaatggacagctgagtgcgacaagagatttgaggagctcaaaaagaaattagtatccgcaccagttttgattctgcccgaccagatgaaagacttccaagtctattgcgatgcatcccgccacggacttggatgtgtcctaatgcaagagggcagagtggttgcgtatgcctcgcggcagttgtgtccacacgaagggaattatccaactcatgacctagaactggcagtagtggttcatgctttgaagatctggaggcactatctgattggcaaccgctgcgaagtatatacggaccacaagagtctgaaatacatcttcacccaaccggacctaaatctccggcaacgaagatggttggaactaatcaaagactatgacatgagtattcactaccacccaggtaaagccaatgtggtggccgatgcgctaagcaagaaaagctactgcaatgccctatgcatcgagggcatgtgtggagaattgcagcaggagcttgagcgtctcaatgtgggaattgttgaacacggattcgtagctgctctagaagcacgccccacgctcgtggatcaagtcagaaccgctcaagtaaatgatcctgaaatagcagagctgaaaaagaacatgagagtcggaaaagcccaggatttccacgaagatgaacacggcacaatctggttgggagaaagattgtgtgtacctgacgacaaggaactgaaggatctgatactcaccgaggctcatcagactcagtactccattcatccaggcagcaccaaaatgtatcaagacctcaaagaaaagttttggtgggtcaacatgagaagggaaatagctgaattcgtcgcactctgcgacgtttgccaacgagtgaaggcagagcaccaaaggccagcaggtttactctaacctcttcaaatcccggaatggaaatgggaggagattggaatggactttataataggactgccccggacatcatcgggtcacgattcaatctgggtagtcgtggatcgactcactaaggttgctcacttcataccagtacataccacgtatacgggcaaaaggttggcagagctctacctctcgagaatcatgtgtctacatggagtacccacaaagatagtatctgatcgaggaattgggaacccggttgaatttgcaagaggagattgcaagaggaattgggaactcggttgaatttcagcacagcctaccatccgcagaccgatggtcagaccgagcgagtcaatcaaatattggaggacatgttaagggcctgcgcacttgattttggtggagcttgggacaaaaccttaccgtatgcggagttctcttacaacaacagttaccaggctagtcttcaaatggcaccgttcgaagcattatacggccggaagtgtcgcacccctctcttctaggatcagacaggcgagcgtcaactgtttggaacagaggtgctaagggaagcagaagagaaagtcagaaccatcagggaaaggttgagaattgcccagtctcgacagaagagctacgcggataaccgccgaagggagctcacttttgaggcaggggattacgtgtatcttcgtgttactccgctccggggagtgcaccgttttcaaaccaaaggcaagttggcaccacgtttcgtgggaccctacaaaatcttggaacgaaggggagaagttgcttatcagctagaacttccatccaatatgatcggcatccatgacgtgttccacgtgtcccaactaaagaagtgcttaagagtacccgaagaacaagccaattcggagcacatcgatatccaagaagatctgatgtatgtggagaggccagtccgtatccttgagaccagcgaaaggaggactagaaacaaggtcaccaggttttgccgggttcagtggagccaccattatgaggaggaagcaacctaggaaagggaagatgagttgaaagccgcctatccgcacctcttcgccagctcctccgaatctcgggcccgagattccgtt

SEQ ID NO: 98154 - DNA, 2381 bp, Oryza sativa
  Clone ID: PAT_MRT4530_96087C.1
agaggcaaatgattctattaataacagggtgaaagaagaagatctggtcattacaattatctaaaactctaaacattttttgctacttcccatatatattaatctatattcctgagaggaagggcatttggttccagatgccatgacccttttggtatatcacggtctttaatttcaataactacataagcaggaacacgatgggaaaagcttagcatttcagaccttgaaatcaactttgtcaaatggaaatcttccactattactctctggaaaaaggttaaacagccttttacccgagtcagcctgcatacattgactccaatttcatctgagtaatcagagaggatctcaaccatgcgaggttcacatttgtcgatgtcagcattactgaaggctatcttccagtttttgtacattgcccatatttctcctttctttgggaaaattcggtagaaagacctctttgcgctccagtcacactccaccggatgagagaattctgatatctctttgcaagcagtctcactaccagctcgaaacaccccacaagcaactggtagaccatcttcaacccaatgtatttcttcattgagcatagggtgaggttccagcttcaacacagaaactgcagtatgggataccacacggattactctgacatacaaccttggcattctatccggagcatcatatacagcccagatctgcccctccacaaaatgctcaggtgataacttattattgtagttcatcattccttgttgggggttacctaaatccattttgctggttgaaggatttgataagtgtgtggcagcaacttcatgaaaaccatttgagtcatcatgtaaaccttgaagagggtacaaaggagcaacacttgctgatgtattttcatattgcaagttttctggaacagcagaatgttcaagctcaaacaccgttccaacatcacaagtaaatctaaatgaaggaatcctgtgagaaaacatgagcagattatgaatgtggacttgtaataactgctctctcccactcctcacgtgcctctggaaaacgcttctatatccatctacctttaccaattgtgcgacagtgcagcctgagccttttaaataactgttaagaatttctacaacataaaaggtgcttttcttccgcatcccagggtcattgcaccacccaatgtcccaatcactgtagattgcccatacctccccttcctggggataaactttaagatgatgattccaattgtcagaagatatctgatgacataacatagttggacaagttaccgatattttacattcatccgcaataaaaattccacaaacaaatggcaagcttgcactaaaccacctgttctcgtcatgggattgtggggatggtttgaaccatgaaacatataagtgctctttgtcagccacaatcttgttaatccgtgcatatctgcgagggaacttctcccagtcatatgctgcccaaatctgaccagcagcgaaattcactatctccctatcattctcaaagttatgaacgtcatattgtgtaatagagcaaagctcgtcttctctgttatccaatggatcagtaaacctgtcatccaaatctacatgtggcgatgacacacaatgcacatccttttcgcacacactcttttgcttcttgtcaacatggttctcatcaggtaactgaaaaccatcatcagctagaaagcatgaatcagtcctcttagttttggaagagctagcaacatttgaacaatcgcccacatccaaacatgatctgtcagtctgttgagcatatgaaggcacattgtttgagatgccagccaccgcattacagtctgcctcaaggctgcttaatctacccagttctgcattcggataatcatgagttgatctatcagcagcgcaaatccctttcgtttgtaaaatgtcttcgcaccacagctcaacatttgccaccgtagaatcataccgcaccttcttcgccggatcagacagcacggcgtacgcatcgttgacgagccggagggcagcctcggcgccgggcaggtcgtccctgaccggctccacctggcgcacgatgctcctgtactgcgcgtcgatcttggcagcgtcgtcgcgggggaggacctggaggatcctgtaccaatccacgccgcgcccgcggccgaggccggggcggcgcgcccgcgtctcggcggcggcgcagaggacctcgagcacggagagcatctcgaaggcgtcgtccagcctagggttggtctggagcgtctcgagcagcagcgtcctcgcgccggcgtagtcctccccgcgcatcttcgccgcgatcgcctccctccccgccgccgcctcggcgtcgccgcccat

SEQ ID NO: 98155 - DNA, 333 bp, Oryza sativa
  Clone ID: PAT_MRT4530_96088C.1
atgaaactaataaccctctcgtgtctctgcctctgcctcctcctcctcctcgtcaccggctcgtcctctcccgtctccgtctccgtctccggcgaccgctgcccagtgctccatcaccatcgccggcttcacgacatggtcgccgccgccgtcgtcagtcaacccccgccgcggccgccgccgccagctgcgccggccgcggcgaggactagcggcacggcggtcgaaacagtattgccgcggcagcgagatgatggagaagagattgacgagacggtttacgaggggtccaagaggctcagccccggggggcccaaccctcagcatcactga

SEQ ID NO: 98156 - DNA, 663 bp, Oryza sativa
  unsure (1)..(663): unsure at all n locations
  Clone ID: PAT_MRT4530_96089C.1
ccggccgggttgtccctcaagggccgtacccgtatggcggcgaataccagccttctcatgatggcagaagggatgtactggatgaggtagagatccggcagctccttattgatcatgttgggcatcggtgctgctggggaagtaggcctgctcgcacatggaaaattacctctattgaggattgcaatgtatatgttggaactttggaaactttcatcgaggaaagggacactgtaactaacaaggaaccctatgatggtgggaaaatagatggaagagacaagggtcctgtgcttgcagtgtgggaacttgatctgaggtctgagtttcctctactgtttgtaccagaaaaagaagtaatggtcaagatccctcactcagaagtaattgaaaaatgcttagattgcgagagtcgtggagagataccatgtcctatttgcaatgctggtcaggagcaccggattttacaaggcaaatcagatgacccgttgcagtgcatgtcatgggaggngtttacttgctcaccaagatggatttgatacagtatgtggaatgtgcagtggtaaagggatgttggcttgtatagcatgtggatcgcgtgggctagtacatgcaagacatgtagtggctatgggtccccttctcgcaaaaagcactgctcat

SEQ ID NO: 98157 - DNA, 699 bp, Oryza sativa
  Clone ID: PAT_MRT4530_9608C.1
atggccgccgccgccgcagcacctttgccttcgaccgcgccgccctcaacaccgcagtcaccggcctctgcggccgccctaccacgtcgctccctctccctcgccatggccgccttctcgcgcaagtccggtggcggcggacgcttccccgaccataggagaacgaggcggatggtgagcttgactggccgaccaccgctagcgcgctgctcatcctcgaccgtgccacatttggctctgcggtcaccggcctctgcagccgccccgctgtgccgccccctctccctctccatggccaccttctcatgcaagtccggcgccggccgccgctcccccgactataggaggatgaggcagatggggggtaattcgatcgactgcgatagtttatgggcggcgggagacacggagggggggggcggcggacggcggggggcggcggacggcggggggcggcagacggcggtgcacgggggcggatggcggacggtggcgtcacagcgacggccgagcgtaggcggctgcggccctgcgggcgcggcgcacggggacgggtggcggacggcggcgtcgcagcgacggccgagaggaggcgactgcggcggcggctgccggcgctgctgggtgagcggcggcgggcgcggctggacgagcggaggcggcgggctcagctgggcgagcggcggcgggcgcggctag

SEQ ID NO: 98158 - DNA, 286 bp, Oryza sativa
  Clone ID: PAT_MRT4530_96090C.1
gggggcccctgggggccggccgggatccggggggagcccacgcgcgctgttgtgcggactattgctacctacacctaagggtacgtcatggcttatgtgaccgagctctgacaggcataatctatatgacaccactgcgaagcacatgggcctgtacatgaggatcgggggggctggcaagcatctcatgagcaaggcgcggactctgtgccgtcatgggactgaacacaaacggcagccccagtggaagtacgatggatccagcaccggactgtcagcaggggag

SEQ ID NO: 98159 - DNA, 501 bp, Oryza sativa
  Clone ID: PAT_MRT4530_96091C.1
atgggggatactggccggttctccgcatacttgggggtgttggcggacaggacggagttgcgctacatcaacgtggggacttctcgccgagtgtcccagcttgtattctgctcgttgaagacacaattagacgacactgatgcatggagagtacagacacgacgtacgtgcactgtgtacgtccgagtaccagacctcaggccggcgaggacgaccccgatcgagctccggtggttcggtgagaagagcggtacggtggtgtacaccgttggggaggccaatggcggtcttcgcggtgaacatggcggatgggacagtccagaagctagcagacggtggcggctacaacacatgcaggaatatttaaggttactagaaaaaatacccgtgcgttgcaacgggtacaacagtacacgagttacaattccgaataggactccagcaccaagctggagacggactccgtctcggactcgccttgcactcgcactcgcagggtag

SEQ ID NO: 98160 - DNA, 350 bp, Oryza sativa
  Clone ID: PAT_MRT4530_96092C.1
cactctctccgtctcattctccggcgccggccagaaatgctgccctcctcctcctttaggcgttggggggagctagagctctagctagctagctaggtgcgacgcgacgacgtgatggctggtattgctaaggagaggcggctgccgccggcgctgccactcgccactctcatcggccgcgagctccgcgccgggggctccgagcgcccctccctccgctacggccacgccggcttcgccaagcgcggcgaggactacttcctcgtcaagcccgactgcgtacgcgtacccggggacacctccaccgccttctccgtcttcgcggtgttcgacggtcacaacggggtctt

SEQ ID NO: 98161 - DNA, 171 bp, Oryza sativa
  Clone ID: PAT_MRT4530_96093C.1
atgggcatcggtgtcaaccatgtaaccggtgaggagctccaggcttcgcgggatgaacctttcgactgcagcaaccacctccaacttcaccaccagcacagagagaggggcactggggtgatcagcaaggctcctagacaactaagaggaggggggcggcctccccaatag

SEQ ID NO: 98162 - DNA, 1415 bp, Oryza sativa
  Clone ID: PAT_MRT4530_96094C.1
aaacagtgtaaaactactattcattgaaaaacacaatatcttggcagtttgtacattttgtgcatcaagtacaacagtgagagatgagagcgaatttcacagggtgaaaaacaagacaatctcggtacacgtgttcggtttgagagtttttaccactgaactgcacatatgtagttttacattctgacgaaaacaaactaacattcattctacgagtagcccatttcgattctctatcagaaaggaaggaagcacaatgccgatagctgccaagacttgcgtgaaatttggtcagttccagaagcgtccccttcacataaaaatgggtcttctgtaaacaagtactacctcgctctcagactcagtatcatttaccataattttgatatttacgtgagaaccgatataaagctttcacaatggtaccatatttcattgattccagtggacccacgtacataatctctgtgtaccgtaatctccatgcaggaaatcccaaatgaaatctaccaggaccatacacaaggagaagatcaggttctggcccaccagtacctacagctttcagtgcatgagtcatgtcagcttctgtaaacgcaatctcacttttgttatcagagttgcagcaagtggaatacagtaagtttgctactttggcgatggcttccttgccatcagagctagatagacactccataaacatccctccatgtctatagcatgaagctttggtatctgcaactacatctaaagaatttattgggttcccatctgttgaggtttctataccaggttgaatcaactcctttagtactccttcaatgtcatagagaattagataattaatcccaatagttgagaaccagcgtaaaagttgcttgaccttcaaagcattctttgcctctctgctatctactacaacacccaagtatgcaagtctctcaagatgtagatttcggtacttgggcaacaacttgaatgaaatgagatagcattctagatcattcttcagatgtgacaatgaaccaaagaagctgatcaccaagtggacaaggcaccacagcaaccctaagatgagctgattggagaaggctactgtaggttgttggactatgttggctgtagcaacattaaggctgggctgtgccaggtttttctttcactactgaaccaggagcggaggaaggtatcgccggcagagcagaaatgccgcctccggcagccctgccctacagctcacagctacgacgtggagtgagatcgatcagcgaggaagcaggattcaccggctccagggttccggtcactggaggaagaagaagacctctcgcctggagctggcgcggagacagttagcgtggcgccggtgaggggcaggaggcgccggcggcgaggacaccggagcctcgtgccga

SEQ ID NO: 98163 - DNA, 135 bp, Oryza sativa
  Clone ID: PAT_MRT4530_96095C.1
atgagcaatgctaacttccgcggcattcgggccaaggagctgatcttggcaggatctcgagccgctcacctcacctcacccggagcactccaatggcgagagaagcagaatggcctgccacctctgaagaagtga

SEQ ID NO: 98164 - DNA, 851 bp, Oryza sativa
  unsure (1)..(851): unsure at all n locations
  Clone ID: PAT_MRT4530_96096C.1
gactcctatagggcgattggngatcacgaggccggccgggatctctctgcaaggtttgacattgtcgcattctgttattgcagggcaatgcattgccattggtgggtggaatcaaggttggctattgtagtgaaaggcaaactagaggccctcttgttgcaaagatgtggtggatccttaactacactgcgagcctcccaggcctcaccaccatgaattgcccatctatgccctcccaacccaagccccagctcggtaaaccctcgtaagaggggttccttgttctgcacgtgcccatcgaccactcctgcaaaccgttctcctgccaaacgcggttgaactcatcggtgtttttttccttcatgggatagcactggtgatacctaactatatatatttagcatatagtttctcacctcataggaccatcctattttcgcctccattaaccggcttggttttgctgtgccttttgttttggatggtgcattgcattgcgattgcaaggctgcagtatttgcccgatgaactgtacttgaagtgctaattgatttgctgatctgatccccatgtgacacctcgtgcctgccaatttttgatattgcccttgagatgggggcactgtagcctctttcggaggccatagtgctgtttataaactggaactgctggataaagtggccttattattcatcccttcctaaaatcatttgggaccattgtgttgttccctccattccaggcattattttgcctatattttagagtaatatttgactcagggttggacaatggagaaatgggggaagtaacagcctctaattatttcatattcccacaggggctgcccc

SEQ ID NO: 98165 - DNA, 431 bp, Oryza sativa
  Clone ID: PAT_MRT4530_96097C.1
agcaacacaatgggcctgaccattaatattacttcctgggaagtcaccggtcgtacagaattttgggtcgtacagaatttgccattaccaggagatctggatggtatggcagcactacaataataggttttttcaattactaaaaggatggtatcaattctttaattctttccagggcttaagggggctttttggacctaaaaacctggagccctggccagggcataaggtggccaaaggatacccccctggaaaaaggccttaaaaattttggattctttttaccaggccctcattggatggtttttatctaaaaaaacccttaatgattttggcaggaggatttaaattatttaaaaaggaagttagctgcaattttggggggcgctcagaggagggttaaaaggagaaactatgggatgttccacctt

SEQ ID NO: 98166 - DNA, 1033 bp, Oryza sativa
  Clone ID: PAT_MRT4530_96098C.1
tcccacgcgtccgtagggtttgtagtggagaaattgttgtaggaaaggtccgggggggtgatgttcattaggaggcgggtggagggaggaattggtttgatgaaggtttgatttggtagagagatgccaatcaccgcaccatttgtgcatgtaattccttcccagttgcagtgagcagcattagtggagttccatctacctagcgcaggtgagctcccccaatggttcttgagctcaaggaggatttggagttcttcattagattgattcgaggactttgggtaggattcgcgcagcatacaaaattatatcacaaagaacaggaagaagttcacataccgtttgttggccatctctgctgaatccttttggctggaaatctcttgccaggagaggaggaatgcatgggtgttttgggtgtttagctataatctccaatgcaagtggatgctattgtattgtcaccagtcactgtgaattccttttagaattgggcatatactggcaagtcatccattcgactatttgattttgagctaacatggaagccttgctgttaatgcctttgtttatgtggtcctcccagctccaacgcatcgttagtgtctgatgacatggatgacttggaacaatggaaccattatgacctttgggcgagggagaatttaccacttctgctttggaacagtttagacatgaacagggatttttacacttgcctgtgtaaactacacgtctttgagaaaatttcaggtaatttatactgcttcatacaaaacaaagtgctacctagttcaagttactgtcttgttgaatattatgggtcgtggtgtaaatcttctctgtttgattaaagattgtggggtggggtaaaattgaaccgacattagttgcttggagtaacctatgtcctaactgtcagtccacttatatgaagttcatatggtaaccgctttggcatcctgctgagataatgttcaattggctgttgctactttttgcatcttgaattattaaaacttatttgtctgct

SEQ ID NO: 98167 - DNA, 756 bp, Oryza sativa
  Clone ID: PAT_MRT4530_96099C.1
atgcttatagcagaggcaaaaagagctttgttgcctggtcccctccgttttgaccttgcaagaaataggccaaagacaacgaaagatctgtttgagagaatagaaagctttgcaaaaggcgaagaagatgagttgagagtgcaagaagaagcagctttgttaggcaaaaaacagtcaaagaacaagcaagtttcccaaggggaagaacaaaaagtggaaaacacaaacaagccatggaaaaagttcaaacatgactacaagcaagaacggaagaagcaaattaacttcattggtgatggatcacataatggtgaaggatttttccggcaagaaggaaaaggtaaaaacaactgggataactcaaaaggaggaaaaagctattggggcaatctggtagaggtcgaggataatgatggaattctgtctaaggaagaggaagatggtggaataatggaagaggtagaggacgagaaagtcagaaagatcaaagcaaattctgtcaaacgcatggcccaggtggtcatcccacgggaggaatgttctagcaaactttgtcaaattcatgggctaggaggccatccaacagaagaatgccaacacatgactcatttgttggaaaaacacatcgatcagtatgaaaacaattatgaaggggctcgagagcgagctcaaaatgttatagaagcaccgcaagttctaaagatagaagcaattgaggaagtaccaaaaagggtgatcagtgccataacaagatga

SEQ ID NO: 98168 - DNA, 487 bp, Oryza sativa
  unsure (1)..(487): unsure at all n locations
  Clone ID: PAT_MRT4530_9609C.1
agtggcccccacaccgtcgcggtgggggtctgctgtctgctccacagaatggancggtgccacaccggtctgcccccgtgcgtcctacgaaagaagaataggtagcccgcccaccggccaagacgcgcggccgggctaacacaacacgacgccgcaagaagtatatacccaagaagtgtgtgccagccgaaaagaccgagacaagacccccaagcaagacngtgggtcccggtccacaccccacaggtagtctattgcgtcgtctgtaggtagtggtgtgtaacccttgtgattgataccgtctgtctgtaccntatgtatcantgaatgtgtctgtcgtcatgtgtgtgtgtntagtgggtaaatggtgtttgaggtgaantgccgtagtcccagtggaccgaaaggtgtaagtaacgttgtggacattttgagtccatggtaatatcaagtcaattttttcgtccaaaaaaaaaaaaaaaaaaaa

SEQ ID NO: 98169 - DNA, 291 bp, Oryza sativa
  Clone ID: PAT_MRT4530_960C.1
atggggaaggcggcagggctggagaagctcgccgagcatgctccaccggtgaggaaagacgccttgtttcctccgcccaacgccgccggagaaaggagagcatcatcagagaggggaaaggccgccgacggggagagaggagcggcgccactgcggggcaggtcgcggcccccggcttcacgcggttgctcccgccgtctctccctcctgcgtcaaatccgtgccacgaagcgcttgcccttccttgctcccgccaccagaggttgtcgccgagaagcttttggtgtctga

SEQ ID NO: 98170 - DNA, 162 bp, Oryza sativa
  Clone ID: PAT_MRT4530_96100C.1
atggtggtggatgaccaggagaagatgaatgagaagaatgaggttgcccttcgtcttaaagggaaaggtggtcccatagaggatgttgaaaagttaagtcctttcaacttgtctcaagggtgtaaatgtctaggattcctgtatggtgcaaatactctatag

SEQ ID NO: 98171 - DNA, 393 bp, Oryza sativa
  unsure (1)..(393): unsure at all n locations
  Clone ID: PAT_MRT4530_96101C.1
aggntgaagggaattgncgcacaactgatgntgnggaggcctgcactggngtgaatggtgcggntatggntggngggtnccccaggaaggagggaatggaaaggaaggatgttatgtcaaaaaatgnctccatctacaaaccccaagcttctgctcttgaggctcatgcaccccctaactgcacggctctgccagctgccaatccagcaaacaccaccgctctcatcttaaaagaaccccctccatccatccctcacaagaacattacttcgcctcaccccgccttggcccaccaccaggcccctccggccacacccctgcccaacctcaccgccccccgctactcgccgccagcaacgcccccccccnggcgcccccccccgcccccccccc

SEQ ID NO: 98172 - DNA, 168 bp, Oryza sativa
  Clone ID: PAT_MRT4530_96102C.1
atggcgatgccgaatcctgaacctaacccactacagaggctcctgaatcgaattgaacatctggttcttctccagagcagcgtagatgatgccgcggcaagcaaggagaaagatgagctcggcgagggggagagtgacacgctgacagggatactacggagcagataa

SEQ ID NO: 98173 - DNA, 223 bp, Oryza sativa
  Clone ID: PAT_MRT4530_96103C.1
atcgccggccacgcagcacaccacgaggtcgttgtatcatctaagccgtcgaacagaagaagcagcagcctcctgccataagtaaaatcagcctatacccagccccgccttgtctttccttccttcctgtcaacgaatgatcagagcacgttaatttggtgatgaagatccaacaaaatttatcattttttttaaaataccacgtgtgtgtttcttaccatga

SEQ ID NO: 98174 - DNA, 483 bp, Oryza sativa
  Clone ID: PAT_MRT4530_96104C.1
atggttatcgcggtaaaccacgattatcacgcgattatcacggttatcgcgctaccgcggggtggtgataaccccggcccaagcgataagcaaaagatcgtgatcaaggtgtgcgcgccgtgcgaggggtgccgggcgaaagcgctggaggtggcggcgagggcggcggacggggtgatctcgctggcgatcaccggcgacgacagggacaagctggaggtcgtcggagtcggcgtcgacgtgacccgcctcgtcatctgcctgcgcaagaaggtgtgctacgccgagatcctgctggtggaggaggagaaggaggaggaggagaagaaggagccggaatgcaagccgtgctactggcctccctactggtgcccgccgccggaggatccgacttgcaagccgtgctaccctcgctacagctacgcgccgccgccgccggcggtcgtcgtctgcgacgagcccagcgcctgttccataatgtaa

SEQ ID NO: 98175 - DNA, 384 bp, Oryza sativa
  Clone ID: PAT_MRT4530_96105C.1
atggcaggcctggtacgatccatcggcgagaagctgcttcggcgccgctcctctccccgccgcttctccttggacgaggcagcgcttatgaagctggagggtcccaagagggaggaggtggtggggatgatgcgcgattgggaggcgaggctggacgaccacatcctcgccaatatccgcaacatccacgctctgcgcacccatcaagctggcttcttcaattgcgtgctgaatcgtttgggagtgcccaagggggacttaagagataagtggctatggcgctccaaccttactgccatgtacttcacctcttttgcgcttggctaccgctctactcaacacatcatcaacaagcatatacaaagatgcatgaagcctagctag

SEQ ID NO: 98176 - DNA, 297 bp, Oryza sativa
  Clone ID: PAT_MRT4530_96106C.1
atggcctccgagccgtacacgaggaagaagggtgtctcattgttggacgttgtcggtgtgtccgacgcagcaatcttggaaatcggcgctgatgaactgggagccgttatccgttatgatgcggtgaggcaatccatatcggcaaaatatccccttaatgaatttgatagcgttgtcagccttgatttcccccgtgggtgttgcctcgatccatttgtgcttgcgctggtagctttgtgtgtttgctatgagattgacaagcttcacaccgttgtaccatgtcgcaagcgtctttga

SEQ ID NO: 98177 - DNA, 160 bp, Oryza sativa
  Clone ID: PAT_MRT4530_96107C.1
gactagaattggtgaaccaatgatgaatgagttgcgtgatggttaaaaatgaaagtgcatacatgcatgcatgtgtggacctggttgaaacttagggtcatatgaaatgctgaaatgaaaatgcatgcttacctgatgttaaaaaaaaaaaaaaaaaaaa

SEQ ID NO: 98178 - DNA, 5283 bp, Oryza sativa
  Clone ID: PAT_MRT4530_96108C.1
atgggttgcaagatggccggccacccacccaaccaccgcggagaaggcatgattgactttgtggcagagttggcacgtatgacgctggtggtgggctaccccaacgcgccagagtacacgactgttccaccactcagtggcaagcttcctcaccgtgttcgcctggaggtccacggctacgtgggtacctgcctagctaatatggtggttgaggcatccggaggcacagcagatcacgcctgtcaggaggcagcatacctgatgatggccagactacgggagcgccacaactttatcttccacgacacggcgtaccgatttcacccttgtcgagccagcggtgatgatgtcagtactttccgttcgacagccggcgagaacgacaccacctttggtcacatgtgtgctatgatgaggggattggataggatgcactcggacctgcacaaggcgtccaaggccttgaatgatgggaagctcatgaggatcgtcgctctgaaggacgagatagcgcgcctgaagaaggagaatgctcagttaaagggtcttcccgcgccaggaggagtccggatccgcactacgccccgcaagacgacgactgcacccgtgcgcatccagcttgcgcccaggaacccacctccatcagcagctcccgcagcacctccagttccgcccgcagctccggtagttcctgcagctccagtaccagctccagctcccgttcacgtgtcagctcccgcgtccgctctctccttcgctccagcatcagccgccaggggtccagccagtggcaacggaggttgcttgcttgggatggtttacaccaagaatggtagccgcgcaacaggcgagggcagcaacggcgaagagcgcactaatggggtgcatccccacagcgattccggcaatggtccgccaccacttcccgagaatccgacgctaccccaagtgatggcacatcagactcagatgatggcatccatgatgcagcagatgcagcagcagcaccagcagatgcaccagcggatgctgcagcacgccgaacagcagcatcagcagtttggtccccctccccctcagtccaagttgccagagtttctacgtgtcaggccacccaccttctccaacaccaccaaccctatggaggcgaatgactggctccatgccatagagaaaaagctgaatctcctgcagtgcaatgatcaggagaaggttgctttcgccacacaccagcttcaaggtcctgcgtcagcttggtgggacaatcacatggccacccgcccaccaggtactgaagtcacttgggcagagttctgccgtagcttcaggaaggcgcaggtgccagacggggtcgtggcacaaaagaagagggaatttcgggcactccatcagggcaacaggactgtgacggagtatctccatgagttcaatcgcctcacgcgatatgcaccagaggatgtccgcaccgacgccgagaagcaggaaaagttcatggcaggtctggatgacgagctgaccaaccaactaatatctggggactacgtcgactttgagaggctggttgacaaggcaatccgtcaggaggatcaacgcaacaagatggacaggaagaggaaggccgctcagttcagggcacatcagggaagtcaccagaggccgcacttcactcctggacagcagggtggacctaccaccatgatcgtccgccagtaccgcccgttcaaccctagcaattttcccagggcgccagtggcagtcagaaccaccatggagtcaggcccgtccgcgcaagccaaggagactggagcaaaaccagggtcctgcttcaactgtggcgagcttggccatttcgctgacaaatgcccgaagcctaggcgtgccgggccaaggtttatccaagctcgtgtcaaccacgtatctgcggaggaggcacaaacagcaccagaggttgtactgggtacgtttcctgttaactcaatccctgcaacagtactttttgattctggtgcaacgcattcgttcatttcaaagaagtttgtcgggatgcatgggttaataagagaggaacttagcacactgatgcgggttcataccccagggaatagctccacttcggttcaattcagcccttctataacaatagaaattcaaagatcaccatttctagccaaccttattcttctcgaatccaaagacctagatgtcattcttgggatggattggctgaccaagtttaagggagtcatcgattgtgcgaatcgcacagtcaccttgaccaacgagaagggagaaacagtagtgtacaaatcaccagactcaccaaagcaaggggtctctttgaatcagattgaggcggaaatcccagtggacaccgtggagaagaagttgaggaaattggaagatatacccatagtctgcgagtatccagaagtgttccccgaagaccttactaccatgccacccaagagagagattgaattccggattgacttggcaccgggaatcgctccaatttacaagagaccatacagaatggcggccaacgaactagcagaggtcaagaagcaggttgatgagcagctgcagaaagggtacattcgaccaagtacttcaccttggggtgctccggtcatttttgtggagaaaaaggataagacgaagaggatgtgcgttgattaccgcgcactcaacgaggtcacaatcaagaacaaatatcctttgccgcgaatcgatgatttgtttgatcaactgaaaggagctaaagtgttttctaagatagacctgcgatcaggctaccaccagttgagaattcgggaagaggatattccaaagacggccttcaccactcggtacgggctatatgagtgcacggttatgtctttcagacttaccaacgcacccgcattcttcatgaatctgatgaataaagtgttcatggaatttctggacaagtttgttgtggtattcatcgacgacattcttatctattcaaagaccgaagaagaacatgagcaacatctccgtctggtactcgagaagttgaaggagcaccagctatacgccaagttcagcaagtgtgacttctggttgacggaagtcaaatttctaggacatgtcattacagctcagggtgtggcagttgacccatcgaacgtagagtcagttaccaaatggaccccaccgaagaccgtgtcacagattcgaagttttcttggacttgcgggatattaccgccgattcatcgaaaacttctccaggatcgcccgacccatgactcggttgcttaagaaagatgagaagtttaaatggacagctgagtgcgataagagttttgaggagctcaaaaagaagttagtatccgcaccagttttgattctgcccgaccagatgaaagacttccaagtctattgcgatgcatcccgccacggacttgggtgtgtcctaatgcaagagggcagagtggttgcgtatgcctcgcggcagttgcgtccacacgaagggaattatccgactcatgacctggaattggcagcagtggttcatgctttgaagatctggaggcactatctgattggcaaccgctgcgaagtatatacggaccataagagtctgaaatacatcttcacccaaccggacctaaatctccgacaacgaagatggttggaactaatcaaagactatgacatgagcattcactaccacccgggtaaagccaatgtggtggcagacgcattaagcaggaaaagttactgcactgccctatgcatcgagggcatgtgtgaggaattgcggttcgtagctgctctggaggcacggcctacgctcgtggatcaagtcagagcagctcaagtaaatgattctgaaatagcagagctgaaaaagaacatgagagtcggaaaagcccgggatttccatgaagatgaacacggcacaatctggttgggagaaagattgtgtgtacctgacgacaaggaactgaaggatctgatactcaccgaggctcatcagacccagtactccattcatccaggcagcaccaaaatgtatcaagacctcaaagaaaagttttggtgggtcagcatgaggagagaaatagctgaattcgtcgcactctgcgatgtttgccaacgagtgaaggcagagcaccaaagaccagcaggtctactccaacctcttcaaatcccggaatggaaatgggaggagattggaatggactttataacaggactgccccggacatcatcgggtcatgattccatctgggtagtcgtggatcgactcactaaggttgctcacttcataccagtacataccacgtatacgggcaaaaggttggcggagctttacctctcgagaatcatatgtctacatggagtacccaaaaagattgtatctgatcgagggagtcagttcacctcaaaattctggcagaagctgcaggaagaattggggacccgtttaaattttagcacggcctatcacccgcaaactgatggtcagaccgagcgagtcaatcaaatcctggaagatatgttgagagcttgcgctcttgattttggtggagcttgggacaaaaacttgccatatgcggaattctcgtacaacaacagctaccaggccagtctacagatggcaccgtttgaagctttatacggccggaagtgccgcacacctctcttctgggatcagacaggcgagcgtcaactgttcgggacagaggtattaacagaagcggaagagaaagtcagaatcatcagggaaaggttgaggattgcccagtctcgacagaagagctacgcggataaccgccgaagggagctcacttttgaggcaggagattacgtgtatcttcgtgtcactccgctctggggagtacaccgttttcagacgaaaggcaagttggcaccacgcttcgtgggaccctacaaaatcttggaacgaaggggagaagttgcttatcagttagaacttccatccaatatgatcggcatccatgacgtgttccacgtgtcccaattaaagaagtgcttaagggtacctgaagaacaagctgattcggaacacattgatatccaggaggacctaacctatgtggagaagccggttcgtatacttgataccagcgaaagaggaaccagaaacaaggtcaccaggttttgccgagttcagtggagtcatcattcagaagaggaagcaacctgggaaagggaggatgagttgaaagccgcccatccgcacctcttcgccagctcctccgaatctcggggccgagattccgtttaa

SEQ ID NO: 98179 - DNA, 286 bp, Oryza sativa
  Clone ID: PAT_MRT4530_96109C.1
ctttatctatacgttctacatttcgatcatgtttttttttagttatttcttttttttaagcattatatagaaattttatagatttatgggaaggaggaggtgtccgcctgggagccaacaatttctgggagaggcaggcgatcggtacggcggcccagggctccgacgacaaggactacatggagccagcgtcggcaccgttttcgagccagaggagcttaagtgagaagtacttctaccgcgcagggattgttgagttcatggccacctttttattcctttacat

SEQ ID NO: 98180 - DNA, 204 bp, Oryza sativa
  unsure (1)..(204): unsure at all n locations
  Clone ID: PAT_MRT4530_9610C.1
ggcggcggcgcggcgcgganagacgaggacgaagcagcaggcggcggcggcagagcacggcgacctagcccgacctcgcaaccatggcaaggggtttnaagaagcatcntaagaggctcaatgcgcccaagcattggatcctcgacaagnttngtngagcttttgccccanngncatctttttgtcctnacaagtccagggagt

SEQ ID NO: 98181 - DNA, 2841 bp, Oryza sativa
  Clone ID: PAT_MRT4530_96110C.1
atgagggttcataccccgggaaatagttcaacctcggtcagttatagccctttagtgctaatagaaatacacctatcacaatttctagccaacctcatccttctcgaatccaaagacctagatgtcattcttgggctggattggctgaccaagttcaagggagtcattgattgtgcgaatcgcacagtcaccttgaccaatgagaagggagaaaccatggtgtacaagtcaccagtctcaccgaagcagagaatctccttaaatcaaattgaggtggaaaaccctgtgaccaccgaggagaagagttcgcggaaattggaggatatccccatagtctgcgagtacccagaagtgttccccgaagacctcactaccatgccacctaagagagagattgaattccggattgatttggcaccgggaaatgccccaatttacaagagaccgtacagaatggtagccaatgagctagcagaggtcaagaagcaggttgatgagcagttgcagaaagggtacattcgactaagtacttcaccttggggtgctccggtcatttttgtggataagaaggacaagacgaagagaatgtgcgtcgattatcgcgcactcaatgaggtcacaatcaagaacaaatatcctttgccgcgaattgatgatttgtttgatcaactgaatggagctaaagtgttttctaaaatagacctgcgatcaggctatcaccagttgagaattcgggaagaggatattcccaagacagccttcaccactcggtatgggttgtatgagtgcacggttatgtcttttggacttaccaatgcacccgcattcttcatgaacttgatgaacaaaatgttcatggaatttctggataagtttgtggtggtattcatcgatgacattcttatctattccaaattggaagaagaacatgagcgacatctccgtctggtactcgagaagttggaggagcaccagttatatgccaagttcagtaaatgcgacttttggctatcggaggtcaaattcttgggtcacgtcattacagctcagggcgtggcagttgatccgtcgaatgtggagtcagttaccaagtggaccccacctaagaccgtgtcacaaattcggagttttcttggacttgcgggttattaccgtcggttcattgaaaatttctccaggatcgccagacctatgactcagttgcttaagaaagatgagaaatttaaatggacagctgagtgtgacaagagttttgaggagttcaataagaaattagtatccactccagttctgattttgcccgaccagacgaaagacttccaagtctattgcaacgcgtcccgtcatgggcttggatgtgttctaatgcaagagggcagagtggtcgcttatgcctcgcggcagttgcgtccgcatgaagggaactatccgacacatgacttggagttggcagcggtggtttatgctttaaaaatctggacgcgttatctgattggcaaccgctgcgaagtatatacggaccataagagtctaaaatatatcttcacccaacctgatgtaaatctccgacagcgaagatggttggagttaatcaaggattacgacatgagcattcactatcatccgggcaaagccaatgtggtggcagatgcattaagcaggaagagctattgcaataccttatgcactgaaggcatgtgtaaggaattgcagcaggagcttgaacacctcaacttggggcttgtagaatacgggtacgtggctgccctagaggcacgacctacgctcgtggatcaagtcagagcagctcaagtaaatgatcctgaaatagcggatatgaaaaagaatatgagggtcggaaaagcccgggatttccacgaagatgaacatggcacaatctggttgggagaaagattgtgcgtacctgacgacaaggaactaaaggatctgatactcaccgaggctcatcagactcagtactccattcatccaggcaacaccaaaatcatgagaagagaaatagctgaatttgtcgcactctgcgacgtttgccaacgagtgaaggcagagcaccaaaggccagcaggttttctacaacctcttcagatcccgaaatggaaatgggaggagattggaatggacttcataacaggactgccccggacatcatctggccacgattcaatctgggtagtcgtgaatcgactcactaaagttgcccatttcattccagtgcataccacgtatacggggaagaaattggcagagctgtacttggcaaggatcatgtgtctgcatggagtacccaagaagattgtatctgatcgagggagtcagttcacctcaaaattttggcagaagctgcaggaagaattggggacccgtttgaatttcagcacaacctaccatccgcagacagatggccaaaccgaaagggtcaatcagatcttggaagatatgctacgtgcatgtgtgctcgattttggtggagcatgggataaaagtctgccttatgcggaattctcgtacaacaacagctatcaggccagtctacagatggcaccgttcgaagcgttgtatggccggaagtgccgcacacctctctactgggatcaaacaggtgaacgtcaactgttcgcaacagaagtgttaacgaaagcagaagagaaagtcagaaccgtcagagagaggctgagaattgcccagtctcgacagaagagctacgcggacaaccgccgaagggagctcacttttgaagcaggggattatatgtatctccgtgttactccgctccggggagtgcatcgtttccagacgaagggcaagttggcaccacgcttc

SEQ ID NO: 98182 - DNA, 1012 bp, Oryza sativa
  Clone ID: PAT_MRT4530_96111C.1
atggcatccgtgcagcaggtgagggcagcagcggtgaagaacgcaccgacggtggacatcccaatagtgcctctggcaacgtccaagctgccggagttcttacgcgtcaggccacccaccttctccagcaccaccaaccctatggaggcaaatgactggctccacgctatagagaagaagctaaatctcctacagtgcaatgatcaggagaaggttgccttcgccacacaccagctccagggtcccgcgtcaacttggtgggacaatcacatggctacccgtccgccaggtacggaggtcacttgggcggagttctgtcgcagctttaggaaggcgcaggtgcccgacggggtcgtgccacaaaagaagagagaattctgggcactccaccagggcaaccggacggtgactgagtacctccatgagtttaatcgtctagcgcgatatgcaccagaggatgtccgcatcgacgccgagaaacaggagaagttcctagcaggcctggatgacgagctgaccaaccagttaatctctggagactacgccgactttgagaagctggttgacaaggccatccgtcaggaagatcagcacaacaaaatggacaggaagagaaaggcagcgcagttccggtccaaccaaggaagtcaccagcgaccgcgcttcgctcctggacagcagggtggacctaccaccatgatcgtccgccagcaccgccctttcaacacgagcagcttccaccagggtgccagtggcagccagaaccaccagggaggccagcccaaccgcagtacagctccgcgcccaccgatggcaccagcacagtcagctccatcagcccaagccaagaaggagactggagcaaagccagggtcctgtttcaattgtggtgagcatggccactttgctgacaagtgcccgaagccaagccgtgccggggcaaggtttgcccaagctcgtgtcaaccacgcatccgcagaggaggcgcaagcagcaccagaggtcgtactag

SEQ ID NO: 98183 - DNA, 2545 bp, Oryza sativa
  Clone ID: PAT_MRT4530_96112C.1
ccgccttcgatgcgctcaaggccccggggatgaagctccagtcgtcgctgctgatcattggcgtgactccgagacacacgtcgagctcccggtaacattcggtgactccaccaacttccgcaccgagcgaatcgacttcgatgtggcggacctcaatctgccctacaacgcggtcctgggcagacctacgttagtgaagttcatggccaccaaccactacgcctacctccagatgaagatgccaggccctgctgttcccatcaccgtctttggcgatgtcaaagtcgccctcgcctgcgcggagcaacgcgccgacaacctggcagtggccacggagccgcaggccccggaggccaccgcgtcccgtgcctccaagaagcgcctcacctcggctaatgaggaaagcgcactcgtctccttcctgcgggcaaattctaacgtcttcacatggaagccatcggacatgcccggggtccccagggaggtgatcgagcactgcctcgccgtgcggccggatgcgcgacccatccggcaaaaagtgcgacatcaagccccagagcgacaggccttcatccgagaggaagtggtgcggctcttggaggctgacttcatctgcgaggttatccatccggagtggctggcgaacccggtggtcgtcccgaaggccaacggcaagctccggatgtgcatcgactacacggacctcaacaaggcatgccctaaagatcccttccctctaccatgcatagatcagatagtcgactccactgtggggtgcgaccttttgtgttttctagatgcctactctgggtatcaccagatccgcatggctagggaagatgaggaaaaacctaccttcattactcctgtgggcaccttttgttatacaactatgccttttgggttaaagaatgcaggtcctacttttcagcgcatgactcgtattactttgagtaatcagatagggcgcaatgtagaggcgtatgtcgatgacctggtggtgcagcggcccgtctactttgtcagcgaggcactccgagatgcgaagacccgatacccacaggcccagaaaatgctttatgcagttttaatggcctcaaggaaattacgccactatttccaagcgcatcgggtttccgtagtgacatcctaccctctcggccaaatcctgcacaaccaagagggcactggtcgggttgtaaagtgggccatcgagctggctgagttcgacctgcacttcaaaccacgacacgcgatcaaaagccaggtcctagctaacttcatcgcggagtggaccccagtggacgaacctgttccacccaacgtctccttcctccccagagatgtaaaggacccaaacgccgacattcatggcgggcactgggttatgcatttcgacggctccctcaaccttcaaggtgcaggcgccagagtcacgctgacatcgccaagcggggacgtcctcaagtatgtcatttggctcgacttccgagccacgaacaacatggcggaatacgaaggactcctcgcgggattgagggcggtggccagaatgggcatccaccgtctcctggtcctaggtgactcccagctggtcgtgaatcaagtatccaaagagtaccagtgcaccgacccacaaatggacgcatatgtccgcgaagtgcggcgcatggaacatcacatcgacagactcgagctccggcacgtgccccgacgcgacaacacagtcgctgatgagttgtcgcgtgttgcatcggcacgagccccactccccccggggaccttcgaggaaagactcgcgcagccatcggcgcgaccgaacccctcgagggaccccgacgacacgccctctgccccgacccttggcgactcgcggccctcggggcccgagggggtcgaccccgacccccctcatcaggtcgtttggatgactgacatccgggcgtatctcgacggcaatactcttcctgaggatcgcgcagaagctgagaagctcgcgcgcatctccaagcggtacgtcctcatagaagggaccctctaccggcgtgccgccaacgggatactcttgaagtgtgtttctcgagagcaaggcatcgagctcatagccgacacccatcaggacatccttggaccattcaagacggctcgaggcgggtatcagcacctatacgttgccatcgacaagttcaccaagtggcccgaagcttacccggtcgtcaagatcgacaagcattccgccctcaagttcatcaggggcatcacatcccgattcggagtgcccaaccgcatcattacagataacggcacccagttcaccagtgagctatttgacaactattgcgacgacatgggcatcaaattgtgctttgcctcgcccgcccaccccaggagcaacggccaagtcgagcgagccaacgccgaaatcctcaaaggcctcaagaccaagacgtacaatgtcctgaagaaacacggggattcgtggctcgaggaattgcccgccgtgttgtgggcaaatcgcaccactccaagccgcgcaacggggtaa

SEQ ID NO: 98184 - DNA, 435 bp, Oryza sativa
  Clone ID: PAT_MRT4530_96113C.1
atggcgacggcggcggcgccctctcctcttttaggtccggcgggctacaaggcgatggcgacaccctcccctccgccagatccagcaggaggggaggcggcaggttacaaagtgacggcggcctggcggtggtggtggcttcctcccttacgtcagatccggctggaggggaggcggcgggctacaaggcgacggcggcgccctcccctccaccagatccagcgggagggaaggtggctggctacaaggcgacaacgggaggggagaaggaggctcatccctcctctccgtatggtgacgacgacagggttggagaaggacgttggctgccatcgtgttcttgatgttttttatgttaatcttcttgatgtttatgtattcatggatgttcttggtgttcatgcattcatgtgttatttgatcttgtcgagatga

SEQ ID NO: 98185 - DNA, 5409 bp, Oryza sativa
  Clone ID: PAT_MRT4530_96114C.1
atggccggtcacccacccaaccaccgcggagaaggcatgatcgacttcgtggcagagctggcacgcatgacactggtagtgggctaccccgacgcgccggagtacacgaccatcccaccgctcagtggcgagcttcctcaccgtgtccgcttggaggtccatggttacgtggggacttgcctcgctaacatggcggtcgaggcgtcaggaggcacagcagatcacgcttgtcaggaggcagcctacctgatgatggccagactacgggagcgccacaactacattttccacgacacggcgtaccgctaccaccccagtcgagcccacggtgatggcgtcagctccttccgtccaacagctggcgagaacgacaccacctttggccacatgtgtgcggtgatgaggggtttggacaggatgcactcggatctgcacaaggcgaccaaggccttgaatgatgggaagctcatgaggatcgtcgctctaaaggacgaggtagcgcgtctgaagaaggagaacgctcagctgaagggtctcccagcgccaggaggagtccggatccgcactacgccccgtaagaggacgactgcaccggtgcgcatccagcttgcgcccaggaacccacctccaccagcagctcccgcagcagctccagctccgcccgcagttcctgcagctccagctccagctcccgcgttcactctctccttcgctccagcatcagccgccggaggttcagccagtggtaccggaggatggctatctgctactcccagtggcagcggcgagactgatccgtcagactccaggagtcgctcagaggggccaggttgcttgtttgggatggtctacaccaggactggcaaccgcgccacaggcgagggcagcaacggtgaagaacgcgctgatggtgtgcaccccaacggtgattctggcaatgggccgccaccacttcaggagaatccgacgcttgcccaagttatggcacatcagactcagatgatggccgccatgatgcagcagatgcagcaccagcaccagcagatgcatcagaggatgatgcagcacgccgaacagcagcaccagcagtttggtccccctcccccgcagtccaagttgcctgagttcctgcgagtcaggccacccaccttctccagcaccaccaaccccatggaggcaaacgactggctccatgcaatagagaagaagctgaatctcctgcagtgcaatgatcaggagaaggttgctttcgccacacaccagcttcagggtcctgcgtcagcttggtgggacaaccacatggccacccgcccaccgggtactgaagtcacatgggcagagttctgccgtagcttcaggaaggcacaggtgccagacggggttgtagcgcaaaagaagagggaattccgagcgctccatcagggcaacaggacagtgacagagtacctccacgagttcaatcgcctcgcgcgatatgcaccagaggatgtccgcactgacgccgagaaacaggaaaagtttatggcaggcctggatgacgagctgaccaaccaactgatatccggggactacgctgactttgaaaggctggttgacaaggcaatccgtcaggaggatcagcgcaacaaaatggaccggaaaagaaaggcggcacagttccggtccaaccaaggtagtcagcaccgaccgcgcttcactcccggacagcagggtggacctaccaccatgatcgtccgtcagcaccgcccgttcaactccagcaacttccaccagggcactagtggcagtcagaaccaccatggaagccagcccaaccgcggtgcagctccacgcccaccaatggcaccggcacagtcaggccagcccgcgcaagccaagaaggagacgggagcaaaaccagggtcttgcttcaactgtggcgagcttggccacttcgctgacaaatgcccgaagcccaggcgtgccggaccaaggtttatccaggctcgtgtcaaccacgcgtctgcggaggaggcacaagcagcaccagaggtcgtactgggtacgtttcctgttaactcaatccctgcaacagtactttttgattctggtgcaacgcattcgttcatctcaaagaaatttgtcgggatgcatgggttaataagagaggaacttagcacaccgatgcgggttcataccccagggaatagctccacttcggttcaattcagcccttctataacaatagaaatccaaagatctccatttctagccaacctcatccttctcgactccaaaggcctagatgtcatccttgggatggattggctgaccaagtttaagggagtcatcgattgtgcgaatcgcacagtcaccttaaccaacgagaagggagaaaccgtggtgtacaaatccctagtctcgccaaggaaaggggtctcgttgaatcagattgagacggaaatcccagtggacaccgtagagaagaactcgagaaaattggaagatatacccatagtctgcgagtatccggaagtgttccccgaagacctcaccaccatgccacccaagagagagattgaattccggattgacttggcaccgggaactgccccaatctataagagaccgtacaggatggcggccaacgaattagcagaggtcaagaagcaagttgatgaacagctgcagaaagggtacatacgaccgagcacttcgccttggggcgctccggtcatttttgtggagaaaaaggataagacgaagaggatgtgcgtcgattaccgcgcacttaacgaggtcacaatcaagaataaatatcctttgccgcgaatcgacgatttatttgatcaactgaaaggagctaaagtgttctctaagatagacctgcgatcaggctaccaccagttgagaatccgggaagaggatattccgaagacggccttcaccactcggtacgggctatatgagtgcacggttatgtccttcggacttactaacgcacccgcattcttcatgaatctgatgaacaaagtgttcatggaatttttggacaagtttgttgtggtattcatcgacgacattcttatctattcaaagtccgaggaagaacatgaacaacatctccgtctggtactcgagaagttgaaggagcaccagctatacgccaagttcagcaagtgtgacttctggttgacagaagtcaaatttctgggccatgtcattacagctcagggtgtagcagttgatccatcgaacgtggagtcagttacaaaatggaccccaccaaagaccgtgtcgcagattcggagttttctaggactggcaggttattaccgccgattcatcgaaaacttctccagaatcgcccgacccatgactcagttgcttaagaaggatgagaagtttaaatggacagctgagtgcgataagagctttgaggagctcaaaaagaaattagtatccgcaccagtattgattctgcccgacccgacgaaagacttccaagtctattgtgatgcatcccgtcacggacttggatgtgtcctaatgcaagagggcagagtggttgcgtatgcctcgcggcagttgcgtccacacgaaggaaattatccaactcatgacttggaattggcagcagtggttcatgctttgaagatctggaggcattatctgattggaaaccgctgcgaagtatatacggaccataaaagtctgaaatacatcttcacccaaccagacctaaaccttcgacaacgaagatggttggaactaatcaaagactatgacatgagtattcactaccacccgggtaaagccaatgtggtggcagacgctttaagccggaaaagttactgcactgctctatgcatcgagggcatgtgtgaggaattgcggcaggagttagaacatctcaacgttggaattgttgaacacgggttcgtagccgctctggaggcacggcctacgctcgtggatcaagttagagccgctcaagtaaatgatccggaaatagcagaactgaaaaagaacatgagagtcggaaaggctcgagatttccacgaggatgagcacggcacaatctggatgggagaaagattgtgtgtacccgacgacaaggagttgaaggatctgatactcacggaagctcatcagacccagtactccattcacccaggcagtactaaaatgtaccaagaccttaaagaaaaattttggtgggtcagcatgaggagagaaatagctgagttcgtcgcactctgcgatgtttgccagcgagtgaaagcagagcaccaaagaccagcaggtttactccaacctcttcaaatcccggaatggaaatgggaggagattggaatggactttataacgggactgccccggacatcatcgggacatgattcaatttgggtagtcgtggatcgactcaccaaggtggctcactttataccagtacataccacctatacgggaaagagattggcagaattgtaccttgcaaggatcatgtgtttgcatggggtacccaagaagatagtatccgaccgaggtagtcagttcacctcaaagttctggcagaagctgcaggaagaattggggacccggttaaatttcagcacggcctatcacccgcaaactgatggtcagaccgagcgtgtcaatcaaattttggaggatatgttgagagcttgcgctcttgattttggtggagcttgggacaaaagcttaccatatgcggaattctcgtacaacaacagctaccaggccagtctacagatggcaccgtttgaagctttatacggccgaaagtgccgcacacctctcttctgggatcagacaggcgaacgtcaactgttcggaacagaagtattagcggaagcagaagagaaagtcagaatcatcagggaaaggttgaggattgctcagtctcgacagaagagctacgcggataaccgccgaagggagctcacttttgaggcaggagattacgtgtatcttcgtgtcaccccgctccggggagtacaccgcttccagaccaagggcaagttggcaccacgcttcgtgggaccatacaaaattttggaacgaaggggagaagttgcctatcagctagaacttccgtccaacatgatcggcatccatgacgtgttccacgtatcccaattaaagaagtgtttaagggtacctgaagaacaggctgattcggaacacattgatatccaggaggacctaacatatgtggagaagccggttcgtatacttgataccagcgaaaggagaaccagaaataaggtcaccaggttttgccgagttcagtggagtcatcattcagaagaggaagcaacctgggaaagggaagatgagttgaaagccgcccatccgcacctcttcaccagctcctccgaatctcggggccgagattccgtttaa

SEQ ID NO: 98186 - DNA, 2019 bp, Oryza sativa
  Clone ID: PAT_MRT4530_96115C.1
atggtctacaccaggaatggcacccgcacgacaagcgagggcagcaacggcgaagaacgcgctgatggtgtgcaccccaacagtgattccggcaatggtccgccaccatttcccgagaatctgacgctggcccaagtaatggcacatcagactcagatgatggcagccatgatgcagcagatgcagcagcagcaccagcagatgcaccagaggatgctgcagcacgccgaacagcagcaccagcagtttggtccccctcctcctcagtccaagctgcccgagtttctacgcgtcaggccacccaccttctccagcaccaccaaccccatggaggcgaatgactggctccatgccatagagaagaagctgaatctcctgcagtgcaatgatcaggagaaggtcgctttcgccacacaccagcttcaaggtcctgcgtcagcttggtgggacaatcacgtggccacccgcccgccaggcactgaagtcacttgggcggagttctgtcgtagcttcaggaaggcgcaggtgccagacggggtcgtggcacaaaagaagaggggattccgggcactccatcagggcaacaggacagtgacagagtacctccatgagttcaatcgcctcgcgcgatatgcaccggaggatgtctgcaccgacgccgagaagcaggagaaattcctagcaggcctggatgatgagctaaccaaccagctgatatctggagactatgccgactttgaaaggttggttgacaaggcaatccgtcaggaggatcagcgcaacaaaatggacaggaagagaaaggcggcacagttccggtccaaccaaggaaaccatcagcgaccgcgcttcactctcggacagcagggtggacctaccaccatgatcgtccgccagcaccgcacgttcaagtctagcaacttccaccagggcgccagtggcagtcagaaccaccatggaggtcagcctaaccacggtgcagctccacacccaccagtggcaccagcacagtcaggcccgtccgcgcaagccaaggagactggagcaaagccagggtcctgcttcaactgtggtgagcttggccacttcgccgacaaatgcccgaagcctaggcgtgccgggtcaaagtttgtccaggctcgtgtcaaccacgcgtctgcaaaggaggcgcaagcagcaccagaggtcgtactggccaatgaactagccgaggtcaagaaacaggttgatgagcagctgcagaaagggtacatacgaccaagtacctcaccttggggtgctccggtcatttttgtggagaaaaaggataagacgaagaggatgtgcgtcgattatcgcgcactcaacgaggtcacaatcaagaataaataccctttaccacgaatcgatgacttgtttgaccaactgaagggagctaaggtgttctctaagatagacctgcgatcaggctatcaccagttaagaattcgggaagaagatattccaaagacggctttcaccacccggtacgggctgcatgagtgcacggttatgtctttcggacttaccaacgcacccgcattcttcatgaatctgatgaacaaagtgttcatggaatttctcgacaagtttgtggtggttttcatcgacgacatacttatctattcaaagtctgaagaagaacatgagcagcatctccgtctggtactcgagaagttgaaggagcaccaattatacgccaagttcagcaagtgtgacttctggttgacggaaggcatggcagttgatccatcgaacgtggagtcagttaccaaatggaccccaccgaagaccgtgtcgcagattcgaagttttcttagactggcggctgagtgcgataagagctttgaggagctcaaaaagaaattagtatccgccccagttctgattctgcccgaccagatgaaagatttccaggtctattgcgacgcatctcgccacgggcttggtggttcatgctttgaagatctggaggcactatctgattggcaaccgctgtga

SEQ ID NO: 98187 - DNA, 894 bp, Oryza sativa
  Clone ID: PAT_MRT4530_96116C.1
atgtgcatcgactatcgcgcactcaacgaggtcacaatcaagaacaaatatcctttaccgcggatcgatgatttgtttgatcaactgaaaggagctaaagtgttttctaagatagacctactatcaggctaccaccagttgagaattcgggaagaggatattccaaagacagccttcaccactcggtacgggctatatgagtgcacggttatgtctttcggacttaccaacgcacctgcattcttcatgaatctgatgaacaatgtgttcatggaatttctcgacaagtttgttgtggtgttcatcgacgacatacttatctattcaaagttcgaagaagaacatgagctacatctccgtctgttactcgagaagttgaaggagcaccagttatacgccaagttcagcaagtgtgacttctggttgtctgaagtcaaatttctaggtcacgttattgcagctcaaggtgtggcagttgatccatcgaatgtggagtcagttaccaagtggaccccacctaagaccgtgtcgcaaattcgtagttttcttggacttgtgggttattaccgccgattcatcgaaaacttctccaggatcgcccgacccatgactcagttgcttaagaaagatgagaagattaaatggacagctgagtgtgacaagagttttgaggagctcaagaagaaattagtatccaccccagttctgattctgcccgaccagatgaaagacttccaagtctattgcgacgcatcccaccacgggcttagatgtgttctaatgcaagagggcagagtggtcgcatatgcctcgtggcagttgcgtccacatgaagggaattatccaactcatgacctggaattggcagtagtggttcatgctttgaagatctag

SEQ ID NO: 98188 - DNA, 264 bp, Oryza sativa
  Clone ID: PAT_MRT4530_96117C.1
ggaaggcaaaggaaattttactccattacatattaccaccaatagccaacattttttgagaatcctgcttaaggtagtggactcggcgcaccacaaggagaggggactgccaagtgttaactagcaccattgcgggctcgtaagtaaaaaaccatggatcatggcacggaaaataaaagctcagaagccagcagttcaaaagctccaccggttttgcaaaactaagtataactccaacggaaggaacaggattgcaggatagcc

SEQ ID NO: 98189 - DNA, 2230 bp, Oryza sativa
  Clone ID: PAT_MRT4530_96118C.1
ggaagtcaaatttctgggtcacgttattacagctcaaggcgtggcagttgatccatcgaatgtggagtcagttaccaaatggaccccacctaagaccgtgtcacagattcagagttttcttggacttgcgggttattaccgccgattcattgaaaacttctccaggatcgcccgacccatcactcagttgctttagaaagatgagaagtttaaatggacagctgagtgtgacaagagttttgaggagctcaagaagaaattagtatccgccgtagttctgattctgcccgactagacaaaagacttccgagtctattgcaacgcatctcgccacgggcttggatgtgttctaatgcaagagggcagagtggtcgcttatgcctcgcggcagttgcgtccacatgaagggaattatccaactcatgacctggaattggcagcagtggtacatgctttgaagatctggaggcactatctgattggcaaccgctgtgaagtatatacggaccacaagagtctgaaatacatcttcacccaaccggatctaaatctccgacaacgaagatggctggaactaatcaaagattatgacatgagcattcactaccatccgggtaaagccaatgtggtggcagatgctttaagcaggaaaagctactgcaatgccctatgcaccgaggacatgtgtgaagaattgcagcaggagcttgaacgtctcaacgtgggaatcgttgaacacaggttcgtagccactctagaagcacggcctacgctcgtggatcaagtcagagcagctcaagtgacggatcttgagatagctgaactgaaaaagaatatgagggtcggaaaagcccgggacttccttgaggatgaacatggcacagtctggatgggagaaagattgcacatgcctgatgacaaagagctgaaggatctgatactcaccgaggctcatcagactcaatactccattcatccgggtagtaccaagatgtatcaagatctcaaataaaaattttggtgggccagcatgaggagggaaatagctgaattcgtcacgctctgcgatgtttgtcagcgagttaaaacagaacatcagaggcccgcaggactattacaacctcttcagatcccggaatggaaatgggaagaaattggaatggatttcataacaggtctgcccaggacatgatctggccacgattcgatataggtagttgtggatcggcttaccaaagtcgctcatttcatcccagtgcacactacttatacgggcaaaaggttggcagagctctacctcttgcgaatcatgtgtctacatggagtacccaaaaagatagtatctgatcgagggagccaattcacttcaaagttctggcagaaattgcaagaggaattgggaacccggttgaatttcagcacagcctaccatccgcagaccgatggtcagaccgagcgagtcaatcaaatattggaggacatgttaagggcttgtgcacttgattttggtggagcttgggacaaaagcttgccgtatgcggagttctcttacaacaacagctaccaggctagtcttcaaatggcaccgttcgaagcgttgtacggccggaagtgccgcacacctctcttctgatatcaaacaggcgaacgtcaactgttcggaacataagtgctaacggaagcggaagagaaagtcaggaccgtcagagagaggctaagaattgcccagtctcgacagaagagctacgcggacaaccgccgaagggagctcacttttgaagccggggattacgtgtaccttcgtgttactccgctccggggagtacaccgttttcaaaccaaaggcaagttggcaccacgcttcgtgggaccatacaaaatcttggaacgaagaggagaagttgcttatcagctagaacttccattcaatatgatcggtatccatgacgtgttccacgtgtcccaattaaagaagtgcttgagggtacccgaagaacaagccgattcagagcacatcgatatccaggaagatctgacctacgtggagaagccagttcgcatccttgagaccagcgaaaggaggactagaaacaaggtcaccaggttttgccgggtttagtggagccaccattcagaggaggaagcaacctgggaaagagaagatgagttgaaggccgcccatccgcacctcttcgccagctcctccgaatctcggggccgagattccgtt

SEQ ID NO: 98190 - DNA, 4887 bp, Oryza sativa
  Clone ID: PAT_MRT4530_96119C.1
atgggttgcaagatggccggtcacccacccaaccaccgcggagaaggcatgattgattttgtggcagagttggcaagcatgacgctggtggtaggctaccccaacgcgccagagtacacgacgattccaccgctcagtggcgagcttcctcaccgtgttcgcttggaggtccacggctacgttggtacctgcctagccaatatggtggttaaggcatccggaggctcagcagatcacgcctgtcaggaggcagcatacctgatgatggccagactacaggagcgccacaactacatcttccacgacacggcataccggtttcaccctcgtcgagccagcaatgatgatgtcagtaccttccgtccgacagctggcaagaacgacaccacctttggtcacatgtgtgctgtgatgaggggattggataggatgcactcggatctgcaccaggcgaccaaggccttgaacgatgggaagctcatgaggatcgtcgctctgaaggacgagatagcgcgcctgaagagggagaacgctcagttaaagggtcttcccgcgccaggaggagtccggatccgcactacgccccgcaagactacgacggcacccgtgcgcgccagcttgcgcccaggaacccacctccatcagcagctcccgcagcacctccagttccgcccgcagttcctgcagctccagctccagctcccgcgtccgctctctccttcgctccagcatcagccgccagaggtccagccagtggcaccggagatggtctacaccaggaatggtagccgcgcaacaggcgagggcagcaacggcgaagagcgcactgatggggcgcatccccacagcgattccggcaatggtccgccaccacttcccgagaatccgacgctagcccaagtgatggcacatcagacacagatgatggcagccatgatgcagcagatgcagcagcagcaccagcagatgcaccagaggatgctgcagcacgccgaacagcagcaccagcagtttggtccccctccccctcagtccaagttgcctgagttcctacgtgagaaggttgctttcgccacacaccagcttcaaggtcccgcgtcagcttggtgggacaatcacatggccacccgcccaccaggtactgaagtcacttgggcagagttctgccgtagcttcaggaaggcgcaggtgccagatggggtcgtggcacaaaagaagagggaattccgggcgctccatcagggcaacaggactgtgacagagtacctccatgagttcaatcgcctcgcgcgatatgcaccagaggatgtccgcaccgacgccgagaagcaggaaaagttcatggtgggtctggatgacgagctgaccaagcaactgatatctggggactacgctgactttgagaggctggtggacaaggcaatccgtcaggaggatcaacgcaacaagatggacaggaagaggaaggccgcacagttcagggcacctcagggaagtcaccagaggccgcgcttcgctcccgggcagcagggtggacctaccaccatgatcgtccgccagtaccgcccgttcaatcctagcaactttcctcagggcgccagtggcagtcagaaccaccatggaggtcagcccaaccgcggtgcagctccacgcccaccaatggcaccggcacagtcaggcccgcccgcgcaagccaagaaggagactggagcaaaaccagggtcctgcttcaactgtggcgagcttggccacttcgctgacaaatgcccgaagcctaggcgtgccgggccaaggtttatccaggctcgtgtcaaccacgcatctgcggaggaggcacaagcagcaccagaggttgtactgggtacgtttcctgttaactcaatccctgcaacagtactttttgattctggtgcaacgcattctttcatttcaaagaaatttgtggggatgtatgggttaaggaaagaagagcttagcacaccaatgagagttcataccccgggaaataggtcaacctcagtcagttttagcccttcagtgctaatagaaatccaaagatcaccatttctagccaacctcattcttctcgaatccaaagacctagatgtcattcttgggatggattggctgaccaagttcaagggagtcatcgattgtgcgaatcacacagtcactttgaccaacgagaagggagaaaccgtggtgtacaaatcactagtctcaccaaagcaaggggtctctttgaatcagattgaagcagaaatcccagtggacaccgtggagaagaacttgaggaaattggaagatatacccatagtctgcgagtatccggaagtgttccccgaagacctcactaccatgccacccaagagagagattgaattccggattgacttggcaccgggaaccgctccaatttacaagagaccgtacagaatggcggccaacgaattagccgaggtcaagaagcaggttgatgagcagctgcagaaagggtacattcgaccaaaaaaagataagacgaagaggatgtgcgttgattatcgcgcactcaacgaggtcacaatcaagaacaaatatcccttgccgcgaatcgacgatttatttgatcaactgaaaggagctaaagtgttttctaagatagacctgcgatcaggctaccaccagttgagaattcgggaagaggatattccgaagacggccttcaccactcggtacgggctatatgagtgcacggttatgtccttcggacttactaacgcacctgcattcttcatgaatctgatgaacaaagtgttcatggaatttctggacaagtttgttgtggtattcatcgacgacatacttatctactcaaaatccgaagaagaacatgagcaacatctccgtctggtactcgagaagttgaaggagcaccagctatacgccaagttcagcaagtgtgacttatggttgacggaagtcaaatttctgggccatgtcattacagcccagggtgtggcagttgatccgtcgaacgtagagtcagtcaccaagtggaccctaccgaagatcgtgtcgcagattcgaagttttctaggactggcaggttattaccgccgattcatcgaaaacttctccagaatcgcccgacccatgactcagttgcttaagaaagatgagaagtttaaatggacagctgagtgcgataagagttttgaggagctcaagaagaaattagtatccgcaccggttttgattctgcccgaccagatgaaagacttccaagtctattgcgatgcatcccgtcacggacttggatgtgtcctaatgcaagagggcagagtggttgcgtatgcctcacggcagttgcgtccacacgaagggaattatccaactcatgacctggaattggcagcagtggttcatgctttgaagatctggaggcactatctgattggcaaccgctgcgaagtatatacggaccataagaactatgacatgagcattcactaccacccgggtaaagccaatgtggtggcagacgcgttaagcaggaaaagttactgcactgccctgtgcatcaagagcatgtgtgaggaattgcggcaggagtttgagcatctcaacgtgggaattgttgaacacgggttcgtagccgctctggaggcacggcctacgctcgtggatcaagtcagagcagctcaagtaaatgattctgaaatagcagagctaaaaaagaacatgagagtcgggaaagcccgggatttccacgaagatgaacatggcacaatctggttgggagaaagattatgtgtacctgacgacaaggaactgaaggatctgatactcaccgaggctcatcagacccagtactccattcatccaggcagcactaaaatgtatcaagacctcaaagaaaagttttggtgggttagcatgaggagagaaatagctgaattcgtcgcactctgcgatgtttgccaacgagtgaaggcagagcaccaaagaccagcaggtttactccaatctcttcaaatcccggaatggaaatgggaggagattggaatggactttataacaggactgccccggacatcatcgggtcacgattcgatctggatagtcgtggatcgactcactaaggttgctcatttcataccagtacataccacatatacgggcaaaaggttggcggagctttacctttcgagaatcatgtgcctacatggagtacccaaaaagattgtatccgaccgagggagtcagttcacctcaaaattctggcagaagctgcaggaagagttggggacccgtttaaatttcagcacggcctatcacccgcaaactgatggtcagaccgagcgagtcaatcaaatcttggaagatatgttgagagcttgcgctcttgattttggtggagcttgggacaaaagcttgccatatgcggaattctcgtacaacaacagctaccaggccagtctacagatggcaccgtttgaagctttatacggccggaagtgccgcacacctctcttctgggatcagataggcgagcgtcaactgttcggaacagaggtattagcggaagcagaagagaaagtcagaatcatcagggaaaggttgaggattgcccagtctcgacagaagagctacgcggataaccgtcgaagggagctcacttttgaggcaggagattacatgtatcttcgtgtcactccgctccggggagtacaccgttttcagaccaaaggcaagttggcaccacgcttcgtgggaccatacaaaatcctggaacgaaggggggaagttgcttatcagctagaacttccatccaacatgatcggcatccatgacgtgttccacgtgtcccaactaaagaagtgcttaagggtacctgaagaatag

SEQ ID NO: 98191 - DNA, 358 bp, Oryza sativa
  Clone ID: PAT_MRT4530_9611C.1
tacacggtgtacctcagcggctgaagcagaatctttagcatgtttagaagggctaaaagaagcaatgaagtggatttagatgccaattattctggaactagacaacgctgaagttgttcaggcattaacaaagcaggtggcttcaagctcctcttgggcgatgacgattgcataaatcaatgatgtgatacaatgtatccaacaggtgcaggttacaagattaagagagaagcaaatattaagagagaagcaaatagggttgctcatgtattagcacaaatggcaatgagtactaggtcgtgtggggagtggaggttgtgcgctcccgcatcaatcctagacttgttaagccaggaat

SEQ ID NO: 98192 - DNA, 2212 bp, Oryza sativa
  Clone ID: PAT_MRT4530_96120C.1
tagatgaggaacctactgctgctgccgctgctcgtggcggtggcggcgacggtgcccttggcggcggcgctgtcggccgacggggtggcgctgctggcgttcaagacggcggtgaccgacgacccgtcgggggcgctgtcgtcgtggtcggacgccgacgacgacccgtgccggtgggccggcgtgacgtgcgccaacacgtcgtcgtcggggccacgcgtcgtcggcgtcgccgtcgccgggaagaacctgtccgggtacgtgccgtccgtgctcggctcgctcgcgctcctccgccgcctcaacctgcacggcaaccgcctctccggcaccgtcccaccggcgctggcgaacgccacctcgctccactcgctcttcctctacggcaacagcctcaccggcggcctcccgccggagctctgcgacctgccgcgcctgcagaaccttgacctgtcggataactcgctcaccggcagcctcccgccggagctccggcggtgcaagcagctgcagcggctgatgctctccgggaacggattctccggcgagataccggccggcgtctggccggagatggtgagtttgcagctgctcgacctgtgcggataacatcggtcacgcggcggccatcccgccggagactcgggaaagctggctcgcgctcgccggcacgctgaatctctcgcggaaccacctctccggcggggtgccaccggagctcgggcatctcccggcgaccgtcaccctcgacctccgcttcaacaacctctccggcgagatcccgcagtccgggtcgctcgccagccagggccccaccgccttcctcaacaacccgggcctctgcggcttcccgctccaggtcccctgccgcgcggcgccgccgtcgtcgttcaccccgccgccgccgtacgccgccggctccatcagcggcgccggcgggccgcgccagccggtcaagaccagcctcatcgtgctcatctcggtcgccgacgccgccggagtagcgctcatcggcgtcatcgtggtctacatctactggaagctccgcgaccgccgcggcgacggctgcggcggcgacggcgacgacgacgaggaaaggaagcgaggcctcttccccttcccgtgcatgcgcgccgacgactcgtcggacgacgggtcggacgccggcgacgacggcggcggcggcggcgaggaggggcagctggtggcgatcgacaaggggttcaagatggagctggacgagctgctgcgttcgtcggcgtacgtgctggggaagggcgggaaggggatcgtgtacaaggtggtggtcggcaacggcacgacgccggtggccgtgcggcggctgggcggcggcgcggcggcggcggagaggtacaaggagttcgcggcggaggcgggggccatcggccgcgtccgccaccccaacgtggtgcgcctgcgcgcctactactggtccgccgacgagaagctcgtcgtcaccgacttcgtcaacaacggcaacctcgccacggcgctgcggggtgagcacacaccttcccctgcggcgacgctgtcgtggtcggtgcggctgcggatcgccaagggcgcggcgcgcgggctggcgcacctccacgagtgcagcccgcggcggttcgtccacggcgaggtcaagccatccaacgtcctcctcgacgccgactacaacgccgtcctcgccgacttcggcctcgcccgcctcctcaccatcgccggctgcgccgacccttcctccgcctcgggcggcggcctcatgggctgcgcgctcccaccctacgccgtcaagcccgcctccgccgccgcggaccaccaccaccgccccagcgcgtaccgcgccccggaggcccgcgccgtgggcgcgcgccccagccagaagtccgacgtctactccttcggcgtcgtgctgctggagctgctcaccgggcgcccgccggagcaccacgcctcgccgtccgcgtcgacctcctcgtccgcgtcggcggtgccggaggtggtgaggtgggtgcggcaggggttcgaggacgcgcggccgctgtcggagctggccgacgcgggggtgctgcgcgacggcggcgcgcggaaggaggtggtggcggcgttccacgtggctctcgggtgcgtggaggcggacccggagcggcggccgcggatgaaggccgtcgccgagagcctcgacaagattgggtcgtgaggaaag

SEQ ID NO: 98193 - DNA, 3732 bp, Oryza sativa
  Clone ID: PAT_MRT4530_96121C.1
atggtctacaccaggaatggtagccgcgcaacaggcgagggcagcaacggcgaagagcgcactgagggtgtgcatcccaacagcaattccgacaatggtccgccaccacttcccgagaatccgacgctagcccaagtgatggcacatcagactcaaatgatggcagccatgatgcagcagatgcagcagcagcaccagcagatgcaccagcggatgctgcagcatgccgaacagcagcatcagcagtttggtccccctccccctcagtccaaattgccagagtttctacgtgtcaggccacctactttctccagcaccaccaaccctatggaggcgaatgactggctccatgccatagagaagaagctgaatctcctgcagtgcaatgatcaggagaaggttgctttcgccacacaccagcttcaaggtcctgcgtcagcttggtgggacaatcacatggccacccgcccgccaggcactgaagtcacttgggcagagttctgtcatagcttcaggaaggcgcaggtgccagatggggtcgtggcacaaaagaagagagaattccgagcactgcaccaaggcaacaggacggtgacggagtatctccatgagttcaatcacctcgcgcgatatgcaccggaggatgtccgtactgacgccgagaagcaggaaaaattcctagcaggtctggatgatgagctaaccaaccagttgatatctggagattacgccgatttcgaaaggctggtagacaagacaatccgtcaggaggatcaacgcaacaagatggacaggaagaggaaggccgctcagttcagggcacctcagggaagtcaccagaggccgcgcttcgctcccgagcagcagggtggacctaccaccatgatcgtccgccagtaccgcccgttcaaccctagcaactttccccagggcgcaagtggcagtcagaaccaccatggaggtcagcccaaccgcggtgcagctccgctcccaccaatggcaccggcacagtcaggcccgtccgcgcaagccaaggaggagactggagcaaaaccagggtcctgcttcaactgtggcgagcttggccacttcgctgacaaatgcccgaagcctaggcgtgccgggccaaggtttatccaggctcgtgtcaaccacgcatctgcgaaggaggcacaagcagcaccagaggttgtactgggtacgtttcctgttaactcaatccctgcaacagtactttttgattctggtgcaacgcattcgttcatttcaaagaagtttgtcgggatgcatgggttaataagagaggaacttagcacaccaatgcgggttcataccccagggaatagctccacttcggttcaattcagcccttctataacaatagaaattcaaagatcaccatttctagccaacctcattcttctcgaatccaaagacctagatgtcattcttgggatggattggctgaccaagtttaagggagtcatcgattgttcgaatcgcacagtcaccttgaccaacgagaagggagaaacagtagtgtacaaatcaccagactcaccaaagcaagggatctctttgaatcagattgaggcggaaatcccagtggacaccgtggagaagaatttgaggaaattggaagatatacccatagtctgcgagtatccagaaatgttccccgaagaccttactaccatgccacccaagagagagattgaattccggattgacttggcaccgggaatcgctccaatttacaagagaccgtacagaatggcggccaacgaactagcagaggtcaagaagcaggttgatgagcagctgcagaaaggagctaaagtgttttctaagatagatctgcgatcaggctaccaccagttgagaattcgggaagaggatattccaaagacggccttcaccactcggtacgggctatatgagtgcacggttatgtctttcggacttaccaatgcacccgcattcttcatgaatctgatgaacaaagtgttcatggaatttctggacaagtttgttgtggtattcatcgacgacatacttatctattcaaagtccgaagaagaacatgagcaacatctccgtctggtactcgagaagttgaaggagcaccagctatacgccaagttcacttctggttattaccgccgattcatcgaaaacttctccaggatcgcccgacccatgactcagctgcttaagaaagatgagaagtttaaatggacagctgagtgcgataagagttttgaggagctcaagaagaaattagtatccgcactagttttgattctgcccgaccaaatgaaacacttccaagtctattgcgatgcatgtcgtcacggacttggatgtgtcctaatgcaagagggcagagtggttgcgtatgtctcgcggcagttgcgtccacacgaagggaattatccaactcatgacctggaattggcagcagtggttcatgctttgaagatctggaggcactatctgattggcaaccgctgcgaagtatatacggaccataagagtctgaaatacatcttcacccaaccggacctaaatctccgacaacgaagatggttggaactaatcaaagactatgacatcagcattcactaccacccgggtaaagccaatgtggtggcagacgcattaagcaggaaaagttactgcactgccctatgcatcgagggcatgtgtgaggaattgcggcaggagtttgagcatctcaacgtgggaattgttgaacacgggttcgtagccgctctggaggcacggcctacgctcgtggatcaagtcagagcagctcaagtaaatgattctgaaatagcagagctgaaaaagaacatgagagtcggaaaagcccgggatttccacgaagatgaacacggcataatctggttgggagaaagattgtgtgtacctgacgacaaggaactgaaggatctgatactcaccgaggctcatcagacccagtactccattcatccaggcagcaccaaaatgtatcaagacctcaaagaaaagttttggtgggtcagcatgacgagagaaatagctgaattcgtcgcactctgcgatgtttgccaacgagtgaaggcagagcaccaaagaccagcagtacataccacgtatacgggcaaaaggttggcggagctctacctctcgagaatcatgtgtctacatggagtacccaaaaagattgtatctgatcgagggagtcagttcacctcaaaattctggcagaagctgcaggaagaattggggacccgtttaaatttcagcacggcctatcacccgcaaactgatggtcagaccgagcgagtcaatcaaatctgggaagatatgttgagagcttgcgctcttgattttggtggagcttgggacaaaaacttgccatatgcggaattctcgtacaacaacaactaccaggccagtctacagatggcaccgtttgaagctttatacggccggaagtgccacacacctctcttctgggatcagacaggcgagcgtcaactattcgggacagaggtattagcggaagcagaagagaaagtcagaatcatcagggaaaggttgaggattgcccagtctcgacagaagagctacgcggataacccccgaagggagctcacttttgaggcaggagattacgtgtatcttcatgtcactccactcgagtttcgtcgccggaattcgcatcccctcgcgctccggtga

SEQ ID NO: 98194 - DNA, 673 bp, Oryza sativa
  unsure (1)..(673): unsure at all n locations
  Clone ID: PAT_MRT4530_96122C.1
ccggccgggaccaaccagcaaccctaaatccctaatccggttcctaccattcccaaatcccaatcccatctcccctccgccgcttttgctcccgccgtccgtcccggagccgcctctctccggccgccgccgccgccgccgctgcctctcgtgacgtgagggatgagtcaaactcagtgctccaaagttgtgcgtggcagaggcaggaacaaaaggaaatggacagccgatgaagatgaggagcttgtcaaagcattgtgcgaggtttctcttgatcctagatttaaggtcgaaggagggggattcaagaactgttattctcaagggatagagaacattcttgcgcaaaggctgccaggccgtggtattagatccagtcctcatgtcgattctcggttaaaagtgctgaagaggaagtattatgcgatcaaagatatgttagcgttgcccaggttctcgtgggacggcatgcggaagatgattcagtgtgaaaaagagtatatgatgctcattgcanagatcatcctagagccaagagtttgtatggtatcccatttccatattttgatacatttgatgtaatatatggcaaggacagaacaggcagagaggaggagggaatgtccgatgaagtggttgctgacatggagaatgaaaacacagacnaggtcgg

SEQ ID NO: 98195 - DNA, 122 bp, Oryza sativa
  Clone ID: PAT_MRT4530_96123C.1
tcgtaggacaggctggccagtccaagaagcagtggactatttcaaggcgatcgccacgcccgacgggcttttcagaaacgcctacaacctcattggaagggctgggaccaagctgttgggat

SEQ ID NO: 98196 - DNA, 2508 bp, Oryza sativa
  Clone ID: PAT_MRT4530_96124C.1
atgccccccccccccccccccgcgtctgccactgccaaagacgtcgagcgcgtcattgccgacgagttcggcctacgcgcaggagagcttgctgtgtcactccactatccggaggccttcctcctcaagttcaagcaccgccggcattgcgaggaggtggtaaagcagggcttcgccaagggccgagaatcggtggaaaccgacctcgtccaccctgttgacgccggcgacacgagggtgatctcgctctgggcatggactccaaacccgagccgcatccacaagcgcgtgtgggtgacaatcacgcgccaaacccgtgatccactcctcgagtcgatcacgatctcggagacgctgccggagcattggcaacaagaggtcaagcacccggttctcttccatattgaggagatccacgactacaccgcggcggctgtcgacctccgcaacccgaagtcctgcaggccggcgacgcgcaccctgccgccgtggcacctaggggttcttgacggcgagcgagccccgccgcgcctcttcgagaacttcccctaccacccgcatccgccgcggaccttcaccttccgccaaggtcgcgcggagggcgtggagaacaacaccgccgccttccagagggaggttcgcgaccaaggtagcagaacggtgagggacgccattggccgagacggcggaagaaggcaagagaaggggcaccgcgacaggcgccgggatgaccgcgatgaccgtcgcgggcgcaacaggaggtataacagcgaccacccagatgacctccgacgtggaggacggcgcgacgacgacaatgatgatcgcgacaacgggggacgtgatgtcgcgcacggaaggggcggcgttcgcggcccagacgtcaacttcaggcgggaacgcacgcactcgccgcgtgcccgcgatcgcggcgacacgggaagacgcgacgggcaacgccatcaagcaaactgcggcggcaaggacgacggggccaacgaccgcgacatgggcaacccacccccagcggtcctcaaccctgtcatgatggcaccggcgcgggtcatccagccgagtttgcccccacgcaacaaggggcctctcctcccgctgcgacgccctcgcgtcgaaaaggggaatgaagcccggtccgccgcgacgatcccggcggcgcgggtcttcacccgcatcaacgaggagatcactgccgcctcggtggagggggcattgcggcaaatactcgtggcggccggcgtggcggtggcgctcgacaaactaaccgcaccgccctccgcaactccttcactgctggaagatcaagtgcggcccatgactccgacggcatcgctgacggcaaatgacgcgcccacaaagaagcagctgccagccctgagcgcagagtacaacgctgtgacgtccctgttcgaggcgatgtcggtgaacaagccattgtcgccggaaccgctgcatcaggcaacgccgacgccgctcactcccacgacgatggatggagatgatgaagtaatcttcgaatccgcccagatcaacctctgccaacgcatgggactggcaccgccagagggggccctcactgagaaggcgatcgccgacttcaaggcgatgtttaacatgcctctgccgcaagacgccattgatgccctcgcgcagctgttcggcctcgacaaggaagacatgaaggcagcggactcagccctggcaatgaacgacccttccttggctcagaacgtgacggcgaactccaacgcctccccgaccgccatgatctccagccagctcggccgcacagccaccgactcgccgtggggctcggcgacgatcaccatgtacgccgccgacgcggcgccgacgttcctcaccctcttcgtcatgttcaagccggcaacaagaccgctaggaacaagaggtggcatcctgatcctttggaatgatgattttgtcgacctcaaagatttcgcgcaacgaaccttctcactctcggccacagtcttcttaaaagcttgccaaacatccttccttctcacggttgtctacgggccaaccagagatagtgcaaagcaagccttcctgagacaactacgcgacaccaagccagccgacaattcaaaatggcaagtgctcggagattttaatataatctacaaggctttagacaaaaacaacatcaacctcaaccgcaggcagatgcgaattttcaaagataccctcaacgcttgcgaactcaaggagatcgcacttcagaatagacgctacacctggagcaacgaacaagataacccgaccctggtcaagctggatcgtttcttttgcaatgcaagctggaacacaacctttgagagacacctactgcatgccctctctacctcactctctgaccattgccctttgatgctaacggggcaaggagagactccacgaacgagaacattccgtttcgagaatttctggattcagctcccaggcttccaagaggtcgtagcagaagcctga

SEQ ID NO: 98197 - DNA, 343 bp, Oryza sativa
  Clone ID: PAT_MRT4530_96125C.1
ttcacttattataatgtgccttcgatccacaaaagctcatgtcattcgtcgttctctaccatccttgtttcatccgagctttcacttctacaaggttgtgtgttctcctacgggatccatagaacggtatttcgtgatgcgtcacccacagccttcctctagagtgtattttgcagctcctgtcgattttcgatctgcagagataatcccaatatgtagcacttccagcctttttttactgttaagtttatattcagttcaagcaattcccattgtgtgaattcagttcaagcaattcccattgtgtgaatatacttcagttgttaaaaaaaaaaaaaaaaaa

SEQ ID NO: 98198 - DNA, 350 bp, Oryza sativa
  unsure (1)..(350): unsure at all n locations
  Clone ID: PAT_MRT4530_96126C.1
ctgtagattggttgttacaatgaacaggccatgtcccttatataggggttggtcttgccctctacaggccctcctccatgtccaactcggggtagaaaccaaaggaaacccgaaacatgccttcccaagcaaggaaacctcgagacccgacgaaacacagtcggactcggacctgccggtcagaccggccacacaccgntggtntgaccggccctcaaccggcggtctgaccgcccaacacacggcggtcagaccggcctacttgaaggaaacccgtcactttccaaactttggcaattttcccctatttcgtccatagtcatatgtgtcacatgcatagattccaataa

SEQ ID NO: 98199 - DNA, 681 bp, Oryza sativa
  Clone ID: PAT_MRT4530_96127C.1
tcacactttgaggtagcggagatccttcttgtagaggtcgtcgtctggtcgtagatcaccaccagccgacttgagcaatcccctctctagccatggttggagcggatcttcggcgctgtactcgtcgattgcctcgatcattttccttaatttattggagccaaccccataatttattgggcctcggccaaccccacctggggcggatgtatcatttggtatcaaagctgggccctcagccaaccccacctgggcccagtagcgtgctattgccaatttgccatctcctgtgccgccgccgtcgtcatctccttcatatcgagggtcaacagcttgtccatcactgtaccacctcaccaccgcagcatcatcagcaaacaccaccaccgattcagcttcagcaccacataataccaatgatgccacagtcccagctccaactatcaaaagtacattgttctttacttgcagatcagaatataaggtgaactcgtttctctctaagtctatgcgtgaaatatatgagaatttgatgctacataatattttgcacttgattactttcagacatgagagatttggaccattggctggcataaacaacatggggtccagccgaaggtgacgggtgtagcagcgcacatgtggaagatcggatgctattctgttcgtgaagttcat

SEQ ID NO: 98200 - DNA, 607 bp, Oryza sativa
  Clone ID: PAT_MRT4530_96128C.1
ttaatttttctcagggttggcttcgattcctcgtccggagactagaaaaccgagtagctttcctgagggtactccaaatgtgcaattctccggctttagcttcagctgatgtcgtcggagattgttgaacatttcctctaggtcatccatcagtgtgtctcccgtctttgtcttgacgacaacatcgtcgatgtatgcctcaacgttttgtccgatctgatcaccaagagctccctggatctcgcgcttgttgagatcggtgaagtccacacacattctccacttttccattggctttgcacaccatgactgggttagcgagccactctggatggagaacttctttgatgaagccagctttgagaagtttgtcgagctcttctcgtatggcctgtttccgatcgggtgcgaatctccgcagtttttgcttaattggcttggcatcgggtcgcaccatgagtttgtgctcaatcacctccctggggactcccggagagacgaaagcgttatctttgatctcgccgggcacacattcgaggaggaaggctaccctgctgtcgactacgagtcagaccttcgaaccgtcatgtcgacaacagttagatag

SEQ ID NO: 98201 - DNA, 148 bp, Oryza sativa
  Clone ID: PAT_MRT4530_96129C.1
ccgggtcgcccacgcgtccgacttattcaggacactgactaccggggcggagagataagattgaagccttcgtgtggatgatgaggagcctgtgaggtcctgctggtccacttgcgattgttatgagctgtcttgaggttcattcgtc

SEQ ID NO: 98202 - DNA, 750 bp, Oryza sativa
  Clone ID: PAT_MRT4530_9612C.1
ttttctcgccatgaacctggtgttactcatgtcttagtaacaggaggagctggctatattgggtcacatgcttcattacgcctgttaaaggacaattatcgagttaccattgtggacaatctttctagaggaaacatgggagcagtaaaggttctccaagagttgttcccccagccaggaagacttcagtttatctatgctgatcttggagatcaaaaaactgtactatcacaatattacatcgaacaccttattgattttggaggctatgcgtctcatggagtcaagacccttatttactctagtacatgtgccacctatggagaaccagagaagatgcctattgtagaaaccacacgtcagttaccaattaatccctatggaaaagctaagaaaatggcggaggacatcatactagatttcacgaaggggagaaaggacatggctgtgatgattttaagatatttcaatgttattggatcagacccagagggaagactaggtgaagctcctagacctgaactacgagagcatggaaggatatccggggcatgctttgatgctgcgttaggaatcattccagggctgaaggttaaaggaacagattatcctacaactgatggaacctgcataagagactacattgatgtcacagatcttgttgatgctcatgtgaaagcactcaacaaggcagagccaagtaaagttggcatttacaatgttggcactggaagagttcgctcatgctag

SEQ ID NO: 98203 - DNA, 537 bp, Oryza sativa
  Clone ID: PAT_MRT4530_96130C.1
atggaacaacacgacaacgccctcaagaggggaagtgacacccgaaacgccattgttgccgccatacaaaaccaggatagcgccgccgaagcctcccctgcaagccagtggcgccagccttccactaccgtcggtgctgtccacacaactactgtctccgccgcacctccacagctggctgtcgatgccgacctcccgctgcaccatcaacggcctcccgccgtcaacacctccggccgcaccgccgaactccatcatcaacgactccaaccacaccgtgatgcgccatcctcacgctcccgtcacgccgcacgtggtttgctgggggcgctgggggggcggtgccagatccgccaccccacgccggggaagcagtcggccgccgcgtcccacccatcgcgcgccattacgccagacgtcgccccctctcccaacgcgttccactccacctcccgcatcgaggaggagcaacgccggctcggtttccccgccgccgccttcccagcccgccgcgcggtttccggcagcgggctctag

SEQ ID NO: 98204 - DNA, 306 bp, Oryza sativa
  Clone ID: PAT_MRT4530_96131C.1
gaggtaactatttatgtacacttagattgtctacatcatacttttatacactgtcagtagccaatttgcccaggaggtagcgatttaccagtaaaggcaaaaagaacacaaactaatgaactcctaaaggaaataccttggatgatcggtatactcttttcggtgtacaattggattagtttggatttacagtttaattttacaaaactgtgtcatacatcgttgtattgggggctcttgttaaaaatgcctagaccttcaaaactaaaaggtagagagaaccttttatcaaaaactactggtata

SEQ ID NO: 98205 - DNA, 210 bp, Oryza sativa
  Clone ID: PAT_MRT4530_96132C.1
gcacgagggctttcgagctcgcagaggagaagagaccggatcaacgagaagatgcgggcgctgcaagagctcatcccaaactgcaacaagattgacaaggcgtcgatgctggaggaagccatcgagtacctcaagacgctgcagctgcaggtgcagatgatgtcgatggggacggggatgttcgtgccgccgatgatgctgccggcggcg

SEQ ID NO: 98206 - DNA, 416 bp, Oryza sativa
  unsure (1)..(416): unsure at all n locations
  Clone ID: PAT_MRT4530_96133C.1
ccggccgggaacaccaacccaacggccgatgtcatcactgcctcaaccaacaggtaacggtgctgagagctggaggagagcggctgaggtgacgagtcagctgaaggctcgaattgaacagatgaaggcaaagcaaggactcgctcgaccttagaattgtcaagaaaaaattgtgcgatgagtttttactacaatacttttaatgatgatgatgctttgggaggttcatcgcggaaaagctgggatgggtattctgggacagagacagacggccccagtccggttgcatcttgacggcgttagaacttgtgccaccatctgctttgcttcgcttcaaggggtctgatagaattatacatgggccacggctgtcttgggattgtacggagcantgcccgcggcgggtcagagatacc

SEQ ID NO: 98207 - DNA, 783 bp, Oryza sativa
  Clone ID: PAT_MRT4530_96134C.1
gggcggcggatgcgccgtcctgttgcgctacctccatccctcccggtgcgccgcttccgctgctccccctcccctccacgctgtgcttccttccttcctcctctgcacctcttctttcccatcgtttagagtcagcgagtcatgatggaatcgatacagcctgatggtgtttgtcctgcatcccagcccttgcctcggcatggatttgggccttgctgccgccgcaagttgcatgcattcgattcaaaaaaaaagttgccagcgttgattcattaccagcatgagggcctgcgctgcgctggtttactgctccttcatcatcatcgtccaaagcaccatcagcgaccagggagtaatatttggtgaatatgtcagcgagttttcttgcagcaatggaactttcctgcagccacctttatgtgcttctgtttggaggtatgaatgttttcttattgtcttctcttggtgatatatgtggccttcagatttcttatcacatatttttagtttttgtttcatgatagcatataatgtttatactatgagtaggttttgcctcaatttccttcccaatgcaacaaatcatattttatttttgaatttgttgagctcgatatttttacacacagtagaaataaacatgcattgataatatcctttgtagaccatattatattggtaatagtgatgcatacgtcataaaaaaaatatctgtagacctggcaacttggcatatgacccctaaatttggatcgtgcagttctttttctaagaaacaaacca

SEQ ID NO: 98208 - DNA, 513 bp, Oryza sativa
  Clone ID: PAT_MRT4530_96135C.1
cccacgcgtccgatgccacatgttttgcatagtgattatttggtggaattagttttcagtctttttttgcaaagtctgtaattgaccctttgtccatttttcataggctaatgagttctcaagtagaatacagaggctacctaacaacagtgctgcagctgaacgtgactctggaatgccaaggttttggttaagctgatgatccaatcctggatggacatttgcatcttgttctgatcgaagccagtaaacatgctatttttcggtggatgtgttgccccccagcaaaagtttcactgttcctctcattcaagtacatgatgtaccgaactgatgttattcgttgggattttaactgctgatgttaacaatgccttgtaacagtcgcgtacattggcttcagcatccagtgaactgtttcaactctaaacatgctatttttcggtggatgtgttgccccccagcaaaagtttcactgttcctctcattcaagtacatgatgtaccgaactga

SEQ ID NO: 98209 - DNA, 3534 bp, Oryza sativa
  Clone ID: PAT_MRT4530_96136C.1
atgatcgtccgccaacatcgccctttcaactcgagcagcttccaccagggcgctagtggcagccagaaccaccagggaggtcagcccaaccgcagtgcagctccacgcccaccattggcaccagcacagtcagctccatcagcccaagccaagaaggagactggagcaaagccaggatcctgcttcaactgtggcgagcatggccactttgctgacaaatgcccgaagccaaggcgtgccgggccaaggtttgcccaggctcgtgtcaaccacgcgtccgcagaagaggcgcaagtagcaccagaggtcgtactgggtacgtttcctgttaactcaatccctacaacagtacttttcgattctggtgcaacgcattcgttcattggaaagaagtttgttgggatacatgggttaataagggaagaacttagtacaccaatgcgggttcataccctagggaatagctccacttcggttcaattcagcccttctataacaatagaaatccaaagatcaccatttctagccaacctcattcttctcgaatccaaagacctagatatcaatcttgggatggattggctaaccaagttcaagggtgtcattgattgtgtgaatcgcacagtcaccttgaccaatgagaagggagaaacagtagtgtacaaatctccagtctcaccaaagcagggggtctccttgaatcagattgaggtggaaattccagtggtcaccgaggagaagagttcgaggaagttggaagatatccccatagtctgcaagtatccagaagtgttccccgaggacctcactaccatgccacccaagagagagattgaattccggattgatttggcaccgggaactgctccaatttacataagaccgtacagaatggcagccaacgagctagcagaggtcaagaagcaggttgatgagcagctgcagaaagggtacattcgaccgagtacttcactttggggtgctccagtcatttttgtggagaagaaggacaagacgaagagaatgtgtgtcgattatcgcacactcaatgaggtcactttcaagaacaaatacccgttgccgcggattgatgatctgttcaatcagctgaaaggagccaaggtgttttccataatagacctgcgatcaggctacaaccagttgaggatttgggaagaggatattcccaagtcagcctttaccacttggtatgggttgtatgagtgcacggttatatcttttggacttaccaatgcacctgcattcttcatgaacctgatgaacaaagtgttcatggaatttctcgataagtttgttgtggtattcattgacgacatacttatctattcaaagtctgaagaagaacatgagcaacatctccttctagtactcgagaagttgaaggagcaccagttatatgccaagttcagttattaccgtcggttcattgaaaatttctccaggatcgctagacccatgactcagttgcttaagaaagatgagaaatttaaatggacggccgagtgtgacaagagttttgaggagctcaagaagagattagtgtctgctccagttctgattctgcccgaccaaacaaaggacttccaagtctattgcgacgcgtcccgccacgggcttggatgtgttctaatgcaagacggcagagtggtcgcttatgcctcgcggcagttgcgtccacatgaagggaactatccaacacatgacctggaattggcagcggtggttcatgctttgaaaatctggaggcaatatctgattggcaaccactgcgaagtatatatagatcacaagagtctgaaatatatcttcacccaacctgatctaaatctccgacagcgaagatggttggagttaatcaaagattatgacatgagcattcactaccatccaggcaaagccaatgtggtggcagatgcattaagcaggaagagctactacaatgctttatgcaccgaaggcatgtgtaaggaattgcagcaagagcttgaacgtctcaacatgggaatcgtagaacacgggttcgtagctgctctagaggcacgtcctacgctcgtggatcaagtcagagcagctcaagtaaatgatcctgagatagctgaactgaaaaagaatatgtgggttggaaaagcccgggatttccttgaagatgaacatggcacaatctgcatgggagaaagattgtgtgtgcctgatgacaaagagctaaaagatctgatactcactgaggctcatcaaactcaatactccattcatcggggtagtaccaagatgtaccaagatctcaaagaaaatttttggtgggccagcatgaggagggaaatagctgaattcgtcgcgctctgcgatgtttgtcagcgagttaaagcagaacatcagaggcccgcaggattgttacaacctcttcagatcccggaatggaaatgggaagaaattgggatagatttcataacaggtctgcccaggacatcatcgggccacgattcaatctgggtggtcgtggatcgacttaccaaagttgctcatttcattcctgtgcatactacatatacaggcaaaaggttggcagagctctatctctcgagaatcatgtgtctgcatggagtacccaaaaagatagtatctgatcgagggagccaattcacttcaaagttctggcagaaattgcaagaggaattgggaacccggctgaacttcagcacagcctaccatccgcagaccgatggtcagaccgagcgggtcaatcaaatattggaggatatgttaagggcttgtgcgcttgattttagtggagcatgggacaaaagcttgccgtatgcggagttctcctacaacaacagctatcaggccagtctacaaatggcaccgttcgaagcgttgtatggccggaagtgccgcacacctctcttctgggatcaaataggcgaaagtcaactgttcggaacagaagtgttaacggaagcagaagagaaagtcagaaccgtcagagagaggctgagaattgcccagtctcgacagaagagctatgcggacaaccgccgaagggagctcacttttgaagcaggggattacgtgtactttcgtgttactccgctccggggagtacaccgtttccaaacgaaaggcaagttggcaccacgcttcgtgggaccatacaaaatcttggaacgaagaggagaagttgcttatcagctagaacttccacccaaaatgatcagtatccatgacgtgttccatgtgtcccagttaaagaagtgtttgagggtacccgaagaacaagccgattcggaggagcacatcgacattcaagaagatctaacctatgtggaaaagccagtttgtattcttgagaccagtgaaagaagaaccagaaacaaggtcactaggttctgccgggttcaatggagccaccactcagaagaagaagcaacctgggaaagggaagatgagttgaaggccgcccatccgcacctcttcaccggctcttccgaatctcggggtcgagattccgtttaa

SEQ ID NO: 98210 - DNA, 451 bp, Oryza sativa
  Clone ID: PAT_MRT4530_96137C.1
cggagaccgaacccagggaaattttaatcaacaatgggagaagaacaaaaccggagaaggttcaactagtaatcgggggtcccgaaaaaaacaacaagctttttttgtgaggcccctgaaaaaaataatacttattaacctaaaaaaaatactccccacttaacaatttttttttttttggcctttttttaccccccctttaatacttagccgcttggttatccttaaaaatgttccccagactttgggaattcccccccccgcctcacttgcattttggagggagaaaaccctgggcccttctttggttaaatttaaatgccccgggggggggcccgaacaaaaaaccctttttttttcaaaattcggggggcccccccaccccaaaaacgggtttgcctttggctcgcaaaaaacccttaatttttggggccccaagagaaaccccccc

SEQ ID NO: 98211 - DNA, 842 bp, Oryza sativa
  Clone ID: PAT_MRT4530_96138C.1
gaagaattggggacccgtttgaatttcagtacagcttaccatccgcagacagatggccaaaccgagagggtcaatcagatcttggaagacatgttgcgagcgtgtgcgctcgatttggtggggcatgggataaaagtctgccttatgctgaattctcgtacaacaacagctatcaggccagtctacaaatggcaccgttcgaagcgttgtatggccggaagtgccgcacgcctctcttctgggatcaaacaggcgaacatcaaatgttcggaacggaagtgctaacggaagcagaagagaaagtcagaaccgtcagagagagactgagaattgcccagtctcgacagaaaagctacgcggacaaccgccgaagggagctcacttttgaagcaggggattatgtgtacctccgtgttactctgctccggggagtgcatcgtttccagacgaaaggcaagttggcaccacgcttcgtgggaccgtacaaaatcttggaacgaagaggagaagttgcctatcagctagaacttccatccaacatgatcggcattcatgacgtgttccatgtgtcccagttaaagaagtgcttgagggtacccgaagaacaagccgattcggagcacattgacatccaagaagatctgacttatgtggaaaagccagttcgtatccttgagaccagtgaaagaaggactagaaacaaggtcaccaggttctacagggttcagtggagccatcactcagaaaaaaaagcaacctgggaaagggaagatgagttaaaggccgcccatccgcacctcttcgccagctcttccgaatctcggggtcgagattccgtttaa

SEQ ID NO: 98212 - DNA, 2171 bp, Oryza sativa
  Clone ID: PAT_MRT4530_96139C.1
agtcagttaccaagtggaccccacctaagaccgtgtcacagattcggagttttcttggacttgcgggttgttaccgtcggttcattgaaaatttctccaggattgccagacctatgacttagttgcttaagaaagacgagaaatttaaatagacggccgagtgtgacaagagttttgaggaactcaagaagagattagtgtctgctccagttctgattctgcccgaccaaacaaaggacttccaggtctactgtgatgcgtcccgccacgagcttggatgtgttctaatgcaagagggcagagtggtcgcttatgcctcgtggcagttgcgtccacatgaagggaactatccaacgcatgacctggaattggtagcggtggttcatgctttgaaaatctggaggcactatctgattggcaaccgctgcgaagtatacacggatcacaagagtctgaaatatatcttcacccaacctgatctaaatctccgacagcgaagatggttggaactaatcaaagattatgacatgagcattcactaccatccgggcaaagccaatgtggtggcatatgcattaagcaggaagagctactgcaatgccttatgcaccgaggacgtgtgtaaggaattgcagcaggagcttgaacggctcaacgtgggaatcgtagaacacgggttcgtagctgctctagaggcacggcctacgctcgtggatcaagtcagagcagctcaagtaaatgatccggagatagctgaactgaaaaaaaaatatgagggtcggaaaagcccgggactttcttgaggatgaacatggcacaatctggatgggagaaagattatgcgtgcctgatgacaaagagctgaaagatctgatactcaccgaggctcatcaagctcaatattccattcatctgggtagtaccaagatgtaccaagatctcaaagaaaaattttggtgggccaacatgaggagggaaatagctaaattcgtcacgctctgcgatgtctgtcagcgagtttaagcagaacaccagagacccgcaggattgttacaacctcttcagatcccggaatggaaatgggaagaaattaaaatggatttcataacaggtctgcccaggacatcatcgggccatgattcaatctgggtagtcgtggattgacttaccaaagttgcttatttcattccagtgcatacttcttatacgggcaaaaggttggcggagctctatctctcgagaatcatgtgtctgcatggagtagccaaaaagatagtatctgattgagggagccaattcacttcaaagttctggcagaaattgcaagaggaattgggaacccggctgaacttcaacacagcctaccacccgcagaccatcccgatggtcagaccgagcgggtcaatcaaatattggaggatatgttaagggcttgtgtgcttgattttggtggaacatggtacaaaagcttgccgtatgcggagttctcttacaacaacagctatcaggccagtctacaaatggcgccgttcgaagcgttgtatggccggaagtgccgcacacctctcttctgggatcaaacaggcgaacgtcaactgtttggaacagaagtgttaacggaagcagaagagaaagtcagaaccgtcagagagaggctgagaattgcccagtttcgacataagagctacgcggacaaccgccgaagggagctcacttttgaagcaggggattacgtgtaccttcgtgttactccgctccggggagtgcaccgtttccagacgaaaggcaagttagcaccacgcttcgtgggaccatacaaaatcttggaacgaagaggagaagttgcttatcagctagaacttccatccaacatgatcggcatccatgacgtgttccatgtgtcccagttaaagaagtgcttgagggtacccgaagaacaagccgattcggagcacatcgacattcaagaagatctgacttatgtggaaaagccggtttgtattcttgagaccagagaaagaagaaccagaaataaggttaccaggttgtacagggttcagtggagccaccactcagaagaagaggcaacttgggaaagggaagatgagttaaaggccgcccatccgcacctcttcgccagctcttccgaatctcggggtcgagattctgtt

SEQ ID NO: 98213 - DNA, 721 bp, Oryza sativa
  Clone ID: PAT_MRT4530_9613C.1
ccacgcgtccggagaaaggtgcccaacaacacccatccaagaaccccacaaaaggagaaaatttccattatttttattttttggggggagaaggagaagaaagaagaagtgcgtcgtcattctttgaggcaagaacagcaacaacagcaagaaccaaccacccccttcctcctcatcctcctcctcttgcttgttcttcttcctccggggcccatcgaatccaattatcctccacctcgatcgatcgcctctctctctctctctcttaccctggaattttggttcggatttagcccataaaaaatcctgcctcttgaggtcaacctgggactctttgatgctgggtttctagcggggacatggccgtggtggtgcctgcgaggctgttcgtcctccggatgctgcgtgtcgtcaggctcaaccctctccagcgcggtgccgcgagcgtcgtccaggatatttcttgaagcaccattcaaactgggaagccatattggttgatcatacagctggattggttgagctatccatttggctgatcaggtcagaacagtgaagagtcgcattgtatatgtccgttgagtcgactctccaatttttgacttggcgcacttgatgcgaagattgcaaaacactcacaggctggttacattccacggcaacggggggatcgtatatgatcaatgcaggcgtcttgtttttgattagcaagatggggagc

SEQ ID NO: 98214 - DNA, 358 bp, Oryza sativa
  Clone ID: PAT_MRT4530_96140C.1
atggcgaccatagcatccatgcatatgtatggcttctctcttcaaccacgcctgtgcagcaccggaggaaggccagccaagatcaccaggactaagcctttggcgactcatgattcctctgcgcacatcccacctcgtttcaaggagcttcagcaagtattgaaaaccaaacttagggaggcatctgctgcaggaagcagtgcttccaagaaattgctggatgcgtttgtggactctatcttcacattcagtcatcaatctttacgtcccaccgaggtagggcaggcaagcatgattgcatatacgttacacaaaatgcagcagcaatttattgctttgaacttcctataagcagagg

SEQ ID NO: 98215 - DNA, 292 bp, Oryza sativa
  Clone ID: PAT_MRT4530_96141C.1
tttcctctttgcccagatcgagcgaatccaatccaccggcgaatcgaatccgcgatggcgacccacccggcctccccggtcgccggcggcgagaaggccacgccgccctccacgccgccgccggtgcgcctggcggggggtgcggcggcggtgatccagtccaactcgccgcggttttctatctcctatgtgtgggcatgctaccatggaagctttttgtcttttccgacgtattgtcattagctatgccacggtatacttagagattaatggtcatctactcagtggtctt

SEQ ID NO: 98216 - DNA, 5196 bp, Oryza sativa
  Clone ID: PAT_MRT4530_96142C.1
atgggttgcaagatggctggccacccacccaaccaccgcggagaaggcatgatcgactttgtggcagagctggcacgcatgacactggtggtgggctaccccaacgcgccggagtacacgactattccgccgctcagtggcgagcttcctcaccgtgtccgcttggaggtccaaggttacgtggggacttgcctcgctaacatggcagttgaggcgtcaggtggcacagcagatcacgcctgtcaggaggcagcctacttgatgatggccagactacgagagcgccacaactacatcttccacgacacggcgtaccgctaccacccccgtcgagccaacggtgatggcgtcagctccttccgtccgacagctggcgagaacgacaccacctttggtcacatgtgtgctgtgatgaggggattggacaggatgcactcggacctgcacaaggcgaccaaggccttgaacgatgggaagctcatgaggatcgtcgctctgaaggacgagatagcgcgcctgaagaaggacaacgctcagctaaagggtcttccagcgccaggaggagtccggatccgcactacgccccgcaagactacgacggcacccgtgcgcatccagcttgcgcccaggaacccacctccagcagcagctcccgcagcacctccagttccgcccgcagttcctgcagctcaagctccagctcccgcgtccgctctctccttcgctccagcatcagccgccagaggtccagccagtggcaccggaggttgcttgtttgggatggtccacaccaggactggtagccgcgcaacaggcgagggcagcaacggcgaagaacgcgctaatggtgtgcaccccagcagtgattccggcaatggtccgccaccacttcccgagaatctgacgctagcccaagttatggcacatcagactcagatgatggcagccatgatgcagcagatgcagcagcagcaccagcagatgcaccagaggatgatgcagcacgccgaacagcagcaccagcagtttggtccccctccccctcagtccaagttgcctgagttcctacgtgtcaggccacccaccttctccagcaccaccaatcctatagaggcaaatgactggctccatgcgatagagaagaagctgaacctcctgcagtgcaatgatcaggagaaggtcgctttcgccacacaccagcttcagggtcctgcgtcagcctggtgggataatcacatggccacccgcccaccgggtactgaagtcacttgggcagagttctgccgtagcttcaggaaggcacaggtgccagatggggtcgtggcacaaaagaagagggaatttcgtgcactccatcagggcaacaggactgtgacagagtacctccacgagttcaatcgcctcgcgcgatatgcaccagaggatgtccgcaccgacgccgagaagcaggagaagttcatggcgggtttggatgatgagttgaccaaccaactgatatccggggactacgctgactttgagaggctgcaccgcccgttcaactccagcaacttccaccagggctctagtggcagtcagaaccaccatggaggtcagcccaaccgcggtgcagctccacgcccacccatggcaccggcacagtcaggcccgcccgcgcaagccaagaaggagacgggagcaaaaccagggtcctgcttcaactgtggtgaacttggccacttcgctgacaaatgcccgaagcccaggcgtgccgggccaaggtttatccaggctcgtgtcaaccacgcgtctgcagaggaggcacaaacagcaccggaggtcgtactgggtacgttccctgttaactcaatccctgcaacagtactttttgattctggtgcaacgcattctttcatttcaaagaaatttgtggggatgtatgggttaaggaaagaagagcttagcacaccaatgagggttcataccccgggaaatagttcaacctcagtcagttttagcccttcagtgctaatagaaatccaaagattaccatttctagccaacctcattcttcttgaatccaaagacctagatgtcattcttgggatggattggctgactaagttcaacggagtcatcgattgtgcgaatcgcacagtcaccttgaccaacgagaagggagaaacggtagtgtacaaatcactagccccgccaaagcaaggggtctccttgaaccagatcgagatggaagtcccagtggtcaccgaggagaagaatttgaagaaattggaagacatacccatagtctccgagtatccagaagtgttccctgaagacctcactaccatgccacccaagagggagattgaattccggattgacttggcaccgggaaccgctcccatttacaagagaccgtacagaatggcggccaacgaattagccgaggtcaagaagcaggttgatgagcagctgcagaaagggtacatccgaccaagtacttcaccttggggtgctccggtcatttttgtggagaaaaaggataagacgaagagaatgtgcgttgattatcgcgcactcaacgaggtcaccatcaagaacaaataccctttgccgcgaatcgatgatttgtttgatcaactgaaaggagctaaagtgttttctaagatagacctgcgatcaggctaccaccagttgagaatccgggaagaggatattccgaagacggccttcaccactcggtacgggctatatgagtgcacggttatgtctttcggacttaccaacgcacccgcattcttcatgaatctgatgaacaaagtgttcatggaatttctggacaagtttgttgtggtgttcatcgacgacattcttatctattcaaagtccgaggaggaagatgaacaacatctccatctagtactcgagaagttgaaggagcaccagctatacgccaagttcaacaagtgtgacttctggttgacggaagtaaaatttctgggtcatgtcattacagctcagggtgtggcagtcgacccatcgaacgtggagtcagttaccaaatggaccccacctaagaccgtgtcgcagattcggagttttcttggacttgcgggttattaccgccgattcatcgaaaatttctccagaatcgcccgacccatgactcagttgcttaagaaagatgagaagtttaaatggacagctgagtgcgataagagtttcgaggagctcaagaagaaattagtatccgcaccagttttgattctgcccgacccgacgaaagacttccaagtctattgtgatgcatcccgtcacggacttggatgtgtcctaatgcaagagggcagagtggttgcgtatgcctcgcggcagttgcgtccacacgaaggaaattatccaacgcatgacttggaattggcagcagtggttcatgctttgaagatctggaggcactatctgattggcaaccgctgcgaaatatatacggaccataagagtctgaaatacatcttcacccaaccggacctaaatctccggcaacgaagatggttggaactaatcaaagactatgacatgagtattcactaccacccgggtaaagccaatgtggtggcagacgctttaagccggaaaagttactgcactgccctatgcatcgagggcatgtgtgaggaattgcggcaggagtttgggcatctcaacgtgggaattgttgaacacgggttcgtagccgctctggaggcacggcctacgctcgtggatcaagttagagccgctcaagtaaatgatccggaaatagcagagctgaaaaagaacatgagagtcggaaaggctcgggatttccttgaggatgagcatggcacgatctggatgggagaaagattgtgtgtacctgacgacaaggaattgaaggatctgatactcaccgaggctcatcagacccagtactccattcacccaggcagcactaaaatgtatcaagacctcaaagaaaagttttggtgggtcagcatgaggagagaaatagctgaattcgtcgcactctgcgatgtttgccaacgagtgaaggcagagcaccaaagaccagcaggtttactccaacctcttcaaatcccggaatggaaatgggaggagattggaatggactttataacaggactgccccggacatcatcgggtcatgattcaatctgggtagtcgtggatcgactcaccaaggtggctcactttataccagtgcataccacctatacgggaaagagattggtagaattgtacctcgcaaggatcatgtgtttgcatggggtacccaagaagatagtatccgaccgaggtagtcagttcacctcaaaattctggcagaagctacaggaagaattggggacccgtttaaatttcagcacggcctatcacccgcaaactgatggtcagaccgagcgagtcaatcaaatcttggaagatatgttgagagcttgcgctcttgattttggtggagcttgggacaaaagcttgccatatgcagaattctcgtacaacaacagctaccaggccagtctacagatggcaccgtttgaagctttatacggtcggaagtgccgcacacctctcttctgggatcagacaggcgaacgtcaactgttcggaacagaggtattagcggaagcagaagagaaagtcataatcatcagggaaaggttgagaattgctcagtctcgacagaagagctacgcggataaccgtcgaagggagctcacttttgaggcaggagattacatgtatcttcgtgtcactccgctccgggaagtacaccgtttccagacaaaaggcaagttggcaccacgcttcgtgggaccatacaaaattttggaacgaaggggagaagttgcttatcagctagaacttccatccaacatgatcggcatccatgacgtgttccatgtgtcccaattaaagaagtgcttaagggtacctgaagaacaggctgattcggagcacattgatatccaagaggacctaacctatgtggagaagccggttcgtatacttgataccagcgaaagaagaaccagaaataaggtcaccaggttttgccgagttcagtggaatcatcattcagaagaggaagcaacctgggaaagggaagatgagttgaaagccgcccatccgcacctcttcaccagctcctccgaatctcggggccgagattccgtttaa

SEQ ID NO: 98217 - DNA, 432 bp, Oryza sativa
  Clone ID: PAT_MRT4530_96143C.1
aacttgcatgacaattttattcggagaggaccaatgatggtgattaagctcgacgatgaccaaggatctttcacaccgagtttttcatggcaaatatatgatgatacctgaacttattttaaacttccaaacgagggtatggttcaaactgaggacaattcaccggcgagggtggcgatgctactcggggcgctataggccctcggggcgatgccatatcctgaaggctagttcaaagccaacctagcttgaggttgggcttgagccagattccgaccaaagtggagatcagtaaactgctggaattgtagattgtgggctatggcctgaacaatgttaatatcctggttgtgagactgttgggccaccagtctgagctgatgccagacttgggtggttctgagttgaaaatgcagctgattggaataaggg

SEQ ID NO: 98218 - DNA, 2844 bp, Oryza sativa
  Clone ID: PAT_MRT4530_96144C.1
atggtctacaccaggactggcacccgcacgataggcgagggcagcaacggcgaagaacgcactgatggtgtgcaccccagcagtgattccggcaatggtccgccaccacttcccgagaatccgacccttgcccaagttatggcacatcagactcagatgatggcagccatgatgcagcagatgcagcagcagcaccagcagatgcaccagaggatgatgcagcacgccgaacagcagcaccagcagtttggtccccctccccctcagtccaagttgcctgagttcctacgtgtcaggccacccaccttctccagcaccaccaaccctatggaggcaaatgactggctccatgcaatagagaagaagctgaatctcctgcagtgcaatgatcaggagaaggtcgcttttgccacacaccagcttcaaggtcctgcgtcggcttggtgggacaatcacatggccacccgcccaccgggtactgaagtcacatgggcagagttttgtcgtagcttcaggaaggcacaggtgccagatggggtcgtggcacaaaagaagagggaatttcgtgcactccatcagggcaataggactgtgacagagtacctccacgagttcaatcgcctcgcgcgatatgcaccagaggatgttcgcaccgacgccgagaagcaggaaaagttcatggcaggtctggatgacgagctgaccaaccaactgatatctggggactacgccgactttgagaggctagttgacaaggcaattcatcaggaggaccaacgcaacaagatggacaggaagaggaaggccgcacagttcagggcacctcagggaagtcaccagaggccgcgcttcactcccgggcagcagggtggacctaccaccatgatcgtccgccagtaccgcccgttcaatcctagcaactttcctcagggcgccagtggcagtcagaaccaccatggaggtcagcccaaccgcggtgcagctccacgcccaccaatggcaccggcacagtcaggcccgtccgcgcaagccaggaaggagactggagcaaaaccagggtcctgcttcaactgtggcgagcttggccacttcgctgacaaatgcccgaagcccaggcgtgccgggccaaggtttatccaggctcgtgtcaaccacgcatctgcggaggaggcacaagcagcaccagaggttgtactggtcaccctgaccaacgagaagggagaaaccgtggcgtacaaatcactagtctcaccaaagcaaggggtctctttgaatcagattgaagcagaaatcccagtggacaccgtggagaagaacttggggaaaatggaagatatacccatagtctgcgagtatccggaagtgttccccgaagacctcactaccatgccacccaagagagagattgaattccggattgacttggcaccgggaaccgccccaatttacaagagaccgtacagaatggcggccaacgaactagcagaggtcaagaagcaggttgatgagcagctgcagaaagggtacattcgaccaagtacttcaccttggggtgctccggtcatttttgtggagaaaaaggataagacgaagaggatgtgcgttgattatcgcgcactcaacgaggtcacaatcaagaacaaatatcccttgccgcgaatcgacgatttatttgatcaactgaaaggagctaaagtgttttctaagatagacctgcgatcaggctaccaccagttgagaattcgggaagaggatattccgaagacggccttcaccactcggtacgggctatatgagtgcacggttatgtccttcggacttactaacgcacctgcattcttcatgaatctgatgaacaaagtgttcatggaatttctggacaagtttgttgtggtgttcatcgacgacattcttatctattcaaagtccgaagaagaacatgaacaacatctccgtctagtactcgagaagttgaaggagcaccagctatacgccaagttcagcaagtgcgacttctggttgacggaggtcaaatttctgggccatgtcattacagcccagggtgtggcagttgatccgtcgaacgtagagtcagtcaccaagtggaccccaccgaagaccgtgtcgcagattcgaagttttctaggactggcagttggacaaccggacaccccggccgacccaactccatcacgcccaccctcgccaccggcgggccccacacgtcagcgggtcaagggtatcggtccaccgtggaccgggaccacggggtggtccaccgccggtccacgggaaccgacggcccagatcagcccaaagccgatcgggcggctgaggagggcggtggccgggcacgggcacagccggggctggcccgaccgaccacagagggcggcggcgcgcagacggccggacaaccggcggcggcggcggcgcaacgcggcgctggcacgggaggcggccggcaaagaggaaaaggaggagggaggcggctcaccgagaggcgcggcgacggagggaacggccgcggagggaggcggcggcgctccttgggtcgacgacgcggagggacgcacggcggtggatggcgagggcgaggaggcagacgaggtgcaacacacgacgacgaagccgacaaaggtgacggcaagcggcgaccgcggctatggcggtgatgattgccggccggaaacggtgaatggatgtggtggctcggcggtggacgacgtgcggcgtggagtggggatgccgacggcatgggttgcgcggcgcggcggtggcgctagcagcgacgaggtgcggctggaggcgacgaatgggtcggcggcctcgggtgcacggtga

SEQ ID NO: 98219 - DNA, 198 bp, Oryza sativa
  Clone ID: PAT_MRT4530_96145C.1
atgggcagtttatccggagacagtatgacatgggagcttcacccgaaggcccacccacccacgtcggcgaaagtggcaaacatggacgaggagactggcaccgaatcaccaggcccacctgtcagcggcgttggactgattgacctggacagaatgtggaggacttgtcagaccgtggggcctcgaagccaacggtaa

SEQ ID NO: 98220 - DNA, 4215 bp, Oryza sativa
  Clone ID: PAT_MRT4530_96146C.1
atggccgatcacccacccaaccatcgcggagaaggcatggatgattttgtggcagagttggctcgcatgacactggtggtgggctaccccaacgcgccagagtactcaactgttccgccgctcagtggtgagtttcctcaccgggttcgtctggaggttcatggctatgtgggtacctgcctcgctaacatggtggttgaggcatctggaggcaccgcagatcacgcctgtcaggaggcggcatacctgatgatggctagactacgtgagcgccacaactacatcttctgcaacacagcgtaccgtttccaccctcgtcgagcaagtggcgatgatatcagcactttctgtccgacagccggcgagaacgacaccaccttaggtcatatgtgtgccgtgatgaggggaatggacaagatgcactcggatgacgggaagctcatgaggatcatagctctgaaggatgagatcgcacgcctgaagaaggagaatgctcagttgaagggcctccccattcccggaggagtccggatccgcaacatgccccgcaagtcaacgactgcacccgtgcgcattcagcttgcgcccaggaacccacctccgcccgcagctcctgcagctcctccagttctgcccgcagttcccgcagctcgagcagctctagctccagtcccagctcctgccccagtgtcagctcccgcgtccgctctctccttcgctccagcatcagccgtcaggggcccagccagtggcaacgggggttggttgcctgctactcccagtggcagccgcaaccacatcagcagcagttcgagtggctcagagctgggccagattccaggagcagctcagagggacctggcctcttccttcagatggtctacaccaggaatggtagccgtacagcaggcgagggcagcaacggcgaagaatgcactgacggtgtgcatcccaacagcgactccagcaatggtccgctaccgctccccgagaatccggctctggcccaagtaatggctcatcagactcaagatgatggcagccatgatgcagcagatgcaccagaggatgcagcagcaagccgagcagcagcagcagcagtttggtccccctccccctcagtccaaactgccggagtttctacgcgtcaggccacccaccttctctagcaccaccaaccctatggaggcgaatgactggctccatgccatagagaagaagctaaatctcctgcagtgcaatgatcaggagaaggtcgcctttgccacacaccagctccagggtcccgcgtcagcttggtgggacaatcacatggctacccgcccgccaggcacggaagtcacttgggcagagttctgtcgcagcttcaggaaggcgcaggtgccagacggggttgtggcacagaagaagagggagttccgggcactccaccagggcaacaggacagtgactgagtatctccatgagttcaatcatctagcgcgatatgcaccggaggatgtccgcactgacgccgagaagcaggagaagttcctagcaggcctggatgacgagctaaccaaccagttaatctctggagactatgccgactttgagaagctggttgacaaagcaatccatcaggaggatcagcgcaacaaaatggacaggaagagaaaggcagcgcaattccagtccaaccaaggaagccaccaacgaccgcgcttcactcccggacagcagggtggacctaccactatgattgtccgccagcaccgcccgttcaactcaagcggtttccaccagggcgccagtggcagccagaaccaccagggaggtcagccccaaccgcaatgcagctccgcgcccaccaatggcaccagcacagtcagctccatccacccaagccaagaaggagactggaacaaagccagggtcctgctacaactgaggcgagcatggccactttgctaacaaatgcccgaagccaaggcgtcccgggccaaggtttgtccaggctcgtgtcaaccacgcgtccgcagaggaggcgcaagcagcaccagaggtcgtactgggtacgtttcctgttaactcaatccctgcaacagtactttttgattctggtgcaacgcattcgttcatttcaaggaagtttgttgggatacacgggttaataagagaagaacttagcacaccaatgcaggttcataccccagggaatagctccacttcggttcaattcagcccctctataacaatagaaattcaaagatcaccatttctagccaacctcattcttctcgaatccaaggacctagatgttattcttagaatggattggctgaccaagtttaagggtgtcattgattgtgtgaatcgcacagtcaccttgaccaatgagaagggagaaaccatggtgtacaagtcaccagtctcaccgaagcaaggaatctccttaaattagcatgaggtggaaaaccctgtggccaccgacgagaagagttcgcggaaattggaagatatccccgtagtctgcaagtatccagaagtgttccccgaagacctcactaccatgccacccaagagagagattgaattccggattgatttggcaccaggaaccgctccaatttacaagagaccgtaccgaatggcagccaacgagctagcagaggtcaagaagcaggtggatgagcagctgcagaaaggatacattcgaacaagtacttcaccttggggcgctccgatcatttttgtggagaagaaggacaagacgaagagaatgtgtgtcgattaccgcgcactcaataaggtcacaatcaagaacaaatatcctttaccgcggatcgatgatttgtttgatcagctgaaaggagctaaagtgttttctacgatagacctgcgatcaggctatcaccagttgagaattcgggaagaggatattcccaagacagccttcaccactcggtatgggttgtatgagtgcacggttatgtcttttggacataccaacgcacctgcattcttcatgaacctgatgaacaaggtgttcatggaatttctggataagtttgttgtggtattcattgatgacatactcatctattcaaaatctgaagaagaacatgagcaacatctccgtctggtactcgagaagttgaaggagcaccaattatatgccaagttcagcaagtgtgacttctggttgtcggaagtcaaatttctgggtcacgtcattacagctcagggcgtggcagtcgatctgtcgaatgtggagtcagttaccaagtggaccccacctaagaccgtgtcacagattcgaagttttcttggacttgcgggttattaccgtcggttcattgaaaatttctataggatcgccagacccatgactcagttgcttaagaaagatgagaaatttaaatggacagctgagtgtgaccagagttttgaggagcttaagaagaaattagtatccgccctagttctgattctgcccgaccagacgaaagacttccaagtctactgcgacgcgtcccgccacgggcttggatgtgttctaatgcaagagggcagagtggtcgcttatgcctcacggcagttgcgtccacatgaagggaattatccaactcatgacctggaattggcagcggtggtacatgctttgaagatctggaggcactatctgattggcaaccgctgcaaagtatatacggaccacaagagtcagaaatacatcttcacccaaccgaatctaaatctccgacaacaaagatggttggagctaatcaaagattatgacatgagcattcattaccatccgggtaaagccaatgtggtggcagatgcattaagcaggaagagctactgcaatgccctatgcaccgagggcatgtgtaaagaattgcagcaggaacttgaacgtctcaacatgggaatcgtagaacacgggttcggagccgctctagaggcacggcctacgcacgtggatcaagtcagagcagctcaagtgaatgatcccgagatagctgaactgaaaaagaatatgagggtcggaaaagcccgggactttcttgaggatgaacatggcacaatctggatgggagaaagattgtgcgtgcccgatgacagagagctgaaagatctgatacttactgagactcatcagactaaatattccattcatccgggtagcaccaagatatatcaagatctcaacgaaaagttttggtgggc

SEQ ID NO: 98221 - DNA, 305 bp, Oryza sativa
  Clone ID: PAT_MRT4530_96147C.1
acactctattttgagcctgacgccgcatgcgcgcgcacgcaagctcggatcctcctagtagaaggggccctccttttttttttttttttttttaaaagaaaggcaggtatctatacttctgagacattaggatgacagcctactctatatccaccttacagaagacgggaacctttactacacagatcctgagatattcctaacagtctaggaatataatgagatgtgctagaggaggctgttgtaaacaaacttctcgtatgacatgggaagagcattccctgcctagggcagtagataatgct

SEQ ID NO: 98222 - DNA, 4611 bp, Oryza sativa
  Clone ID: PAT_MRT4530_96148C.1
atggccggtcacccacccaaccaccgcggagaaggcatgatcgatttcgtggcagagttggcacgtatgacactggtggtgggctaccccaatgcgccggagtacacgacgattccgctgcttagtggcgagcttcctcaccgtgtccgcttggaggtccatggctacgtggggacttgcctcgctaacatggcggtcgaggcatctggaggcacagcagatcacgcctgtcaggaggcagcctacttgatgatggccagactacgggagcgccacaactacatcttccacgacacggcgtaccgctaccacccccgtcgagccaacggtgatggcgtcagctccttccgtccgacagctggcgagaacgacaccacctttggtcacatgtgtgctgtgatgaggggattggacaggatgcactcggacttgcacaaggcgaccaaggctttgaacgatgggaagctcatgaggatcgtcgctctgaaggacgagatagcgcgcctgaagaaggagaacgctcagctaaagggtcttccagcgccagaaggagtccggatccgcaccacgccccgcaagacgacgactgcacctgtgcgcatccagcttgcgcccaggaacccacctccagcagcagctcccgcagcacctccagttccgcccgcagttcctgcagctccagttccagctcccgcgttcactctctccttcgctccagcatcagccgccaggggtccagccagtggcaccggaggttgcttgtttgggatggtctacaccaggactggcagtcgcgcgacaggcgagggcagcaacggcgaagagcgcactgatggtgtgcaccccaacagcgattctggcaatggtccgccaccacttcccgagaatccgacgcttgcccaagttatggcacatcagactcagatgatggcagccatgatgcagcagatgcagcagcagcaccagcagatgcaccagaggatgatgcagcacgccgaacagcagcatcaacagtttggtccccctccccctcagtccaagttgccagagtttctacgcgtcaggccacccaccttctccagcaccaccaaccctatggaggcgaacgactggctccatgcaatagagaagaagctgaatctcctgcagtgtaatgatcaggagaaggtcgcttttgccacacaccagcttcagggtcccgcgtcagcttggtgggacaaccacatggccacccgcccaccgggtactgaagtcacatgggcagagttctgccgtagcttcaggaaggcacaggtgccagatggggtcgtggcacaaaagaagagggaatttcgtgcactccatcagggcaataggactgtgacagagtacctccatgagttcaatcgcctcgcgcgatatgcaccagaggatgtccgcaccgacgccgagaagcaggagaagttcatggcgggtctggatgacgagctgaccaaccaactgatatctggggactacgccgactttgagaggctggttgacaaggcaatccgtcaggaggaccaacgcaacaagatggacaggaagaggaaggccgctcagttcagggcacatcagggaagtcaccagaggccgcgcttcactcccggacagcagggtggacctaccaccatgatcgtccgccagcaccgcccgttcaaccctagcaacttccaccagggcaccagtggcagtcagaaccaccatggaggtcagcccaaccgcggtgcagctccacgcccatcagtggcaccggcacagtcaggccagcccgcgcaagccaagaaggagactggagcaaaaccagggtcctgcttcaactgtggcgagcttggccacttcgctgacaaatgcccgaagcccaggcgtgccgggccaaggtttatccaggctcgtgtcaaccacgcatctgcgcaggaggcacaaacagcaccggaggtcgtactgggtacgttccctgttaactcaatccctgcaacagtactttttgattctggtgcaacacattctttcatctcaaagaaatttgtcgggatgcatgggttaataagagaggaacttagcacaccgatgcgggttcataccccagggaatagctccacttcggttcaattcagcccttctataacaatagaaattcaaaggtcaccatttctagccaacctcattcttctcgaatccaaagacctagatgtcattcttgggatggattggctgaccaagtttaagggagtcatcgattgtgcgagtcgcacagtcaccttgaccaacgagaagggagaaaccgtggtgtacaaatctctagtctcgccaaagaaaggggtctcgttgaatcagattgagacggaaatcccagtggacaccgtagagaagaacttgagaaaattggaagatatacccatagtctgcgagtatccagaagtgttccccgaagacctcactaccatgccacccaagagagagattgaattccggattgacttggcaccgggaactgctccaatctataagagaccgtacagaatggcggccaacgaattagcagaggtcaagaagcaagttgatgagcagctgcagaaagggtacatacgaccaagcacttcaccttggggcgctccggtcatttttgtggagaaaaaggataagacgaagaggatgtgcgtcgattatcgcgcacttaacgaggtcacaatcaagaataaatatcctttcccgcgaatcgacgatttatttgatcaactgaaaggaactaaagtgttttctaagatagacctgcgatcaggctaccaccagttgaagaatccggaaagaggatattccgaagacggccttcaccactcgtttgttgtggtgttcatcgacgacatacttatctactcaaaatccgaggaagaacatgagcaacatctccgtctggtactcgaaaagttgaaggagcaccagctatacgccaagttcagcaagtgtgacttctggttgacggaagtcaaatttctgggccatgtcattacagctcagggtgtggcagttgatccatcgaacgtggagtcagttaccaaatggaccccacctaagaccgtgtcgcagattcgaagtttccttggacttgcgggttattaccgccgattcatcgaaaatttctccaggatcgcccgacccatgactcagttgcttaagaaggatgagaagtttaaatggacagctgagtgcgataagagctttgaggagctcaagaagaaattagtatccgcaccggttttgatcctgcccgaccagatgaaagacttccaggtctattgcgatgcatcccgtcacggacttggatgtgtcctaatgcaagagggcagagtggttgcatatgcctcgcggcagttgcgtccacacgaaggaaattatccaactcatgacttggaattggcagcagtggttcatgctttgaagatctggaggcactatctgattggcaaccgctgcgaagtatatacggaccataagagtctgaaatacatcttcacccaaccggatctaaaccttcgacaacgaagatggttggaactaatcaaagactatgacatgagtattcactaccacccgggtaaagccaatgtggtggcagacgctttaagccggaaaagttactgcactgccctatgcatcgagggcatgtgtgaggaattgcggcaggagtttgaacatctcaacatgggaattgttgaacacgggttcgtagccgctctggaggcacggcctacgctcgtggatcaagttagagccgctcaagtaaatgatccggaaatagcagagctgaaaaagaacatgagagtcggaaaggctcgggatttctttgaggatgagcatggcacaatctggatgggagaaagattgtgtgtacctgacgacaaggaactgaaggatctgatactcaccgaggctcatcagacccagtactccattcatccaggcagcactaaaatgtatcaagacctcaaagaaaggttttggtgggtcagcatgaggagagaaatagctgaattcgtcgcactctgcgatgtttgccaacgagtgaaagcagagcaccaaagaccagcaggtttactccaacctcttcaaatcccggaatggaaatggaaggagattggaatggactttataacaggactgccccggacatcatcgggtcacgattcaatctgggtagtcgtggatcgactcactaaggttgctcactttatactagtacataccacctatacgggaaagagattggcagaattgtacctcgcaaggatcatgtgtttgcatggggtacccatgaagatactatccgaccgaggtagtcagttcacctcaaagttttggcagaaactgcaggaagaattggggacccgtttaaacttcagcacggcctatcacccgcaaactgatggtcagaccgagcgagtccatcaattcttggaggatatgttgagagcttgcgctcttgattatgatggagcttgggacaaacgcttgccatatgcggaattctcttacaacaacagctaccaggccaatctgcagatggcactgtgtcgcgtcccaaatcgactctaa

SEQ ID NO: 98223 - DNA, 2742 bp, Oryza sativa
  Clone ID: PAT_MRT4530_96149C.1
atgatcgtccgccaacatcgccctttcaactcgagcagcttccaccagggcgctagtggcagccagaaccaccagggaggtcagcccaaccgcagtgcagctccacgcccaccattggcaccagcacagtcagctccatcagcccaagccaagaaggagactggagcaaagccaggatcctgcttcaactgtggcgagcatggccactttgctgacaaatgcccgaagccaaggcgtgccgggccaaggtttgcccaggctcgtgtcaaccacgcgtccgcagaagaggcgcaagtagcaccagaggtcgtactgggtacgtttcctgttaactcaatccctacaacagtacttttcgattctggtgcaacgcattcgttcattggaaagaagtttgttgggatacatgggttaataagggaagaacttagtacaccaatgcgggttcataccctagggaatagctccacttcggttcaattcagcccttctataacaatagaaatccaaagatcaccatttctagccaacctcattcttctcgaatccaaagacctagatatcaatcttgggatggattggctaaccaagttcaagggtgtcattgattgtgtgaatcgcacagtcaccttgaccaatgagaagggagaaacagtagtgtacaaatctccagtctcaccaaagcagggggtctccttgaatcagattgaggtggaaattccagtggtcaccgaggagaagagttcgaggaagttggaagatatccccatagtctgcaagtatccagaagtgttccccgaggacctcactaccatgccacccaagagagagattgaattccggattgatttggcaccgggaactgctccaatttacataagaccgtacagaatggcagccaacgagctagcagaggtcaagaagcaggttgatgagcagctgcagaaagggtacattcgaccgagtacttcactttggggtgctccagtcatttttgtggagaagaaggacaagacgaagagaatgtgtgtcgattatcgcacactcaatgaggtcactttcaagaacaaatacccgttgccgcggattgatgatctgttcaatcagctgaaaggagccaaggtgttttccataatagacctgcgatcaggctacaaccagttgaggatttgggaagaggatattcccaagtcagcctttaccacttggtatgggttgtatgagtgcacggttatatcttttggacttaccaatgcacctgcattcttcatgaacctgatgaacaaagtgttcatggaatttctcgataagtttgttgtggtattcattgacgacatacttatctattcaaagtctgaagaagaacatgagcaacatctccttctagtactcgagaagttgaaggagcaccagttatatgccaagttcagttattaccgtcggttcattgaaaatttctccaggatcgctagacccatgactcagttgcttaagaaagatgagaaatttaaatggacggccgagtgtgacaagagttttgaggagctcaagaagagattagtgtctgctccagttctgattctgcccgaccaaacaaaggacttccaagtctattgcgacgcgtcccgccacgggcttggatgtgttctaatgcaaaacggcaaagtggtcgcttatgcctcgcggcagttgcgtccacatgaagggaactatccaacacatgacctggaattggcagcggtggttcatgctttgaaaatctggaggcaatatctgattggcaaccactgcgaagtatatatagatcacaagagtctgaaatatatcttcacccaacctgatctaaatctccgacagcgaagatggttggagttaatcaaagattatgacatgagcattcactaccatccaggcaaagccaatgtggtggcagatgcattaagcaggaagagctactacaatgctttatgcaccgaaggcatgtgtaaggaattgcagcaagagcttgaacgtctcaacatgggaatcgtagaacacgggttcgtagctgctctagaggcacgtcctacgctcgtggatcaagtcagagcagctcaagtaaatgatcctgagatagctgaactgaaaaagaatatgtgggttggaaaagcccgggatttccttgaagatgaacatggcacaatctgcatgggagaaagattgtgtgtgcctgatgacaaagagctaaaagatctgatactcactgaggctcatcaaactcaatactccattcatcggggtagtaccaagatgtaccaagatctcaaagaaaatttttggtgggccagcatgaggagggaaatagctgaattcgtcgcgctctgcgatgtttgtcagcgagttaaagcagaacatcagaggcccgcaggattgttacaacctcttcagatcccggaatggaaatgggaagaaattgggatagatttcataacaggcaaaaggttggcagagctctatctctcgagaatcatgtgtctgcatggagtacccaaaaagatagtatctgatcgagggagccaattcacttcaaagttctggcagaaattgcaagaggaattgggaacccggctgaacttcagcacagcctaccatccgcagaccgatggtcagaccgagcgggtcaatcaaatattggaggatatgttaagggcttgtgcgcttgattttagtggagcatgggacaaaagcttgagtattctatag

SEQ ID NO: 98224 - DNA, 1977 bp, Oryza sativa
  Clone ID: PAT_MRT4530_9614C.1
accacgggccgcgagcggacctcctcccctcccccctcctctccccctcgccgagatatattttcccctcggcggcgactcctcctccacctcgtgagctcgccttcggccgccgcctctgcgcctcgcagatccccacccgcgaccgagcgagctggtgccgcatcggtatcgcatcccgttcatcttctggctggacgaattcaattcacggacggtggtggtggtggtgttgactagggatttatttttttaccattggcggctcggctgcatccccaagtgaagaagagaattcgtacatgattccgctaaacaggagggcgagtcagactaggggtgggatggagtacttcgatgctaggcggaagcctcataatgttgggaaagttattgcagctctggtcctcacaacactatgtatatttattttgaagcaatctcctggttttggtggcagtagtgtgttttctcgccatgaacctggtgttactcatgtcttagtaacaggaggagctggctatattgggtcacatgcttcattacgcctgttaaaggacaattatcgagttaccattgtggacaatctttctagaggaaacatgggagcagtaaaggttctccaagagttgttcccccagccaggaagacttcagtttatctatgctgatcttggagatcaaaaaacttttttcacttaactggctcccaggtcaacaagatctttgccgaaaatgcgtttgatgctgttatgcactttgctgctgttgcctatgtgggtgagagtacattggaaccccttaggtactatcacaatattacatcgaacaccttattgattttggaggctatggcgtctcatggagtcaagacccttatttactctagtacatgtgccacctatggagaaccagagaagatgcctattgtagaaaccacacgtcagttaccaattaatccctatggaaaagctaagaaaatggcggaggacatcatactagatttcacgaaggggagaaaggacatggctgtgatgattttaagatatttcaatgttattggatcagacccagagggaagactaggtgaagctcctagacctgaactacgagagcatggaaggatatccggggcatgctttgatgctgcgttaggaatcattccagggctgaaggttaaaggaacagattatcctacaactgatggaacctgcataagagactacattgatgtcacagatcttgttgatgctcatgtgaaagcactcaacaaggcagagccaagtaaagttggcatttacaatgttggcactggaagaggtcgttcagtcaaggagtttgtggatgcctgcaaaaaggcaactggagtcaacattaaaattgagtacctcagcaggaggccaggggactatgctgaagtatacagtgacccaacaaagatcaacacggagctcaactggactgctcaatataccgacctcaaggagagcctgtcagtcgcttggagatggcaaaagtcacatccacgcggatatgggtcaaactaaatatagcttgctgatcaataattctgctgaatcgtcgatatattgatttttttagttagtggtataggatcttggtgcgataccgcttccacagtcactcatttgttatttttttctctttttattttcaaaggtttgttgttattttctagcaaaaccataagcagtgatcttgatatgctggaaatcctggaagccttcctgtaagggcaaatttcattgttttttgacacaaattgctgataaaaagaagtgtacattgtctcttgccattctgagatgcaagcttgtgaactgaactatagactacaaaaaaaaaaaaaaaaaaaaaaaaaaaaaaaaaaaaaaaaaaaaaaaaaaaaaaaaaaaaaaaaaaaaaaaaaaaaaaaaaaaaaaaaaaaaaaaaaaaaaaaaaaaaaaaaaaggggggg

SEQ ID NO: 98225 - DNA, 291 bp, Oryza sativa
  Clone ID: PAT_MRT4530_96150C.1
atggaggaagagaagcaagggtgctcgagtgaaagcaggaggaaaggcataaaaaacaatgttggatctggaccggtcgccccgcgcctcctccttcgtggaaccatcgcaccgtcctcgccatgctccctgccgccgtgctggtccccagctcgggggctgttggatctagcccccgccgccccgcgcctccttctccacctcatgagagaggagaggcctcgccgcacaggggagagggaaggagaggcgcctgccgcggcgcaggggagagggagaggctccgactga

SEQ ID NO: 98226 - DNA, 1131 bp, Oryza sativa
  Clone ID: PAT_MRT4530_96151C.1
atggtaattgatgaagataaatgccatgctgattctacaagctacatgctttctgcagaactcaacttttctgtcactgtatttacaagccccataaaagcactagactttcttcagaatcatgcagaaggtgttgatttggtgctggcagatgtccacatggaagagatgaatggttttgatttccttaaagttgcaagagagcttcataaatccattcaagtgattatgatgtcaactgaaacgacaatgtacacaatgaagaggtgcgtcaaacttggagctcaatttttggtcaataagccccttgatgctggaaccattaagaatttgtggcaatatgttgacttgaaagttctaagaatggagaagatcaaggacttgcttcaaggtattggagatgaaagcacttgtgccaatgaaacgaattctcttgctgaaaacccgaagaatgatactaagaagaaatattatctcatgtggactccacatctacagaaaaagtttttacatgctcttcaaatacttggaaaagatgcttcaccaaaaaatataaagaagatcatgggtgtggacaacattgattgtaggcaaattgctgctcatctgcagaaacatcgactacggctaacaaaggatttgaagaaagcatcatttacaacggataccagcaaggatgaatcaaattctagaatagggcctgcagagagtcatcacgtgtgccgcaacgcaagtacactgcagcctcgttccaacactcaacctacagaaacaaccatgcaaatcctctctgaagacgctgaatatgacgatgtttacgccgcgatgcgaagagccttacagtatgggattgtctttgatgagtccaagcattccagtgatccttctggtgatgaggatgaacaagttgtggtaggaggagatcaagatggatgtgccaatgaagccaatgacatagactcatctggtgatcatcatcaggttgctgctgttgtcactaaaccatgcaacgcaaatgcttcacaagagataatcaacaagatgactaattctgatggtatgcaagccaccaaaggaagcaaggcagcagttttccgccttgtggattattcagaatccgatagcgattag

SEQ ID NO: 98227 - DNA, 3786 bp, Oryza sativa
  Clone ID: PAT_MRT4530_96152C.1
atggtcaacaccaggaatggcagccgtgcagtaggtgagggcagcaacggcgaagaacgcaccgacggtgggcatcccaacagcgcctctggccacggtccaccaccactccccgagaacccgacgctcgcacaagtgatggcccatcagactcagatgatggcggccatgatgcagcagatgcagcagcagcaccagcagatgcaccagaggatgcagcagcaagccgagcagcagcagtttggtccccctccccctcagtccaagctaccagagtttctatgcgtcaggctacccactttctctagcaccaccaaccccatggaggtgaatgactggctccatgccataaagaagaagctaaaccttctgcaatgtaatgatcaggagaaggtcgcctttgccacacaccagctccagggccccgcgtcagcttggtgggacaatcacatggctacccgcccgccaggtacagaagtcacttgggcggagttctgtcgcagcttcaggaaggtgcaggtgccagacggggttgtggcacaggagaagagggaattccggatactccaccagggcaacaggacagtgactgagtatctccatgagttcaatcgtctagcgcgatattcaccggaggatgtccgcaccgacgccgagaagcaggagaagttcctagcaggcctggatgacgagctgaccaaccagttaatctctagagactatgccgactttgagaagctggttgacaaggcaatctgtcaggaggatcagcgcaacaaaatggacaggaagagaaaggcagcgcagttccggtccaaccaaggaagccaccagcgcccgcgcttcactcccggacagcagggtggacctaccaccatgatcgtccgccagcatcgccctttcaactcgagcagcttccaccagggcgccagtggcagccagaatcaccagggaactccatcagcccaagccaagaaggagactggagcaaagccaaggtcctgtttcaactgtggcgagcatggtcactttgctgacaagtgccctaagctaaggcgtgccgggccaaggtttgcccaagctcgtgccaaccacgcgtccgcagaagaggcgcaagcagcaccagaggtcgtactgggtacgtttcctattaactcaatccctacaaccgtacttttcgattctggtgcaacgcattcgttcatttcaaagaagtttgttgggatgcatgggttaagaaaagaagagattagtacactaatgagggttcataccccgggaaatagttcaacctcgatcagttatagcccttcagtgctaatagaaatacaccgatcacgatttctagccaacctcatccttcttgaatccaaagatctagatgtcatccttgggatggattggctgaccaagttcaagggagtcattgattgtgcgaatcgcacagtcaccttgaccaatgagaagggagaaactgtggtgtacaagtcactagtctcaccgaagcaaggaatctccttaaatcagattgaggtggaaaaccttgtggccaccgaggagaagagttcgcggaaattggaagatatccccatagtctgcgagtatccagaagtgttccccgaagacctcactaccatgccacccaagagagagattgaattccgggttgatttggcaccggggaccactccaatttacaagagatcgtacaggatggcagccaatgagctagcagaggtcaagaagcagaagaaggacaggacgaagagaatgtgtgttgattatcgcgcactcaatgaggtcacaatcaagaacaaatatcctttaccgcggcttgatgatttgtttgatcagctgaaaggagctaaagtgttttctaagatagacctgcgatcaggctatcaccagttgagaattcgggaagaggatatccccaagacagccttcaccactcggtatgggttgtatgagtgcatggttatgtcttttggacttaccaacgcacctgcattcttcatgaacccgatgaacaaggtgttcatggaatttctggataagtttgttgtggtattcattgacgacatactcatctattcaaaatctgaagaagaatatgagcaacatctccgtctggtactcgagaagttgaaggagcaccaattatatgccaagttcagcaagtgtgacttctggttgtcggaagtcaagtttctgggtcacgtcattacagctcagggcgtgacggccgagtgtgacaagagttttgaggaactcaagaagagattagtgtctgctccagttctgattctgcccgaccaaacaaaggacttccaggtctactgtgatgcgtcccgccacgagcttggatgtgttctaatgcaagagggcagagtggtcgcttatgcctcgtggcagttgcgtccacatgaagggaactatccaacgcatgacctggaattggtagcggtggttcatgctttgaaaatctggaggcactatctgattggcaaccgctgcgaagtatacacggatcacaagagtctgaaatatatcttcacccaacctgatctaaatctccgacagcgaagatggttggaactaatcaaagattatgacatgagcattcactaccatccgggcaaagccaatgtggtggcatatgcattaagcaggaagagctactgcaatgccttatgcaccgaggacgtgtgtaaggaattgcagcaggagcttgaacggctcaacgtgggaatcgtagaacacgggttcgtagctgctctagaggcacggcctacgctcgtggatcaagtcagagcagctcaacgagttaaagcagaacaccagagacccgcaggattgttacaacctcttcagatcccggaatggaaatgggaagaaattaaaatggatttcataacagttctggcagaaattgcaagaggaattgggaacccggctgaacttcaacacagcctaccacccgcagaccatcccgatggtcagaccgagcgggtcaatcaaatattggaggatatgttaagggcttgtgtgcttgattttggtggaacatggtacaaaagcttgccgtatgcggagttctcttacaacaacagctatcaggccagtctacaaatggcgccgttcgaagcgttgtatggccggaagtgccgcacacctctcttctgggatcaaacaggcgaacgtcaactgtttggaacagaagtgttaacggaagcagaagagaaagtcagaaccgtcagagagaggctgagaattgcccagtttcgacataagagctacgcggacaaccgccgaagggagctcacttttgaagcaggggattacgtgtaccttcgtgttactccgctccggggagtgcaccgtttccagacgaaaggcaagttagcaccacgcttcgtgggaccatacaaaatcttggaacgaagaggagaagttgcttatcagctagaacttccatccaacatgatcggcatccatgacgtgttccatgtgtcccagttaaagaagtgcttgagggtacccgaagaacaagccgattcggagcacatcgacattcaagaagatctgacttatgtggaaaagccggtttgtattcttgagaccagagaaagaagaaccagaaataaggttaccaggttgtacagggttcagtggagccaccactcagaagaagaggcaacttgggaaagggaagatgagttaaaggccgcccatccgcacctcttcgccagctcttccgaatctcggggtcgagattctgtttaa

SEQ ID NO: 98228 - DNA, 3192 bp, Oryza sativa
  Clone ID: PAT_MRT4530_96153C.1
atggtctacaccaggactggtagccgcgcaacaggcgagggcagcaacggtgaagaacgcgctgatggtgtgcaccccaacggtgattctggcaatggtccgccaccacttcccgagaatccgacgcttgcccaagttatggcacatcagactcagatgatggccgcgatgatgcagcagatgcagcagcagcaccagcagatgcatcagaggatgatgcagcacgccgaacagcagcaccagcagtttggtccccctccccctcagtccaagttgcctgagtttctacgtgtcaggccacccaccttctccagcaccaccaaccctatggaggcaaatgactggctccatgcgatagagaagaagctgaatctcctgcagtgcaatgatcaggagaaggtcgctttcgccacacaccagcttcaggagttctgccgtagctttaggaaggcacaggtgccagacggggttgtagcgcaaaagaagagggaattccgggcgctccatcagggcaacaggacagtgacagagtacctccacgagttcaatcgcctcgcgcgatatgcaccagaggatgtccgcactgacgccgagaaacaggaaaagtttatggcaggcctggatgacgagctgaccaaccaactgatatccggggactacgctgactttgaaaggctggtcgacaaggcaatccgtcaggaggatcagcgcaacaaaatggacaggaaaagaaaggcggcgcagttccgatccaaccaaggtagtcagcaccgaccgcgcttcactcccggacagcagggtggacctaccaccatgatcgtccgacagcaccgcccgttccactctagcaacttccaccagggcgctagcggcagtcagaaccaccagggaggccagcccaaccgcggtgcagctccacgcccaccaatggcaccggcacagtcagcccagcccgcgcaagccaagaaggagacgggagcaaaaccagggtcttgcttcaactgtggcgagcttggccacttcgctgacaaatgcccgaagcccaggcgtgccgggctaaggtttatccaggctcgtgtcaaccacgcgtctgcggaggaggcacaagcagcaccagaggtcgtactggtcaccctgaccaatgagaaaggagaaaccgtggtgtacaaatctctagtctcgccaaagaaaggagcctcgttgaatcagattgagacggaaatcccagtggacaccgaagagaagaacttgagaaaattggaggacatacccatagtctgcgagtatccagaggtgttccccgaagacctcaccaccatgccacccaagagggagattgaattccggattgatttggcaccaggaaccgctccaatctataagagaccgtacagaatggcggccaacgaattagcggaggtcaagaagcaagttgatgaacagctgcagaaagggtacatacgaccaagcacttcaccttggggcgctccggtcatttttgtggagaaaaaggataagacgaagaggatgtgcgtcgattatcgcgcacttaacgaggtcacaatcaagaataaatatcctttaccgcggatcgacgatttgtttgatcaactgaaaggagctaaagtgttttctaagatagacctgcgatcaggttaccaccagttgagaatccgggaagaggatattccgaagacggccttcaccactcggtacgggctatacgagtgcacggttatgtctttcggacttactaacgcacccgcattcttcatgaatctgatgaacaaagtgttcatggaatttctggacaagtttgttgtggtattcatcgacgacattcttatctattcaaagtccgaagaggaacatgaacaacatctccgtctggtactcgagaagttgaaggagcaccagctatacgccaagttcagcaagtgtgacttctggttgacggaagtcaaatttctgggtcatgtcattacagctcagggtgtagcagttgatccatcgaacgtggagtcagttacaaaatggaccccaccaaagaccgtgtcgcagattcggagttttctaggactggcaggttattaccgccgattcatcgaaaacttctccagaatcgcccgacccatgactcagttgcttaagaaagacgagaagtttaaatggacagctgagtgcgacaagagctttgaggagctcaaaaggaaattagtatccgcaccggttttgatcctgcccgaccagacgaaagacttccaagtctattgcgatgcatcccgtcacggacttggatgtgtcctaatgcaagagggcagagtggttgcatatgcctcgcggcagttgcgtccacacgaaggaaattatccaactcatgacttggaattggcagcagtggtccacgctttgaagatctggaggcactatctgatcggcaaccgctgcgaagtatatacggaccataaaagtctgaaatacatcttcacccaaccagatctaaaccttcgacaacgaagatggttggaactaatcaaagactatgacatgagtattcactaccacccgggtaaagccaatgtggtggcagacgctttaagccggaaaagttactgcactgctctatgcatcgagggcatgtgtgaggaattgcggcaggagtttgaacatctcaacgttggaattgttgaacacgggttcgtagccgctctggaggcacggcctacgctcgtggatcaagttagagccgctcaagtaaatgatccggaaatagcagaactgaaaaagaacatgagagtcggaaaagctcgggatttccacgaggatgagcatggcacaatctggatgggagaaagattgtgtgtaccggacgacaaggaattgaaggatctgatactcaccgaagctcatcagacccagtactccattcacccaggcagcaccaaaatgtaccaagaccttaaagaaaaattttggtgggtcagcatgaggagagaaatagctgaattcgtcgcactctgcgatgtttgccaacgagtgaaagcagagcaccaaagaccagcaggtttactccaacctcttcaaatcccggaatggaaatgggaggagattggaatggactttataacaggactgccccggacatcatcgggacatgattcaatctgggtagtcgtggatcgacttaccaag

SEQ ID NO: 98229 - DNA, 1404 bp, Oryza sativa
  Clone ID: PAT_MRT4530_96154C.1
gcaatataatagccgcgcttagcgtaactagacgaacgtactagcagaagaagaagaagaaaatgccggtgagccggatcgcggtgggcgcccccggcgagctgtcccacccggacacggccaaggccgccgtcgccgagttcatctctatgctcatcttcgtcttcgccggatcgggatccggcatggccttcagcaagctgacggacggcggcggcacgacgccgtcggggctgatcgccgcctccctggcgcacgcgctggccctgttcgtggcggtggcggtgggagccaacatctccggcgggcacgtgaacccggcggtgacattcggcgcgttcgtgggggggaacatcagcctggtgaaggcggtggtgtactgggtggcgcagctgctggggtcggtggtggcgtgcctgctgctcaagatcgcgacgggcggcgccgccgtgggtgccttctcgctgtcggcgggcgtgggcgcctggaacgcggtggtgttcgagatcgtcatgaccttcggcctcgtctacaccgtgtacgccaccgcggtggatcccaagaagggcgacctcggtgtcatcgcccccatcgccatcggcttcatcgtcggcgccaacatcctcgccggcggcgccttcgacggcgcctccatgaaccccgccgtctccttcggccccgccgtcgtcaccggagtctgggacaaccactgggtctactggctcggccccttcgtcggcgccgccatcgccgcgctcatctacgacatcatcttcatcggccagcgcccgcacgaccagctgcccaccgccgactactgatcatatcatatcatatcgtctgctcccagtctcaataatcgaattcgtcccccgtctcgatccatatatagctagaatattaattactccatgcagctgctacctgtgtcgtcttccacccccaatcaattactactctcttcttctgtacaaacaaattacgtaaatctcctttaattccaaaatctgtgctgtgctgtcaaccaagccaaccatgcattgcagctgtaacgtcgtccatccatcggttgtctcatctgcaatataatgtcaacacatcccatgcatcctaatccaaagctctcttcactgtcgttcttcacgtccttgtttgagttggtggaaagatatatacatacatgctgcgtttgcaccatcacttcatgattgaaacgagtttatgcgctccgatccatttgcttcctccaaatgaggacctaaataaatcccatctatctattatttatatattattaagggatgtacgtagaaaatgaaccatcatgttctcaataatggttgtaacttatttgaagcaaaggccgaaatgaattcaattatctaaaaaaaaaaaaaaaaaaaa

SEQ ID NO: 98230 - DNA, 277 bp, Oryza sativa
  Clone ID: PAT_MRT4530_96155C.1
agcgggcgccagcgggatggacacctgcggaatttgcctttcggtgcggccgcactctcgggggcgcggggtgagcatgagcccttagtcgatagactctaggatgagatgtactagtgcctgctgaggctataacatggacttgtgggctgtgctctcgcgggatgcactcctgacaggatcataaaaagagactagtgcatgccagccgtgcgtgcactacagcagcaatatgtcagcgagtgcgtggacggacgcctgctgccggccgccggcg

SEQ ID NO: 98231 - DNA, 543 bp, Oryza sativa
  Clone ID: PAT_MRT4530_96156C.1
gcacgaggcttgatctttctctcaagttgagtttagtactctagtgctagtagagtagaatagaatagttttttttttagtcctctagtctctaggagatttcgggtatggctctagcagtttttctctccttttgtaggacttgtcaaattaatagaatattcttctttatatatctgcggtattttactttatcttagtaccggctttattttatatttgtctcgatatagttgtgtgactagcttaccatagaggtgcaatggtgtgggtttaatgttcatgcaaatgattgctctatgtcattctagaggatatggagtagtatttaataatgtaaacatggtgcttagatttatcattatttgggcatatatggtgatagctcagtacgggtattcctctacgttagtatatattcctaagacactttccttgggtgggtactcctccgtatttgattctggtaggatggtcatgacaggttgtcgtaataaactccgtatttgatcccgattggatggtcatgacgggttgtcgtga

SEQ ID NO: 98232 - DNA, 1971 bp, Oryza sativa
  Clone ID: PAT_MRT4530_96157C.1
atggaggatgatatttggaccttgaatttattccgtgatggtgttgttaatggcctgatgcatgtgcaaaaaaagatggacatagatatcatttgctacttcaatttggttggactgattgtggacattggctactcagaatgtgattttatctactacagcaaaaaagatgggaggggtgtagctagcatggttgctatagaaagtgattggcaagtggatgaaatgtgtaagcaatttgagagtgaaaaagttgcaaacttgtacatcatccagagacaagaggagaagttaaaggagattaagaggcaaaaagaagatccagatgagcgtcgcgagggagatactgatgtggaggacatatttccattggctattaatctactagacacaggatctgcaccaatagctagaaggaatggcaatgaagttgcagttcaacatgagagtcaaccaagccctctagttgttaattcccctctagttgttgtcaattcatccagagcaaaatgtagccagcatatagcaccatctacaaggaagggcaaggaagacaatgagggtgatattgtggacttatgttccagtgatgatgatgggcatgaagcaacaccttgtcgagcaccgaataaaagaaaaagctttcagtacaaagaatttggagtagacggatgttttgtcaagcttactaatggggctcaagtacttgccgcatctagaagggatggcaatgataatcttttccccttagcatttggggtggtaggaaaagaagattacgaaggttggtgttggttcctgcaacaactgaaatatgctcttggtggagagggtcttcttggtgggattaaagatgtatttcctgcatgtgaacagaggttttgcaagcgccatatacaccaaaacttttgcaccgctagttttaggggtggagatctcaaggcatacatggactctgctgtatatgcatatactaaacataattttgagattgcgatagaagaactgaagaaggagagggaaggtgcatgggagtggcttaccaaaatacctactaagcattgggctaggcatgcatttgacacaacatgcaagacagatttagtggtcaataacataagcgaagtattcaataactacatcattgattacagggataagcccattgttacaatgttggatcttattagaaccaagttgatggggcggtttaactcgaatagagaaggtattgcttcagcacaatgggaaattactcctcattatgtagaaaagatagaggtggagaagagagatgctaggtattgtagggttgtttgtgcagggagggggatatggcaagtaacttgtggtgaaatgacatatgcagtaaatatccatgataggacttgtggttgtttcaaatgggatgtcactggtgttccttgcaaacatgtagtgtcaaccatttacaagtcaaagcagcaccctgaagattttgttcatgatttctttaagaagctagcataccaaagagcatatcaacatagcatatatcatgtccctagctctgatgactggaccaaaacggatacaccagatatagaccctcctaaattttcaaaacatcctggcatgccaaaaaataacagaagaaagaggggagatgagccatcacaacctagtggtagagcaagaatgactactattacttgttctaattgccacaaacaaggccacaagtgcaccagttgctcacgtaagcttagactagatctccaaattaggaaaagcaagcataaggccaacagatccatacctgctgagtcaagccatgtgcaagagccaagatttgttgctaatttccaagaaggttttggtgttagagttcctaatagcccaatagttgacagaggaagaggtagattaagcaagatgccatctaggagagacagggggagaggcaggtcaacaagtggagttatgaactag

SEQ ID NO: 98233 - DNA, 846 bp, Oryza sativa
  Clone ID: PAT_MRT4530_96158C.1
atgcaggcgtactacgcggccgccgccgccgccgccggtggccacccttacgcctggcccccgccgcagagcgtgcctcccatggctggttgcgccgtgccatctgcggcggcggaagggaagagcaagaggaagacttccggtggcccctccggcgaggactcctccgggagtggcgacggtgggagcgaggattcatcggagaggagagatgatgctgacgagaagggtttgtcacctgcaaagtggagaaaattgggtcatccagacatagaaggtgaaacatctcaggctgctgccatgtctgagcagaatcctgtgaaggcggcaccgaatttgaatatcgggatggatatttggagcaattctacaatggccgccatgccctcaggacaggtggaggtgaatgctgggacgcatttgcggcgagacaaggctttgtctcagatggatgaacgagaactgaagagggagaggagaaaacaatctaacagagagtctgcgaggagatcgagactacggaagcaggaaagacccacatctttctgtcacccgccaaactatcctgttactttttatggcctgacaaaccaagaatgtgaggagttgtcccagaaggtaactgaactgacagccgtaaacagcacactcatgacagaactcgacaagcttaagaaggactgtgaagacatggaagcggaaaattcgcagctaatggatgagatggtgcagtccgagggctctagtgttatagccactttgagcgtcaagattgacacgtcaaaagaccgccatggtagcagtagccagctaaataagcacacaaatgatgacagcaaagggtag

SEQ ID NO: 98234 - DNA, 377 bp, Oryza sativa
  Clone ID: PAT_MRT4530_96159C.1
aattgtggtgtttttgtttttgagttttttccccccacgcaggatcaacataaattatccctcgttcggctttattttgatacgaacgaaaaagaagcccaaccagcgaaaaaaaaagtagatcctggggggggggataaaactctataacaaatgctccacattaaatcgcgcgtacggaatccagggacccctataccgttggggtgggcatcaatctttcgctccaaagccacctacgctagcttaacctgactggccgtcgtaccctagcagttgatggaaacaccacccgccttgaccattgacaggttccccaagccaacgaccgttttggcagcaccattcttcctgcacgccggcacgccgaattggac

SEQ ID NO: 98235 - DNA, 220 bp, Oryza sativa
  Clone ID: PAT_MRT4530_9615C.1
atgtcaatggtgatggatctggttagtcaatccttttcatcgaaggccccggttataacgcacgatggcaataatagcaacattcgtgtcgatggtgatggaactccgaggggcatgacaacggtgagggacctggttagtcaaccatcttcatcgaggttccggttccaatgcatgtcattgacaatagaaggtgggctttctgagggccatgacaatg

SEQ ID NO: 98236 - DNA, 268 bp, Oryza sativa
  unsure (1)..(268): unsure at all n locations
  Clone ID: PAT_MRT4530_96160C.1
tttgatttttttaattatattttttttttaaatcaacaaatcatcatgattctattatatanttcttccaaaacagtcaaaatttatttttaccataaatattaacattatattacagacctcctaanaatacttttttttaanctggtggggggttacaanccccttatacaaaggttttttttaaaccccanaantactannannannacaaactaaacaagccccaattntttctttcttcattctttatnataatacatatata

SEQ ID NO: 98237 - DNA, 576 bp, Oryza sativa
  Clone ID: PAT_MRT4530_96161C.1
tggaacacaactaggtcggatataaccatgactaccttatgtattaatgaaccaaatcatcaacatcaaacggacctagccgctgatctagaagtaattcagggcccatgagtacttgttcgaaagattatggagtctactttcagatgggtttggtcccacgtcaaaattcctatcgagctgccagcaataggcaaaacaagccacggattatccttctcggcgaggtctaccgggtttcagcatggtttataaccagaggagacgtggtgctgtgactgcggggctcagtagcatgttcgttcagaagaaggatcgaatttcgtcacgactccgtccaaatcgtctgtttatcaatacatatcggaagatcaggacctaacatcctcatcatttgttcagtcgcgtgactaccgtgggggaaaggccgccatcatcacgatccggcctcctcccctctagatctggttaagaaatcggtcggatatatctatttaggcggcagccttagacgaggaggtgggcgggcacttccgcatggcagacatcgcctgggggcccatccgcgccactcgg

SEQ ID NO: 98238 - DNA, 258 bp, Oryza sativa
  unsure (1)..(258): unsure at all n locations
  Clone ID: PAT_MRT4530_96162C.1
gtgggctcaccaacctccgggggggggggggggggggttcttaatctgggttgtgtgggtgctncatccttgnggcttgagttgggttccgttgtgccggtgtgtgcgtgnggcgcttngtcgttgtgggcccgggcttttttttactaatgtatgcttntgctcacatgctggggggggggggccttggtctgggngtgtttgggttggctctgcctggttgttcggtgtcgttcctttctgttgggtcttcctttt

SEQ ID NO: 98239 - DNA, 434 bp, Oryza sativa
  Clone ID: PAT_MRT4530_96164C.1
tcgttccgattcttccggcgaggccgacccgacacgaccatgctcgcctccgggcggtctctccgccgcctctcctcctcctgctagtcctagaccttgtcccccgcctcgctacgccgactcctcctcctcctccaccgaccgccgactacgcccccgccccctcggactgctctaccgcccttccaaaccctagcccgaggcctcctgccgcgcatcgcggcgcggcctgtgccccgccaattctccaccgcgtgctgctcctgcacgctttgacgcgtgggggaatgcggcgcccccggcgccaccgccatacccgaggcggagcgaggcgaggaggaagagcgtgagggggaggatggaggcgaggccgacgcggcagtggaggtggcggccgcgaggcatgacacggacgcgtacgcagcgggggagct

SEQ ID NO: 98240 - DNA, 1440 bp, Oryza sativa
  Clone ID: PAT_MRT4530_96165C.1
atggagcatctttccgaggaactgatcatagagattctcaagaggattacaaggacaagtgatctgaattctgtctctcttgtgtcgaagcagctctacgccatcgatgcggagcaaagggctactatttgcattggttgtggactttcaacagaagatttctcagcactttgttcccggtttcctaatttgctcaaagtagagatcgattactctggttcgacacctggcaatgggaaccatattgacaaccaaggtctctttgttcttacatcttgttgtactttgcttaatgatattaccttaagcttctgctcaaaaatcaatgatgctggtattgcttgcctaacttactgcaagaagttgatgtctctgaagctgaactccataccagaagtaacttcaagtgggcttctcatggtagcttttggttgcaaggctctatcttctctctaccttaatgattgcaagggaattgctggcagcactgagtggctggagtaccttggtagtgacggatcattggaagaactcatcgtcagcaattgcaagggagtaagccagtataactttttaaagtttggtcctggatggatgaagcttaagacatttgagtatgaaaacaaggaaaacttttttagtattcacccacgttatggctcatcagtcaaggctaacacacatagatatgaactgtgctgtgagaatttgaaggatttgaagttggtgcgtcttgtaacagagccagacggcccagaaataggacttcgttttttgttggggaagtgcaaggcgttagagaaactgtgcctggagtatgttactggtgttattgacaatgacatgattgtgctatcccaggcctgcaaaaaccttaaaagcatctcactttggctaaaaccagaacattacgttgttggtggtcatatagagttcaggacaggttttactgatgaaagtctcaaggctctagccctcaactgtcctttgcttcaggatgttgaactcacatttacaggttgtgcgcactgggatccccctgaaataggcttcacacaggaaggacttgtgagtttcgtcgaatcttgtccaattcgtgttcttgtgctaaatggtgccctcttcttcaataacaaggggatgaaggccctatcctctgcacaattcctggagacactcagccttatcgattgcaacgaagtaactgatcatgggatgcgatttattgtgcattttccaagcttgattaacctcacactccggttttgtcataatgtgactaatgctggtctgagcgagctggctcatgcacaaaaattacagtctctggacgttggtggctgtggttacatttcccagaaaggtgtgctgggagctgccaaatcagtctactatgaagtgaattgcaaaagtcttggccattataagaggatgtgttga

SEQ ID NO: 98241 - DNA, 1374 bp, Oryza sativa
  Clone ID: PAT_MRT4530_96166C.1
actcaagcttgtgaggatcatagctctgaaggatgagatagcgcgcctgaagaaggagaatgcttagttgaagggtctccccgctcctggaggagtccggatccgcaccacgcctcgcaagtcaacgactgcacccgtgcgcattcagcttgcacccaggaacccacctcctcccgcagctcctccagcacctcccgcagttcctgcagctccagctcctgttccagtgtcagctcccgcatccgctctctccttcgctccagcgtcagccgccaggggtccagccagtggcaacggaggttggttgcctgctactcccagtggcagtcgcgaccacagcagcagtagctccagtggcttagagccaggcagtggcgagacgtatctgccagaccccaggagacgctcagagggacctggcctcttccttcagatggtcaacaccaggaatggcagctgtgcagcaggagagggcagcaacggcgaagaacgcaccgacagtgggtaccccaacagcgcctccggcaatggtccgccaccgctccccaagaacccgacccttgcacaagtgatggcccatcagactcagatgatggtggccatgatgcagcagatgcagcagcagcaccagtagatgcaccagaggatgctgcagcagcctgagcagcagcagcagcagtttggtccccctccccctcagtccaagctgctggagtttctacgcgtcaggccacccaccttctctagcaccaccaaccccatggaggcaaaggactggttccatgccattgaaaagaagctcaatcttctacagtgcaatgatcacgagaaagtcgccttcgctacacgaggtcccgcatcagcttggtgggacaatcacatggctacccacctgccaggcacagaagtcacttgggcggagttctgtcgcagcttcaggaaggcgcaggtgccagacggggttgtggcacagaagaagagggaattccgggcacttcaccagggcaacaggacagtgaccgagtacctgcatgagttcaatcgcctagcacgatatgaaccggaggatgtccgcactgacgcagagaaacaggagaagttcctagcaggcctggatgacgagctgaccaaccagttgatctccggggattatgctgacttcgagaagctggtagacaaggcaatccgccaggaggatcagtgcaacaaaatggacaggaagagaaagacagctcagttccagtccaaccaaggaagtcaccagcgaccgcgcttcactccaggacagcagggtgggcctatgtcgcgaccgagaaaattgcattttcccgaacgctactctaataaactccataaaacaagcggaaacaaagc

SEQ ID NO: 98242 - DNA, 354 bp, Oryza sativa
  Clone ID: PAT_MRT4530_96167C.1
atgagggataaggggagggcggctgtggctggagcacggaaggaggagaagtgggagcatggggagggccagatgcccatctgccccgacgccgccgcggcgcgccgtcgtgcgcggcacggggccggaggcaagcgcggtggtgggaggaggagggcggcggacggcgacgagggagaagggaggtcgccgccgcgcgtgcgagctcgggttcggagaggcctgagagactggagaaggagaaggtcgtcggcgtcgttggcagcagcggcggccatgaagagccaagaacatgagcacaacgccgttgatggggaaggagaccttggaggaggaggcgatggaggggtatga

SEQ ID NO: 98243 - DNA, 3221 bp, Oryza sativa
  Clone ID: PAT_MRT4530_96168C.1
atggtctacaccaggaatggcacccgcacgacaagcgagggcagcaacggcgaagaacgcgctgatggtgtgcaccccaacagtgattccggcaatggtccgccaccatttcccgagaatctgacgctggcccaagtaatggcacatcagactcagatgatggcagccatgatgcagcagatgcagcagcagcaccagcagatgcaccagaggatgctgcagcacgccgaacagcagcaccagcagtttggtccccctcctcctcagtccaagctgcccgagtttctacgcgtcaggccacccaccttctccagcaccaccaaccccatggaggcgaatgactggctccatgccatagagaagaagctgaatctcctgcagtgcaatgatcaggagaaggtcgctttcgccacacaccagcttcaaggtcctgcgtcagcttggtgggacaatcacgtggccacccgcccgccaggcactgaagtcacttgggcggagttctgtcgtagcttcaggaaggcgcaggtgccagacggggtcgtggcacaaaagaagaggggattccgggcactccatcagggcaacaggacagtgacagagtacctccatgagttcaatcgcctcgcgcgatatgcaccggaggatgtctgcaccgacgccgagaagcaggagaaattcctagcaggcctggatgatgagctaaccaaccagctgatatctggagactatgccgactttgaaaggttggttgacaaggcaatccgtcaggaggatcagcgcaacaaaatggacaggaagagaaaggcggcacagttccggtccaaccaaggaaaccatcagcgaccgcgcttcactctcggacagcagggtggacctaccaccatgatcgtccgccagcaccgcacgttcaagtctagcaacttccaccagggcgccagtggcagtcagaaccaccatggaggtcagcctaaccacggtgcagctccacacccaccagtggcaccagcacagtcaggcccgtccgcgcaagccaaggagactggagcaaagccagggtcctgcttcaactgtggtgagcttggccacttcgccgacaaatgcccgaagcctaggcgtgccgggtcaaagtttgtccaggctcgtgtcaaccacgcgtctgcaaaggaggcgcaagcagcaccagaggtcgtactgggtacgtttcctgttaactcaatccctgcaacagtactttttgattctggtgcaacgcattcgttcatttcaaagaagtttgtcaggatgcatgggttaataagagaggaacttagcacaccaatgcgggttcataccccagggaatagctccacttcggtacaattcagcccttctataacaatagaaattcaaagatcaccatttctagccaacatcattcttcttgattccaaagacctagatgtcattcttgggatggattggctgaccaagtttaagggagtcattgattgtgcgaatcgcacagtcaccttgactaacgagaagggagaaacaatagtgtataaatcactagtctcaccaaagcaaggggtctccttgaatcagattgaggcggaaaccccagtggtcaccgaggggatgaattcgaggaaattggaagaaattcccatagtctgcgagtacccagaagtgtttcccaaagacctcaccaccatgccacccaagagagagattgaattccggattgatttggccccgggaaccgccccaatctacaagagaccgtataggatggcagccaatgaactagccgaggtcaagaaacaggttgatgagcagctgcagaaagggtacatacgaccaagtacctcaccttggggtgctccggtcatttttgtggagaaaaaggataagacgaagaggatgtgcgtcgattatcgcgcactcaacgaggtcacaatcaagaataaataccctttaccacgaatcgatgacttgtttgaccaactgaagggagctaaggtgttctctaagatagacctgcgatcaggctatcaccagttaagaattcgggaagaagatattccaaagacggctttcaccacccggtacgggctgcatgagtgcacggttatgtctttcggacttaccaacgcacccgcattcttcatgaatctgatgaacaaagtgttcatggaatttctcgacaagtttgtggtggttttcatcgacgacatacttatctattcaaagtctgaagaagaacatgagcagcatctccgtctggtactcgagaagttgaaggagcaccaattatacgccaagttcagcaagtgtgacttctggttgacggaagtcaaatttctgggccatgttagacttctgggcatggcagttgatccatcgaacgtggagtcagttaccaaatggaccccaccgaagaccgtgtcgcagattcgaagttttcttagactggcgggttattaccgccaattcatcgaaaacttctccaggatcgctcgacccatgactcagttgcttaagaaagatgaaaagtttaaatggacagctgagtgcgataagagctttgaggagctcaaaaagaaattagtatccgccccagttctgattctgcccgaccagatgaaagatttccagatctggaggcactatctgattggcaaccgctgtgaagtatatacggatcataagagtctgaaatacatcttcacccaaccggatctaaatctccgacaacgaagatggttggaactaatcaaagactatgacatgagcattcactaccacccggggaaagccaatgtggtggcagacgcattaagcaggaaaagttactgcactgctctatgcatcgagggcatgtgtgaggaattgcagcaagagtttaagcggctcaacgtgggaattgttgaacacgggttcatagctgttggcggatggcatgagtcccttcgaccgaatctgccgaaacccatggcgaagaccacgagccaaggatgatgcgaggcgaagggtcgggtgagtgcatgccgaagaaagacgacttcgccaggaccggttcgccccggcatccagcccagagaaggacgacttcgccaggaccggttcgcccccgcgagggccgaagtagccttctcggcccaccaagcttagaggccatagggccggcgatcgcccgatggccatcaagggcccatgaacccccttgacgttatgtaacc

SEQ ID NO: 98244 - DNA, 2401 bp, Oryza sativa
  Clone ID: PAT_MRT4530_96169C.1
ccgggctgcaggtatgtgtgcaggtttcctgagcatcgactgtgggctagaggccaactatagcggcggatacaccgacgacggaagttacggcatcgtgtacgtacccgacggccggacggcgcatacgtcgatggaggagagaacggcagggtcgccgcccagtatgatagcgagcgcatacgtgccgaactgaccctacggagttttccctccggcgtgcggaactgctacacgctgcccaccgtcgccggtgcaaagtacctgatcagggtggtggccttctacggcaactacgacggcaagaacagctcgtcgacgttgcagttcgatctgcacctcggggtaaactactggagcaccgtaattcccgacgtcaccaacacgtacgaggcgttgttcgtggcgtgggcaaaccaggcgccggtgtgccttgtgaacactggtcagggtacgccgttcgttaacagggttgagctgaggccactcgaggatgcgctctatccggaccacgtcaaggccaaccagtctatgaacacgtatcgacgttacaccatggggaccataaatattgcgtatttatataggtatccttccgatccatacgatcggtactggtgggcagaggacagtaacccaatgtggggttatcttaactccaaacgggacatccagccggaatccatcacggaggtgccctccgcggtactccaaaaggccgtccaaccagaaaagccagccccgtcagttcaacatctacttcaacagctatgacaagccgtatctgtacagcccatcatacctggccgctggggtcgtctacagccccagttggtatggtgagagcgatggagagttcaatgtcactcttgtggccactgccaagtccgtgctgctgccgatgctcaatgcatacgagatctacacccccatcaagcataaaactcccatgactttttccaaagacgttgatgccatcatggctattaaagttgagtacggggtactaaataagaactggatgggtgatccatgttacccaacccaatatgcatgggaaggtgtgaaatgcaaaaactcaagtgaaaatattccaaggataatatctatcgatctctccaacagtaacttgcatggggtgatatccagtaacttcacttcgctcacagctctcgagtacctaaatttgtcaggcaaccaattgaatggaccaattccagattccctatgtaaactaaatgcagggctgctcgttttcagttacgagtcaaatggagatatgtgcaacaaaacaacaagcctgacccgatcaaaaaacagagcagctatcttagctatctcagtagcagctcctatgctggttgtgatcgcactttttgttgggtatttgatgtggaaagcaaaaagaaagcccaatacttctgcgtacaatcctcccagagtgccagaaccgatgaatgctccagtaagtgaaaaatatcactgggatcatctggaaaaaaatgaaaaccgccaattcacctacgaggagctggagaagtttacaaataacttccaacgattaattggacaaggaggctttgggtgcgtgtatcatggttgtttagaagaccatactgaggttgctgtgaagatccattccgaaaattcacggcatgggtttagtgagtttttagccgaggttcagagcttgtcaaaggtccatcacaaaaatctagtttctttggttggctactgctcagagaaggctcatttagcattggtttacgagtatatgtctgggggcactctttttgatcatctaagagataaaactggtgtgggcgaatccttgaattgggcatcgcgtgtgcgaattctgctagaagctgcacaaggcctagattatctgcacacaggatgcaacaggccaataattcaccgtgatgtgaaaacaagcaatattctcttgggtcaaaatctacaggctaaaatagcagattttgggctttctaaagtttatgttagcgacacgcagactcacatgtcagccacggccgctggatcaatgggctatattgacccagagtactatctaactggtagaattacggagagcagtgatatttacagcttcggtgttgttcttttagaggtagtcacgggtgagcgtccgataatacaaggccagggccacatcatccaacgtataaaaatgaaagttgtggcgggtgacatcagctccattgctgatgcgcggctcagaggcgactacgatgtcaactccatatggaaggtggtggaaattgccatgctgtgcacagaacctgtcgctgctcaaaggccaacgatggcaagcgtggttgcagaactgaaggacagtttacacctcaagtttacacatctaaagtttagagatcaa

SEQ ID NO: 98245 - DNA, 474 bp, Oryza sativa
  Clone ID: PAT_MRT4530_9616C.1
cgggctgcaggaattcggcacgagggttcgtttaacttgcatggcatgttgactaaacgagaattggcaactggaggggacagttgcagttcagtgcctgacttggctggctgtaggtacaagtattcatagtcaactaataaacggaatacatctcctcgtgctaattgcaggtccttttcatgacagaacttactcaagaacgaaatgaaatctgcatatagtcagtagcaactaaatttacattttctgtatgtaaatttacatttagtgtaggatttatgggcaatggctgagttcgacaatacgagggacttataataggtgtctccccaagctgaaaactgagcagattttggtagtgcttctgtaattaaaaatgccaactgacctattgattttttttttaaaaaaaactttcctattgattaattagtggagatattaccttactaacattctctttacctttat

SEQ ID NO: 98246 - DNA, 5240 bp, Oryza sativa
  Clone ID: PAT_MRT4530_96170C.1
atggccgactgtcccctcacgcaccaaggtcagactatgggaggcttcgttgcagagttgtcccgcatagcgtttgtgattggttttccaagggagccgcagtacaccagcattcaccccctcagtggcgaattcccgcatcaggtccgcttggagattcatgacatacccacctacctgcccaacatggaggtgacagcttgtgggggcacatttgagcatgcttgtgaggaggccgccctcaggatgatggcccatctgagggagctgcatgacggcgtcctgaacaccaccgcctaccgcttccacccttgccgcggttccagctccaacagcagcaccttcaagtcagcgtggggagagaacgacgtcaccttcggccacatgagtgacgtgatgaggagctacgacaagttgcacgccatgctccacaaagcgaccaagagtctcaacgaccagaagcttgtgaggatcgcagatctgcaggatgagaacgctcgactcaagaaggaggtccctaggctttagggacgtccaccgccaggaggagcccgcatccgcaccacgccaaggaagtcgaccacagctccagtgcgcatccagcttgcgcctaggaacccgccgcagcctccacctctagcaccgcctgcagctccggcgccagctccagttctagctccagctccatctaccgcagcatcttcagcccccgtgctagagttcggcttcactttcgtgccagcttcggcctacaggggtctagcaggtggcagtggaggatgcttcctttagatggtcaacactaggaatggcagccgtgcagcaggtgagggcaacaacagcgaagaacgcaccgacggtggataccccaacagtgcctccggcaatggtccgccaccgctccccgagaatccgactcttgcataagtgatggcccatcagacccagatgatggcagccatgatgtagcagatgcagcagcagcaccagcagatgcaccagaggatgcagcagcaggctgagcagcagcaacagcagtttggtccccctcccccttagtccaagctgctggagtttctacgagtcaggccacccaccttctccagcaccaccaaccccatggaggcaaatgactggctccatgccatagagaagaaactcaatcttctgcagtgcagtgataaggagaaagtcgccttcgccacacaccagctccagggtcccgcgtcagcttggtgggacaaccacatggctacccgtccgccaggcacagaggtcacctgggcagaattctgtcgcagcttcaggaaggctcaggtgctagacgaggatgtggcacaaaagaagagagtattccgggcactccaccaaggcaacaggacagtaaccgagtacttgcatgagttcaatcgcctagcgcgatatgcaccggaggatgtccgcactgacgcagagaaataggagaagttcctagcgagcctggatgacgaactgaccaaccagttgatctccggggattacgctaacttcgagaagctggtagacaaggcaatccgtcaggaggaccagcgcaacaaaatggataggaagagaaaggcaactcagttccgatccaaccaaggaagtcatcagcgaccgtgcttcacttccggataacagggtggacctaccaccatgattgttcgacagcatcatccttacaacccaagcaacttccatcccggcagcagtggcagccatcttggctaagggcagcacaaccgcggcgcagccccacgcccgccaatggcgccagttcagcagactgcacccgttcccccaaagaaggacaccggaggcaagccaggagcctgcttcaactatggtgagtctggtcacttcgccaacaagtgcccgaagccgaggcgcgctggacccaagtttgtccaggctcgggttaaccacgcgtccacagaagaggcgcaagcagcaccagaggtcgtattgggtacgtttcctgttaactcaatccctgcaacagtacttttcgattctgatgcaacgcattcattcatttcaaagaagtttgttggggtgcatgggttaagaaaagaagagcttagtacaccaatgagggttcataccccgggaaatagttcaacctcggtcagttatagcccttccgtgctaatagaaatccaaatatcacgatttctacccaacctcatccttctcgaatccaaagacctagatgtcatccttgggatggattggctgaccaagttcaagggtgtcattgattgtgcgaatcgcacagtcactttgaccaatgagaagggagaaaccatggtgtacaagtcaccagtctcaccgaatcagggaatctccttgaatcagattgaggtggaaaatccggtggtcaccgaggagaagggttcgaggaaattggaaggtattcccattgtctgcgagtatccagaagtgttccctgaggacctcactaccatgccacccaagagggagatcgaattccggattgatttggcaccgggaactgctccaatttacaagagaccgtacagaatgacagccaacgtgctagcagaggtcaagaagcaggttgatgagcaactgcagaaagggtacattcgaccaagtacttcaccttggggtgctccagtcattttcgtggagaagaaggacaaaacgaagagaatgtgtgtcgattattgcgcactcaatgaggtcaccatcaagaacaaatatcctttgccgcggatcgatgatctatttgatcagctgaaaggagccaaggtgttttccaaaatagacatacgatcaggctatcaccaattgagaatccgggaagaggataatcccaagacagccttcaccactcagtatgagttgtatgagtgcacggttatgtcttttgaactcaccaatgcacctgcattcttcatgaacctgatgaacaaagtgttcatggaatttctggataagtttgtcatggtattcattgacgacattcttatctattccaagtcggaagaagagcatgagcaacatctccgtctggtactcgagaagttgaaggagcactagttatatgccaagttcagtaagtgtgacttctggttgtcggaagtcaaatttctgggtcacgtcattacggcccaaggtgtggcagtggatccatcgaatgtggagtaagttacctagtggaccccacctaagacagtgtcacagatttggagtttccttggacttgcgggttatttccgtcggttcattgaaaatttctctaggattgccagacctatgactcagttgcttaagaaagaagaaaagttcaagtggacggccgagtgtgacaagagttttgaagagctcaagaataaattagtgtctgctccagttctgattctgcccgataagacgaaagacttccaagtcttctgcgacgcgtcccgccaagggctaggatgtgttctgatgcaagaaggtcaagtggtcgcatatgcctcgcggctattgcgcccacatgaaagcaattatcctacccatgatttagagttggcagcagtagtccacgctctaaaaatctggcggcactacctcgtcggtaaccgttgtgaagtttacacggatcacaagagtctgaagtatatcttcacccagcctgatttgaatctccgacagcgaagatggttggaattgataaaagattacgacatggggatacactaccatccaggcaaggctaatgtagtagcagacgctctgagcaggaaaagctactgcaacgccttgggtattggagacatgagtgacaagttgctacaagagcttgaacccctcaacttaggaattgtagaacacgggtacgtggctgcccttgaggcacagcccatgctcgtggaccaggtccgagcagctcaggtaaatgatcctgaaatagctgagctgaaaaagaatatgagggtcggaaaagcccaggatttccatgaagatgaacatggcacaatctggttgggagaaagatttgaaagacctgatactcaccgaggctcatcagactcaatactccattcatccaggaagtacaaagatgtataaagatctcaaggaaaaattttggtgggccagcatgagaagggaaatagtggagtttgtcgcactctgcgatgtttgtcagcgagttaaggcagaacatcagagacccgcaggattattacaacccctctagatcccggaatggaaatgggaagaaattggaatggatttcatcacgggtttgcccaggacatcatcagggcacgattgtatctacatgggtcatgtgtctgcatggggtacctaagaagattgtatctgatcgagggagtcagtttacctcaaaattttggcagaagctgcaagaggaattggggacccgtttaaatttcagcacagcttaccatcctcagacagatggccagaccgagagggtcaatcagatcttggaggatatgctgcgagcctgtgcactcgattttggcggagcttgggataagagtctgccttatgctgaattctcttacaacaacagctacgaggccagtttacaaatggctccatttgaagcattgtatggccggaagtgccgcacacctctcttttgggatcaaaccggcgaacgtcagttgttcgggacagaagtgctaactgaggcagaggagaaagtcagaactatcagggaaaggctgaggattgcacaatctcgacagaaaagctacacagacaaccgtcgaagagagctcacttttgaagtgggggattatgtgtaccttcgtgtcactccgctccggggagtgcaccgtttccagataaagggcaagttggcaccacgcttcgtgggaccatacaaaatcttggaacaaagaggagaagttgcatatcagctagaactcccatccaacatggccggtatacatgatgtgttccatgtgtctcagttaaagaagtgcttaagggtactgggagaacaagccaattcggagcacatcgatatccaagaagatctgacttatgtggagaagccagttcgcatccttgagaccaatgaaaggaggactagaaacaaggtcaccaggttctacagggttcagtggagccaccactcagaggaagaagcaacctgggaaagggaagatgagttgaaggccgcccatccgcacctcttcgccagctcttccgaatctcggggtcgagattccgtt

SEQ ID NO: 98247 - DNA, 4671 bp, Oryza sativa
  Clone ID: PAT_MRT4530_96171C.1
atgggttgcaagatggccgaccacccacccaaccaccgcggagaaggcatgattgactttgtggcagagttggcacgtatgacgctggtggtgggctaccccaacgcgccagagtacacgactgttccacctctcagtggtgagcttcctcaccgtgtccgcctggaggtccatggctacgtgggtacctgcctagctaatatggtggttgaggcgtccggaggcatagcagatcacgcctgtcaggaggcagcatacctgatgatgcccagactacgggagcgccacaactacatcttccacgacacggcgtaccaatttcaccctcgtcgagccagcggtgatgatgtcagtaccttccgtccaacagccggtgagaacgacaccaccttcggccacatgtgcgccgtgatgaggggaatggataggatgcactcgaatctacacaaggcgtccaaggccttgaacgatgggaagctcgtgaggatcatagctctgaaggatgagatagcacgcctaaagagggagaatgctcaattgaagggtctcccagcgccaggaggagtccggatccgcaccacgccccgcaagtcgacgactgcacctatggtctacaccaggaatggtagccgtacaacaggcgagggcagcaacggcgaagagcgcactgatggtgtgcatcccaacagcgatttcggcaatggtccgccaccactccccgagaatccgacccttgcccaagtaatggctcatcagacacagatgatgacagctatgacgcagcaggcaagtgccagatgggttgtggcacaaaagaagagggaattccgggcactccaccagggcaacaggacagtgacggagtatttccatgagttcaatcgcctcgcgcgatatgcaccggaggatgtccgtaccgacgccgagaagcaggagaaattcctagcaggtctggatgatgagctaaccaatcagttgatatctggagattacgccgactttgagaggctggttgacaaggcaatccgccaggaggatcaacgcaacaaaatggacaggaagagcaaggcggcgcagttccggtcaaaccaagggagccaccagcgaccgcgcttcactcccggacagcagagtggacctaccaccctgatcgtccaccagcaccgccctttcaatgccagcaacttccatcagggtgccagtggcagccagaaccaccatggtggtcagcccaaccgcagtgcagctccgcgcccacaaatggcactagcacagtcagctacgtccgcgcaagccaagaaggagactgggacaaagccagggtcctgcttcaactgtggcgagcttggccacttcgctaagaaatgcccgaagcctaggcgtgccgagccaaggtttgtccaggcccgtgtcaaccacgcatctacagaggaggcacaagcagcaccagaggtcgtactaggtacgtttcctgttaactcaatccctgcaacaatactttttgattctggtgcaacgcattcgttcatttcaaagaagtttgttgggatgcatgggttaataagagaggaacttagcacaccaatgcgggttcataccccagggaatagctccacttcggttcaattcagcccttctataacaatagaaattcaaagatcaccatttctggccaacctcatccttctcggatccaaagacctagatgtcattcttgggatggattggctgaccaagttcaagggagtcattgattgtgcgaatcgcacagtcaccttgaccaacgagaagggagaaacagtagtgtacaaatcaccagtctcaccaaagcaaggggtctctttgaatcagattgaggtggaaatcccagtggtcaccgaggagaagaattcgaggaaattggaagagattcccatagtctgcgagtacccaaaagtgtttcccgaagacctcactaccatgccacccaagagagagattgaattccggattgatttggcaccgggaaccgctccaatttacaagagaccgtacaggatggcagccaacgagctagcagagaagaaggacaagacaaagagaatgtgcgtcgattatcgcgcactcaatgaggtcacaatcaagaacaaatatcctttgccgcggattgatgatttgtttgatcagctgaaaggagctaaagtgttttctaagatagacctgcgatcaggctaccaccagttgagaattcgggaagaggatattccaaagacggccttcaccactcggtacgggctatatgagtgcacggttatgtctttcggacttaccaacgcacccgcattcttcatgaatctgatgaacaaagtgttcatggaatttctggacaagtttgttgtggtattcatcgatgacatacttatctattcaaagtccgaagaagaacatgagcaacatctccgtctggtactcgagaagttaaaggagcaccagttatacgctaagtccagcaagtgtgacttctggttgtctgaagtcaaatttctacgtcacgttattacagctcagggcgtggcagttgatccatcgaatgtggagtcaattaccaaatggaccccacctaaggccgtgtcgcagattcggagttttcttggacttgcgggttattaccgccgattcattgaaaacttctccaggatcgcccgacccatgactcagttgcttaagaaagatgagaagtttaaatggacagctgagtgcgacaaaagttttgaggagctcaaaaagaaattagtatccgcaccagttttgattctgcccgaccagatgaaagacttccaagtctattgcgatgcatcccgccacgggcttggatgtgttctaatgcaggaaggtagagtggtctcatatgcctcgcggcagttgcgtccacatgaagggaattatccaactcatgatctagaattggcagcagtggttcatgctttgaagatctggaggcactatctgattggcaaccgctgcgaagtatatacggaccataagagtctgaaatacatcttcacccaaccggacctaaatctccgacaacgaagatggttagaactaatcaaagactatgacatgagcattcactaccacccgggtaaagccaatgtggtggcagatgcgctaagcaggaaaagctactgcaatgccctatgcatcgagggcatgtgtggagaattgcagcaggatcttgagcgtctcaacgtgggaattgttgaacacgggttcgtagccgctctggaagcacagcctacgctcgtggatcaagtcagagcagctcaagtaaatgaccccaaaatagctgaactgaaaaagaatatgagggtgggaaaagcccgggacttccttgaggatgaacatggcacaatctggatgggagaaagattgtgtgtacctgacgacaaggaactgaaggatctgatacttatcgaggctcatcagactcagtactcaattcatccaggcagcaccaaaatgtataaagacctcaaagaaaagttttggtgggtcagcatgagaagggaaatagcggaattcgtcgcactctgcgacgtttgccaacgagtgaaggcagagcaccaaaggccagcaggtttactccaacctcttcaaatcccggaatggaaatgggaggagattggaatggactttataataggactgccccggacatcatcgggtcacgattcaatctgggtagtcgtggatcgactcactaaggttgctcacttcataccagtacataccacgtatacgtgcaaaagggagccaattcacttcaaagttctagcagaaattgcaagaggaattgggaacccggttaaatttcagcacagcctaccatccgcagaccgatggtcagacagaagagtcaatcaaatattggaggacatgttaagggcttgcgcacttgattttggtggagcttgggacaaaagcttgccgtatgcggagttctcttacaacaacagttaccaggctagccttcaaatggcactgttcaaagcattatacggtcggaagtgccgcacacctctcttctgggatcagacaggcgaacgtcaactgttcggaacagaagtgttagcggaagcagaagagaaagtcaggactgtcagagagaggctgaggattgcccagtctcgacagaaaagctacgcggacaaccgccgacgagagctcacttttgaagcaggggattacgtgtatcttcgtgttactccactccggggagtgcaccgttttcaaacgaaaggcaagttggcaccacgcttcgtgggaccatacaaaatcttggaacaaagaggagaagttgcgtatcagctagaacttccatccaatatgatcggtatccatgacgtgttccacgcatcccaattaaagaagtgcttgagggtacccaaagaacaagccaattcggagcacatcgatatccaagaagatatgacgtatgtggagaggccagttcgtatccttgagaccagcgaaaggaggactagaaacaaggtcaccaggttttgccgggttcagtggagccaccattctgaggaagaagcaacctgggaaagggaagatgagttgaaggccacccatccgcacctcttcgccagctcctccaaatctcggggtcgagatttcatttaa

SEQ ID NO: 98248 - DNA, 216 bp, Oryza sativa
  Clone ID: PAT_MRT4530_96172C.1
atgggcggcggcgacggcagtggcgatggcactggcagcgggagtgtgccgccggaggtggaggtagcgacggcggcggtggcggtgtcggcggcgacgatgcgaggatgccctagagatgaagccgatgaggccgagatcgaagcagaaaatcgtctaagtattggtggagaagacgccgccgcctcgggcctatatataccccttgatatttag

SEQ ID NO: 98249 - DNA, 1869 bp, Oryza sativa
  Clone ID: PAT_MRT4530_96173C.1
ctcatttcagaggaatcatataccgacaagagggcagggtggtcgcgtatgcctcgcggcaactgcatccacatgaaggaaactacccaacacataacttggaattggcagcggtggttcatgctttgaaaatctggaggcattatctgattggtaaccgctgtgaagtatatacggatcacaagagtctgaagtatatcttcacccaaccggatctaaatctccgacgacatgagcattcactatcatccgggcaaagccaatgtggtggcagatgcattaagcaggaagagctactgcaatgctgcatgcaccgaaggcatgtgtaaggaattgcagcaggagcttgaacacctcaacttggggcttgtagaatatgggtacgtggctgccctagaagcacgacccacgctcacggatcaagtcagagccgctcaagtaaatgatcctgaaatagcagagctgaaaaagaacatgagggtcggaagagcccgggatttccacgaagatgaacacggcacaatctggttgggagaaaggttgtgcgtaccgaatgacaaggaattaaaggatctgatactcaccgaggctcatcagactcagtactccattcatccaggcagcaccaaaatgtaccaagacctcaaagaaaagttttggtgggtcagcatgagaagggaaatagctgaattcgtcgcactctgcgacgtttgccaacgagtgaaggcagagcaccaaaggccagcaggtttgcttcagcctcttcagatcccagaatggaaatgggaagagattggaatggactttataacaggactgccccggacatcatcgggtcacgattcaatctgggtagtcgtggatcgactcactaaggttgctcacttcataccagtgcataccacgtatacgggaaagaaattggcagagctgtacctggcaaggatcatgtgtctgcatggggtacctaagaagattgtatctgatcgagggagtcagttcacctcaaaattctggcagaagctgcaggaagaattagggacccgtttgaatttcagcacagcctaccatccgcaaacagatggccagaccgagagggtcaatcagatcttggaggatatgctgcgagcttgtgtgcttgattttggtggagcatgggataaaagcctgccgtatgcggaattctcgtacaacaacagctatcaggccagtctacagatggcaccgttcgaagcgttgtatggccggaagtgtcgcacccctctcttctgggatcaaacaggcgaacatcaactgttcgaaacagaggtgttaacggaagcaaaagagaaagtcagaactatcagagaaaggttgagaattgcccagtcttgacaaaagagctacgcagacaaccgccgcagggaactcacttttgaagcaggggattacgtgtatcttcgcgttactccgctccggggagtacaccgtttccagacgaaaggcaagttggcaccacgcttcgtgggaccatacaaaatcttggaacgaataggagaagtggcttaccagctagaacttccatccaacatgctcggcatccatgatgtgttccatgtgtcccagttaaagaagtgcttgagggtacccgaagaacaagccgattcggagcatattgacatccaagaagatcttacctacggggagaagcccgttcgtatccttgagaccagtgaaaggaggactaggaataaggtcaccaggttctgcagggttcagtggagccaccactcagacgaagaagcaacccgggaaagggaagatgagctaaaggccgcccatccgcacctcttcaccagctcttccgaatctcggggccgagattccgtt

SEQ ID NO: 98250 - DNA, 166 bp, Oryza sativa
  Clone ID: PAT_MRT4530_96174C.1
ctaacatgtggggtctacatggggtttacgctgactcagccgccacgtaagctaaaaccggggtcaaaaccaccgaagacctaaagcgaatggttttgttagttgagggacgtcggtttctggttttgcggtttgaggacgattttgtatctcgatgacaagttga

SEQ ID NO: 98251 - DNA, 666 bp, Oryza sativa
  Clone ID: PAT_MRT4530_96175C.1
atggccgaccaccaacccaaccaccgcggagacggcatggatgattttgtggctgagttggctcgcatgaccttggtggtgggctaccccaacgcgccggagtactcgaccgttccgccgctcagtggcgagcttccccaccgtgttcgtctggaggttcattgctatttgggcaccagcctcgctaacatggtggttgaggcatctggaggcaccgcagatcacgcctatcaggaggcagcatacctaatgatggccaggcttcgtgatcaccacagctacatcttctgcaacacggcgtaccgtttccaccctcgccgagcaagtggcaacgatatcagcaccttccgcccgacagtcggcgagaacgacaccaccttcggccacatgtgcgccgtgatgaggggaatggacaggatgcactctgacctgcacaaggcatccaaagccttgaatgatgggaagcttgtgaggatcatagctctgaaggatgagatagcacgcctgaagaaggagaacgctcagttgaagggtctcccagcgccaggaggagtccggatccgcaccacgccccgcaagtcgacgactacacccgtacgcattcagcttgcacacagggacccacctcctcccgcagtgtcacgctatgaaaatcgcctattttaa

SEQ ID NO: 98252 - DNA, 545 bp, Oryza sativa
  Clone ID: PAT_MRT4530_96176C.1
ttgccagttagcaggaactttctcatgaggttcttgaccacagggcgaagcatggcctggaaagcacatgttctggtggctgttctactggcagtggttgctgtgaccgccgtcaatgcgcaatccgggtcgccccaaagtaaccagactgctgcggtagcaaatgcgaccctctcccaaaaccagaccgccttctccgctctagtgtcaagcctcgaaacagccctccaagctcggctcaacctcttcgctcttaacaccacccaaaccctccaatccctaaacctgtctcagcccatcaccggtgtcgcatctgtaaacctcacggggctagctccaaactcgagcaccatcaatgacgcttctctcatttcaaatccaggtctgaggtccgacctcacagttcctgcttgctcctcctatctgttcaatgtcacctacccgggtaacaggaccctctgcctgggtctatctttcaccccctctcagaacgccaccgctctgtccagcaattctagctccgaccaaacgctccctctgaatgg

SEQ ID NO: 98253 - DNA, 4461 bp, Oryza sativa
  Clone ID: PAT_MRT4530_96177C.1
atggtctacaccaggactggtagccgcgcaacaggcgagggcagcaacggtgaagaacgcgctgatggtgtgcaccccaacggtgattctggcaatggtccgccaccacttcccgagaatccgacgcttgcccaagttatggcacatcagactcagatgatggccgcgatgatgcagcagatgcagcagcagcaccagcagatgcatcagaggatgatgcagcacgccgaacagcagcaccagcagtttggtccccctccccctcagtccaagttgcctgagtttctacgtgtcaggccacccaccttctccagcaccaccaaccctatggaggcaaatgactggctccatgcgatagagaagaagctgaatctcctgcagtgcaatgatcaggagaaggtcgctttcgccacacaccagcttcagggtcctgcgtcagcttggtgggacaaccacatggccacccgcccaccgggtacggaagttacgtgggcagagttctgccgtagctttaggaaggcacaggtgccagacggggttgtagcgcaaaagaagagggaattccgggcgctccatcagggcaacaggacagtgacagagtacctccacgagttcaatcgcctcgcgcgatatgcaccagaggatgtccgcactgacgccgagaaacaggaaaagtttatggcaggcctggatgacgagctgaccaaccaactgatatccggggactacgctgactttgaaaggctggtcgacaaggcaatccgtcaggaggatcagcgcaacaaaatggacaggaaaagaaaggcggcgcagttccgatccaaccaaggtagtcagcaccgaccgcgcttcactcccggacagcagggtggacctaccaccatgatcgtccgacagcaccgcccgttccactctagcaacttccaccagggcgctagcggcagtcagaaccaccagggaggccagcccaaccgcggtgcagctccacgcccaccaatggcaccggcacagtcagcccagcccgcgcaagccaagaaggagacgggagcaaaaccagggtcttgcttcaactgtggcgagcttggccacttcgctgacaaatgcccgaagcccaggcgtgccgggctaaggtttatccaggctcgtgtcaaccacgcgtctgcggaggaggcacaagcagcaccagaggtcgtactgggtacgttccctgttaactcaatccctgcaacagtactttttgattctggtgcaacgcattctttcatttcaaagaaatttgtggggatgtatgggttaaggaaagaagagcttagcacaccaatgagggttcataccccgggaaatagttcaacctcagtcagttttagcccttcagtgctaatagaaatccaaagatcaccatttctagccaacctcattcttctcgaatccaaagacctagatgtcattcttgggatggattggctgaccaagtttaagggagtcatcgattgtgcgaatcgcacagtcaccctgaccaatgagaaaggagaaaccgtggtgtacaaatctctagtctcgccaaagaaaggagcctcgttgaatcagattgagacggaaatcccagtggacaccgaagagaagaacttgagaaaattggaggacatacccatagtctgcgagtatccagaggtgttccccgaagacctcaccaccatgccacccaagagggagattgaattccggattgatttggcaccaggaaccgctccaatctataagagaccgtacagaatggcggccaacgaattagcggaggtcaagaagcaagttgatgaacagctgcagaaagggtacatacgaccaagcacttcaccttggggcgctccggtcatttttgtggagaaaaaggataagacgaagaggatgtgcgtcgattatcgcgcacttaacgaggtcacaatcaagaataaatatcctttaccgcggatcgacgatttgtttgatcaactgaaaggagctaaagtgttttctaagatagacctgcgatcaggttaccaccagttgagaatccgggaagaggatattccgaagacggccttcaccactcggtacgggctatacgagtgcacggttatgtctttcggacttactaacgcacccgcattcttcatgaatctgatgaacaaagtgttcatggaatttctggacaagtttgttgtggtattcatcgacgacattcttatctattcaaagtccgaagaggaacatgaacaacatctccgtctggtactcgagaagttgaaggagcaccagctatacgccaagttcagcaagtgtgacttctggttgacggaagtcaaatttctgggtcatgtcattacagctcagggtgtagcagttgatccatcgaacgtggagtcagttacaaaatggaccccaccaaagaccgtgtcgcagattcggagttttctaggactggcaggttattaccgccgattcatcgaaaacttctccagaatcgcccgacccatgactcagttgcttaagaaagacgagaagtttaaatggacagctgagtgcgacaagagctttgaggagctcaaaaggaaattagtatccgcaccggttttgatcctgcccgaccagacgaaagacttccaagtctattgcgatgcatcccgtcacggacttggatgtgtcctaatgcaagagggcagagtggttgcatatgcctcgcggcagttgcgtccacacgaaggaaattatccaactcatgacttggaattggcagcagtggtccacgctttgaagatctggaggcactatctgatcggcaaccgctgcgaagtatatacggaccataaaagtctgaaatacatcttcacccaaccagatctaaaccttcgacaacgaagatggttggaactaatcaaagactatgacatgagtattcactaccacccgggtaaagccaatgtggtggcagacgctttaagccggaaaagttactgcactgctctatgcatcgagggcatgtgtgaggaattgcggcaggagtttgaacatctcaacgttggaattgttgaacacgggttcgtagccgctctggaggcacggcctacgctcgtggatcaagttagagccgctcaagtaaatgatccggaaatagcagaactgaaaaagaacatgagagtcggaaaagctcgggatttccacgaggatgagcatggcacaatctggatgggagaaagattgtgtgtaccggacgacaaggaattgaaggatctgatactcaccgaagctcatcagacccagtactccattcacccaggcagcaccaaaatgtaccaagaccttaaagaaaaattttggtgggtcagcatgaggagagaaatagctgaattcgtcgcactctgcgatgtttgccaacgagtgaaagcagagcaccaaagaccagcaggtttactccaacctcttcaaatcccggaatggaaatgggaggagattggaatggactttataacaggactgccccggacatcatcgggacatgattcaatctgggtagtcgtggatcgacttaccaaggtggctcactttataccagtacataccacctatacgggaaagagattggcagaattgtacctcgcaaggatcatgtgtttgcatggggtacccaagaagatagtatccgaccgaggtagtcagttcacctcaaagttctggcagaagctgcaggaagaaatggggacccgtttaaatttcagcacggcctatcacccgcaaactgatggtcagacagactaccaggccagtctacagatggcaccgtttgaagctctatacggccggaagtgccgcacacctctcttctgggatcagacaggcgaacgtcagctgttcggaacagaagtattagcggaagcagaagagaaagtcagaatcatcagggagagattgaggattgctcagtctcgacagaagagctacgcggataaccgtcgaagggagctaacttttgaggccggagattacgtgtaccttcgtgtcaccccgctccggggagtacaccgctttcagacaaaaggcaagttggcaccacgcttcgtgggaccgtacaaaattttggaacgaaggggagaagttgcctatcagctagaacttccatccactatgatcggcatccatgacgtgttccatgtgtcccaattaaagaagtgtttaagggtacctgaagaacaggctaattcggaacacattgatatccaagaggacctaacatatgtggagaagccggttcgcatacttgacactagcgaaaggagaaccagaaacaaggtcaccaggttttgccgtgttcagtggagtcatcattcagaagaggaagcaacctgggaaagggaagatgagttgaaggccgcccatccgtacctcttcaccagctccaccgaatctcggggccgagattccgtttaa

SEQ ID NO: 98254 - DNA, 1285 bp, Oryza sativa
  Clone ID: PAT_MRT4530_96178C.1
cgcgtccgatcaggtgacaccgaacgcgcgccgcgccgcgccgtgccacgcccgttcgtcccatgtcctcggcggcggtggcggcggcgaagctctgatccattgactagctagctcggccatgcgcgagtccgtcgaggaagccgtccaccacgccgtcgtcgctgtcgccgccgcggcggtcgtggcgctggccgtcgcgctgttcctgctctggcgcaacaagcgcgtggcgagagcgggcggtggcgccggcggtggtggtggtggtggtgatggcgacggtggtgcgattgcggttgcggtggcgccgttgccggtggtcccgctggccgacgtggagcgcgccaccgacgggttccacccgagcagggtgatcgggcaggggaggcacttcaccgtgtacgcggcggcgccggggctcgccgccaagcgcatgcggccgcacctcgtgctcggggagcccggcgggcggcggttccccgccgcgctccggtcgctcgccgtgccgccgcaccccaacctcgccggcatcgtcggcctctccgagggccccggcgagcgcgtcctcatcgtggagcgggcgtccgccgggtcggtaggcctaaacgccctcctctaccacggcggcaccgacgcgccgctgctgccgtggccggagcgcgccgcggtcgccgcgggcgcggcgcgggggctggtgcacctgcacgcgcacggcgtggcgcacggccgcgtcaggccacgcaacgtgctcgtcgacgcggccgccgcggcgcgtggcccctgcggcgtcagggtcagcgactacgggctgtccaccttcctccacagcgacgacggcgacggcgacgaccacggccgcctggacgcccgcgcggagaacgacgtctacatgttcggcgcggtgctcctccacctcctcaccggccggcaatgggacggcggccggctggcgcactgggcgctcccgctgatacgcgccggcccgccggcgctggcggaggtgctcgacgagcgcgccggcaagccggcggacaaggccgagtcccgcctgctcgcgcggacggccagggtggcgctggcgtgcgtggcgaacgacgggcgcagccggccgcggatggcggaggtgtccgccatcctcgacgacgtggaggcggcgtaccggcgccgcggcaggtcgccggaacacgacgtggacggcggcgaggagcggttcagtgggtgccttctcgcgccgagccggagcgcgcacagatcggagacgctgctccggcttcccgtgtga

SEQ ID NO: 98255 - DNA, 250 bp, Oryza sativa
  Clone ID: PAT_MRT4530_96179C.1
atctgcagaatgtcagcggggagccgactattcctcgttccagggtgtttgctgggccagtcactcgtctagccatgatcgcgatgggatgtgaggtgggcctgccttaattgagatgtgtcctcgtacgacggaggttcatctattggccacttcgagagatccagatatcctgcacatacaactgtgtagccgagctggcttccatcgtcctggccgcagtagagagtctgtatcacatatcttgggg

SEQ ID NO: 98256 - DNA, 396 bp, Oryza sativa
  Clone ID: PAT_MRT4530_9617C.1
atgtgtggtgcaacttgggctgaagactggggtctggggattcagactcaagatcctgacgatgatggaatggatgacaatccccttttatgcgatagaaaggttcagatgtctgtaaaagaatgtgccggcggcgggcaggcaggcggcggcctgtggccggggggccgcgcgaggcggcgggcaggccggcggtggccgtgccgggcggtgccgagcaggcctggcggcggcctgtggccggggaccgcgcgctgcggcggcggctggcggggccgcgccccgcagcagcgggcaggcagccggcggctggcagggccgcgccccgcggcggcgggtaggcggccggcggccgcctgggccgtgcccggcggcagcgagcggccggatttgtga

SEQ ID NO: 98257 - DNA, 613 bp, Oryza sativa
  Clone ID: PAT_MRT4530_96180C.1
atggtcgaggtcctggaggaggaggaggcggtggcgttcacccccactccatctgggagtggggattctagcgagagccgtggccctcgtcaccaccgccgcgactctccaactcctccccgccacgaaccctcgcggagggaggatcccacccgttcaggtggttcggccctctccccgcccctgggcgaagagaggccacgacgcgtcggggcacggcgccgcctcacttacggtgatggcggctcaccccgaggcacgcttcaggcggcgggcgcccttctgcggcatccccccgtgaactcggagccggagacccctgttcagcgctggctagacgacgtggccaacttggtcaccactgcccagcggcaattggccgcgggcggccgacccgccgccaccggtatgtcgcgtacccccgttaccctctcctcgtcagcaaggaggagggcccgtcagtcggccatggcctcaaggcggtccacggctccaacgtcgtcgggagcctcgggaagccggaggcgtcatgacggtctctacggggagcaggacgctcagatcaatatcgagcgacgccgggacgagcgtcgagctgcccgcatgggggaag

SEQ ID NO: 98258 - DNA, 394 bp, Oryza sativa
  Clone ID: PAT_MRT4530_96181C.1
aatgaggtcacgatcaagaacaaatatcctttaccgcagattgatgatttgtttgatcagctaaaaggagctaaagtgttttctaagatagacctacgatcaggctatcaccagttgagaattcgtgaagaggatatccccaagacagccttcaccactcggtatgggttgtatgagtgcacggttatgtcctttggacttaccaatgcacccgcattcttcatgaacctgatgaacaaagtgttcatggaatttctagataagtttgtggtggtattcatcgacgacatacttatttattcaaagtctgaagaagaacatgagtaacatctccgttggtactcgagaagttgaaggagcactacttatatgccaagttcagggctgcaggaat

SEQ ID NO: 98259 - DNA, 582 bp, Oryza sativa
  Clone ID: PAT_MRT4530_96182C.1
atggccagacttcgtgagcgcgacaactacatcttctgcaacacggcgtaccgtttccaccctcgccgagcaagtggtgacggtgtcagcaccttccgtccgacagccggtgagaacgacaccaccttcggtcacatgtgcgcaatgatgaggggaatggacaggatgcactcggatctgcacaaggcgtccaaggccttgaatgatgggaagctcgtgaggatcatagctctgaaggatgagatagcacgcctgaagaaggagaatgctcacttgaagggtctccccattcccggaggagtccggatccgcaccatgccccgcaagtcgacgactgcacccatggccaacaccaggaatggcagccgtgcagcaggtgagggcagcaacggcgaagaacgcaccgacggtgggtatcccaacagcgcctccggcaatggtccgcccccgctccccgagaatccgactcttgccccagtaatggctcatcaaactcagatgatggcagccatgatgcagcagatgcagcagcggcaccagcagatgcaccagaggatgcagcagcaagccgagcagcagtag

SEQ ID NO: 98260 - DNA, 409 bp, Oryza sativa
  Clone ID: PAT_MRT4530_96183C.1
tttccctttcgacaaaaagatggagtatttgaataaaaaaaaaaataaaaaaaaaaaaaaaaaaaaaggaaaggaaaaaaaaaaaaaaggaaaaaaaaaaaataaaaaaaaaaaacaataaaaaaaaacataaaaaaaaaaaaaaaaaaaaaaatagggccggcctctttaaagaaccaaattttcctccctcggcctaccaagaacatactttttttttggttccacaaaaattaatttcccggcccttattttccaaccctgggaactgaaaaacccttggtgtgaccaattttattccctttgaaacaatcccctttttcgctaggtggtttaataggaatatgcccctcccattccccctttccaaaaatgcgccatccctaattgtatattggccccccccttt

SEQ ID NO: 98261 - DNA, 251 bp, Oryza sativa
  unsure (1)..(251): unsure at all n locations
  Clone ID: PAT_MRT4530_96184C.1
gaaaaaaaaaaaggaaaatcgtgtctcgtctcgtctcgtcttcgtctcccccaattcccgagcagcttctcgaaaccctcgcngcctcgattccggcgatggcggaccaacccgcaagtggagagggaggtggaggtggaggaggtnaggaggccgaagctgaggtacttggagttcgtgcaggttgcggcagcanngcnacgatctncctcgnngggctctacncgcttnccaaggaccacgccggcccg

SEQ ID NO: 98262 - DNA, 193 bp, Oryza sativa
  Clone ID: PAT_MRT4530_96185C.1
gtgagcgacgcaaaacctcgcgaaatccaggacgcgcagcgaggagaagacccgggtagcgcgcgttgtgggcggcgtagcctcgccctcgcgtcgaaaccgtagcgcgaaatccccgattcaccctcccaaaacccattcccgccataccgatttccctctgccgccaccaattcctctgctcccgcgccaa

SEQ ID NO: 98263 - DNA, 1023 bp, Oryza sativa
  Clone ID: PAT_MRT4530_96186C.1
atgggcaaggaggctgacacgtgggctcgggtatttgggcccacctgtcagcgtgggcgactgtcccgcgcgttccgcgtgaggaagtcgcgtggaccggcatgcgactggcgctgcctggccacctccctcaacttcctcctcacccaccaccgccaccagttgtcgcacctgctcgtcttcagctgcacgaggtggaggagcaacgccgccgccgccaccgatgccgcggtggattccgtcgacctcggccaccaccttgatgagctagtgcgtgatggggacctcgccgacgggggatggaccaccagaggagtggtaccgcgggcggtcatcgtcgccagagttggcgcggtagagcttcttgacgagctcttcttcttctccttcccgccggagctggagacgacggcgtacctctccatcttgcagtcttctcccccatcggcgccggcgacgtcgcctcgcaccgaaagccgttggacgcgagcacagcaccaccactggtgccaacagcaatgccgctgccatcgtcgtcctagcacagctcagcctcatgccctcagctacgacgacgcacgtccaaatgcggcgcctccttctcccccaactcgccaccgccgccgccttgatctgagaaaggggaagaggtgggacctggacggggagggcgtccatgtcagcgcggagcgcaacgatggggggaaggccggagcggacgtcggcgacgacgccgagcctaagctgatagggaaaggcgggcaattcactttatacactccaacactccccctcacctcgtggcggacgagggagctggtgcagtgctcttggaggtggatgcggcgcgagatgggtgtggatgcggcgccggaggtggagtgcctctccctcccacccgtcgctcctctccctctcacccgccagctgggcgtatgccgccactcctctcccgtcggccggcccgacaagctcgcgtcagtcgccctctccaccggcgcggcgctcctgccggccgcctga

SEQ ID NO: 98264 - DNA, 1092 bp, Oryza sativa
  Clone ID: PAT_MRT4530_96187C.1
atgccatcttcacacctcccttcttccctcttccctctcccctctctctctctcatcttcttcttccctctccctctcttcatctcctcttccgcaagcgagcgccgagcgaagcggaggagcgacgacgccgtgtgccgcgactggcgctgcttggccaccttcctcgacttcctcctcgcccaccaccgccaccagctgccgcacctgctcatcttcggctgcacgaggtggaggagcaacgccgccgccgccaccgatgccgccgtggattccgtcgacctcggccaccaccttgataagctagtgcgtgacggggacctcgccgacgggggatggaccaccggaggagcggtaccgcgggcggtcatcatcgccagagttggcgcggtagagcttcttgatgagctcttcttcttctccttcccgccggagctggagacgacggcgtacctctccatcttgcacgcgaacagccccatgaaggcgtgctccaccggcctgtcccagtactccgtcttctcccccatcagcgccggcgacgtcgccacgcaccgaaagccgcaggacgcgagcacagcgccaccactgagaaaaaccggtcatagtactaatcaatccctcaaaacaagcgatttagagtggaactacgaactaaaactaccattcatcaatcacccagaccgaaatcagagaaagggggaaaggtgggacctggacggggagggcgtccatgtcagtgcggagcgcgacgatggggggaaggctggagccgacgttggcgatgacgccgatgccggcgaccgcgcgggcggtgaggccgagccgctccagctcgtggcggacgagggcgctggttgtaacgtcccgcctttcctaggccgagcccgcttacatctggcagctttcataggtcatagactgccctcacagaccaacacaagtcttttctgcacactttgtcctcactcgtgtgcacccaggaagaattttccgatcggtcacccatcacaaattgctccaggccaagcacgcttaaccctggagttctttggacatcggcttacggaaaagaagttgcaacttgtttaa

SEQ ID NO: 98265 - DNA, 995 bp, Oryza sativa
  Clone ID: PAT_MRT4530_96188C.1
atgccatcttcacacctcccttctttcctcttccctctcccctctcatcttcttcttccctctccctctcttcatctcctcttccgcaagcgagtgaagcgaaggagcgacgacgccgtgtgccgcgactggcgctgcttggccacctccctcgacttcctcctcacccaccaccgccaccagctgtcgcacccgctcgtcttcggttgcacaaggtggaggagcaacgccgccgatgccaccgtggattccgtcgacctcggccaccaccttgatgagctagtgcgtgacggggatctcgccgacgggggatggaccaccggaggagcggtaccgcgggcggtcatcgtcgccggagttggcgcggtagagcttcttgacgagctcttcttcttcttcctctccttctcgccggagctggagacaacggcatacctctccatcttgcacgcgaatagccccatgaaggcgtgctccaccagcctgtcccagtactccgtcttctcccccatcggcgtcggcgacgtcgccgcgcaccgaaagccgccggacgcgagcacagcgccaccactagtgccaacagcaatgccgccgccatcgtcgtcctggacggggagggcgtccatgtcagcgcggagcgcgacgacggggggaaggccggagccgatgtcggcgacgacgccggtgctggtgaccgcgcgggcggtgaggccgagccgctccagctcgtggcggacaagggcgctggtgcagtgcctccggaggtggagcgtctttccctcccacccgccgctcctctccctcccacccgccggccgggcgtgcgccgccgctcctctctcgttggccggcccgacaagcttgcgtcggtcgccctctccaccggcgcggcgccgccggccacaggatgcgagcggcggtggccgccggcggcggatcgcgcttgtccggcgagcggcggctagcattgactgcacccagcattcagtggccat

SEQ ID NO: 98266 - DNA, 1265 bp, Oryza sativa
  Clone ID: PAT_MRT4530_96189C.1
gtccgacagaaatgatactcggatggaacagtggcctcgccaaacaaggggacgaaaaggggaggactccactccatttcgccgcatccaccaatcgtttatcgatgcgggctatggttaagctcctactggagcacgacagatcctgtgtgtatcagcctgacgacgagggatcatacccgatacatgtggctgctgcattgggcggtgtagccggattatttgccgtgaggttgatgatcgaattctgccccgattccgcgggtttgcgagacggcacgggccggagtttcctccatgtggccgtcgacaacctgtgtccgtcagtggtcgcgttggctcgtttctcacctgggttacgatccgccgtcatgaacatgcaggatggaaacggcaacaccgcgctgcatcaggccgtccatgtttgtgacataatgatcttcttcttcctactgattgacaggcgggtgctgctagatgtgaaaaataacatggggtatactccggttgatcttgcacgctttaagaaccatctgaaaggtctgaattatcccgtgaatccacagtgtatgatgtcttcgtccctgacccatacggccggcaaccatccatcgggtgacaacccaaccgacagcttaaacgaaaagcgagttgagaaggaggagaggggggagctttccacgatatacaaagacgcagctcagaacctgaccatcggcgcggtgctcatcgtcaccgtgaccttcgccgcaacgttcacgatgcccggaggctacgtatcctcctccgacgacgacggcgaacgccgcggaacgccgaccttggccggcacctgcgccttcgacgcgttcgtcgtcgccaacacgctcgccttcatgctctccgggatggccaccttcagcctgatgtacgccggctacacgccgctcgacttcgccttccgcgagcgctgcgtgaagctctccatgggcctcctgcacagcagcgtcaggtccgtgggcgccgccttcctgacggcgacgtacgtgatgctggcacgggtcgcccctaagctcgtcatcgctgtctacgccgccgctgccgttggtctggtctacataaatttcgaggtttggatgcttggctggatgacgctcgcgctgctgtctagaggggacattttggcggcgctaatcgtcggcctgcaaaccgtcgcggtggcgttttggttttcttggccctttgcagtaatcttcgttttgccactgattcttaagggccactga

SEQ ID NO: 98267 - DNA, 1166 bp, Oryza sativa
  Clone ID: PAT_MRT4530_9618C.1
gcacgagggcatcgtacgttgcccacatggcgctcaagccaacgctcgccgccctcctcttctccctggccgccatccacggcatcgtcgtcgtcgccgtcgacgcggccgctgccgccgtgtcacggggtgggagcgcgcgacgcataccggccgtcttcgccttcggggactccacgctcgacgcgggcaacaacaaccgcctcgtcaccgcggtgcgcgccgaccacccgccctacggccaggacttccccggcggcgcgccgacggggaggttctgcgacggcaagatcatgagcgacttcctcgtggaggcgctcggcgtcaagggcctcctgccggcgtaccactccggctccgaagtcctcagcgacgccgacgccgccacgggggtcagcttcgcgtccggcggctcgggactcgacgacaggacggcgacgaacgccggcgtcgcgacgatggcctcgcagatcgcggactttagcgagctcgtcgggaggatgggcgccggcaaggccggtgaggtggtgaacaagtcgctgttcctcgtgtcggccgggacgaacgacatgatcatgaattactacctgctgccgagcaagtacacgctggaccagtatcacgccctcctcatcggcaagctccgatcgtacattcagagcctgtacaacctgggcgcccggagactcctggtcgccggattgccgccggtcggatgcctcccggtgcagatgacgctggcggcgctgaggcagccgccgaggccacagggctgcatcgcggagcagaacgcggaggcggagaagtacaacgccaagctccgcaaaatgctcaccaagttccagtcaacttcgcccggagcgaaagccgtgtacgctgacatctacacccctctcacggacatggtcgatcatccccagaagtatgaattgacagcatttgatgttgctttcggaacttctgttaacccaggtttcgccgaaactggcaaggggtgctgcggcactgggctgctggagatggggcccctgtgcaccgatctgatgccgacctgcacgacgccggcccagttcatgttctgggactctgtccatccgacgcaagccacatacaaagctgtcgctgaccacttcctgcgaactaacatgttgcagttcgatgattaa

SEQ ID NO: 98268 - DNA, 514 bp, Oryza sativa
  Clone ID: PAT_MRT4530_96190C.1
ctgcaggaattcggcacgagggagatgatgggtcggtgcgcgtcgccgcgttgcgctctcgccgccgcgctgatcgccgccgttgtggcggccacatcgtcgtcgttggcggaggcgacggcgacgccgccgctgccggtgctgccggtgccgacggcggcgcagctgaggtggcagcggcgggaggtgatcatgttcttccacttcgggatgaacacgttcacggactccgagtggggcacggggcgggagccgccggcggcgttccgcccggcggcgctggacgcgtcgcagtggatggacgcggcggccgcggcgggcgcgtcgctcgtcgtcctcgtcgccaagcaccacgacgggttctgcctctggccgtccgcgcacacggcgcactccgtccgcgccagcccgtggcgcggcggccgcggcgacgtcgtgcgggagttcgccgacgccgcgcgcgcccgcggcctcgacatcgggatctacctctcgccgtgggatcgccacgaca

SEQ ID NO: 98269 - DNA, 333 bp, Oryza sativa
  Clone ID: PAT_MRT4530_96191C.1
tttttcccatagaaggagggtaacgtgtgggaggaaaatcgcctggccttacagcaccgggcactctctactcaaaccctaccctgtgttggtaaaccgttcgcgattaacgcctcctcctatgacaatgtttggagattaacgcttgcaccaaaatacccatgttaggcagtgtattcccctacaagaattgtcatcggtttcaaggctaaaaaggcttaactcaccagatcccgttagtgccggaccaggaataatcacttgctcgccatgactttctgccagcttaggcaccggccgagccgtacttttttccaaagaagaggatctgct

SEQ ID NO: 98270 - DNA, 378 bp, Oryza sativa
  Clone ID: PAT_MRT4530_96192C.1
ctaaggacgaatcttgatctgagaggatgaccagtaaaggcagaaacaagacggacctggaggaggaaggtggagaagaagtgcaaaggcgccgtcgttgaggacgaagcgccctggagcagtcgaggtgttgggcgtctgggggcaagacgacaccgacgccgccgccgccgccgtcgccgccggctcggtcgcctgggaatgctccgagattggatcgtaggcctcccaaacaggcccgtcgcacgttgggcttgggcctaaatgtgattgccaagctgcaagcctgcaaatcttcttcttcttcttcttcttttttgagaactcaagctggtggtccttagccaaactcgagtagatgaggcagcatgccttcat

SEQ ID NO: 98271 - DNA, 878 bp, Oryza sativa
  unsure (1)..(878): unsure at all n locations
  Clone ID: PAT_MRT4530_96193C.1
ttctgtttgttttttggtctcttcactcctcgctatcttgcttttcagttagtctttcttaagataaaaggagtgattatatgaatcagtactccaattcacctcctttttcttttcaaaagtcactagatagatattgacttaatctcggttttcatgatctcactacattcctcctgaaggtgatacactgatacacagcagaactttggatcgatttgatatcgaacaaacctcaacgagcattcaaatcaaatgagccctaattatgattcaccttctctcaagaagataacacagatattaattagacagttcaccagcaaatctgataagctacagtcctactactcgaacttcttgataagggagaggtcgttgagcatcttgtcgatcttctcgctgccggggtcgccgacgaacctgccgccggagcggagggaggggacgagggcggaggcctcgtcgctggtgtcggggcagaggttgccgagggtgcagagctcgaactcggcgaggccgtagcggctcagcgtctccctcacctgcctcaccgcgtccgggttcttgtaccggctgaaccgcttcacgtactgcagcgatttctcgaacacctgcgacacctgcgacgacgggtccccgtccgacatgtgctggatctgctcgtacttgtgctccaggattatcgccacctcgcagttcatcaggcacttggccttcaagaactcttccccgatcttgagctccgccgcgttctcctcctcctcgccggacatctcggcgcgctctctctcccctctcggtggctcacctcaacctcggcggctatggcgttggcgatgcggctgcggggggagtctggcattnnggncangtcc

SEQ ID NO: 98272 - DNA, 288 bp, Oryza sativa
  Clone ID: PAT_MRT4530_96194C.1
atggcaaacgatggagatattatgtgcgtatgggatgcggagtcgaatttggaagaagtccaaatttggtactattggagttttcggcgatccaccaccggtcagaccgacggcatcgaaccggtcagaccggcggggtaacggcggtcaggctggcggcagctacagacgacagcggttcatttcggcggtcaaactggagcgactagctcggtcagaccgactgcttccaggctgttagatcggtgcatatacttcggtcagaccacgtgtcatcgaattgagggt

SEQ ID NO: 98273 - DNA, 435 bp, Oryza sativa
  Clone ID: PAT_MRT4530_96195C.1
atgtcgtcgtcgtcatcgaggtcgtcgtggcgagccgccgccatcccgccccgagctccgccgccgccgtcgccatcccgctctgagctccgtcgcctcgtcgccgcaaagccggcggcggcctctagatccggcagcccgaggggagctcgacggtgctcggctgtggggagtggtcggcggggagagggagagcacctcggtgagtgccgcctcccgcctccccgcgtcgccgccccactgcgcgccatgcgtcggccgccatcggcatcagtgtggtcgacaggaaggaaggaaggaaaggggaaaagaaggaaagagaaggaagaagagaatctggcggagaagaagccatgcaggtctcagctccgataccgggctagtcttgtggagctaaccggaaaacctctagacgtttttggttccactaagtag

SEQ ID NO: 98274 - DNA, 3093 bp, Oryza sativa
  Clone ID: PAT_MRT4530_96196C.1
gactatgaagagtatgacgtcgcatgcacgcgtcgtagctggatctctaagcgcgtttcgaaaagtataccgcaactagataacgaatacaattgtgtatgataccgatacgagggcacaaactggtgcaaaatggtgctcaattaaaaaagaaaaactattccttcctatttgttttacaacagtcacatctcagccaatgacactagaaagaaataatggagaagagcacatattcactgcttctccagaagctcatatttatagaaataattatgcatcatcaggagcgtggctcgtgtcaatgctgaaccgaagggcgatgccaactctcagttgttcagatctaatccttgcggacagttaactttacaggctcacaaatggttgctgcaatttcacgcaacatatacaggtaagagcgatctacatcaccttgaaccatttgcatcaggtttgagattactctatttggccttctctggagcaatgttttgggccttctctgaagcggaacacatcgtggggttccttcttgttggcaagcattgatggttggggtcgggggaaaacgggttcttgatatcacttgtgtcatctcactgaataaggctctgaatcattcgtatttgtggtatttactgacttctcagtagacaaattgcccatggcattgacacaatcaccaccagcttgccgtgatgcttctgtgttgtctgcagaacgttgatgctcctcagaatgaacactatgctccccaaaaacgccattggcttcagagcctgacgaacttgaggcaggtgaacggggttcctgcttctctaaatcatccatgcgtttactaaccaggttagtcgaagctccaatcttaacactagtaattctcgtttctatcttttgtctcttgtggaactccccatcagactgtttgccatccactttactattcattaactttcgcttcaatttggctatagttaggggttcatcatcctcttcaggcctgtcaggctccttaggtggaggattgaagtcctcatcatcatcatcagcataatccactagtccaccagatttaggccttgaggaaacatcatcagcttcactgccattagttaacttagccccaccatcttgtttctgagcatgtttcgtccgccggactgaatcttcttcgtcgctgtcctcattgaaatagtcttcctcttccttctcaaggcctctttcttccgctttctttctaatatcaggtacattggcacttaacttcgtttcagcactctccaagtacttgcaataaccaaacaaaaagaccatctcatttgaaagcaaacataatgatgaggtactgagcagaaaattagtagtcagatagcaatacaaccaataggggcctatctgttgatacttaagtctaaaggcctgaatactcccaaagtgttcaaacttcataagttgatcccaaaaggactcattggcatatataataagttgttttagaccttcctggtagttctgaacgtgtaccttccgtatgtattccaaaagttcgagtactcctgactgtagcatgttatatctatccccattttcaacaaaggcgtcaattattggtttgaacaaattcatcttgacaacatgacgaataagaaaatcatcatcaaccaaatagtcaagatgcttttcatagaaaatttcaataacagcatctctatgtgctccagacatggtaaaagaatccatcaaaatacgaagaatttccagaaattgacagtgcattgcctcaccgaagtcagttaccattcctttgaccagaagtccaagaagagaattcccttcttgttggacaatatatgacctcagtaggttggggtcctgattaagaaaaagtatgaggacatctgtcccagctgaaacaatctttctatcttgactctgcaagacatccgaaatgatatcaaatacaccttcacctgaaagatcccggaacagtcgtaattgttgaacaagcggcaaactcttactgagagtgcaaaattcatgcaagaacagcaccaattctctttttgattccatagaaatatttgataatctcatcctagcaaacaattcttggataaagcaagaatcatcctttagtaaggaaataacagcggcattgttcgaatgtatcatcgtgttaagactagctagagtgccatcatccaacactcgaggtaatataacatcctttagatagcctattctatatgtttgatgtatctttgaaaccacagaaacatttttaataggtatggcctctttgaaaactacatgatcctttagaaaagcgcgatgcttttgtactttaggaacatctgggtcatattcaagggcacctatgatgtcaagaataaactcatctgagaaaatcttgtcaaagattgatgaactgttcagcaatatgattcccctgactaatttgaagatcatgtgaagatcatctaagttctctaaatcctcgcatattcgaaaaatgtccagtaactttgggaaaaactcgcgatcttgtgttatcaactctgccacgcgcatctgatctgtaatgccaccctccaatatagtctttaaaattaaaggaagattggataactcaacaggtggaagctccctcagctcaccattaacggagcggaaggattcatctgcaatgaaaccaccaaggttattaaactgaatgtttctctgaatgtcacatatgttgtcccatatgtatgagcacccagcagcttcctgaaagctcaacgctaattctgttgctacttctggatccctccatgagatgattgtatcttcttgctttctgtagatatcttcagaagtaatgttgtgcatgagcaatgtttcattgtcttcttcatccaaaacagtcaaaccaagttctttagaatcctcaaggaagtcaatatttacatgccctgtgccccgatcatcccatttccctccatcagtcaaacggtatactttcacacgctgcataccgctggtgttcgccgccgcggcctcgccgccgccgccgccgccctccgcctcccgccgctcctgctcccccat

SEQ ID NO: 98275 - DNA, 297 bp, Oryza sativa
  Clone ID: PAT_MRT4530_96197C.1
acggctttcctgtttttctttgtatatatgtctttttccaggcccttccacctagaactcacacagtagtgggctacctgcgtcctgcggtccttattcattggggttgacagttatgaactaagggcgaacagaaggggacgctcgtttgtgccacttccaactctacttgtacccgccagctgcaggcaaaaccatgctcgttgagggaacaagccttgagggctgtggttcaggttcaccaactgcaaaggcgggcacatcctaaccattaatcatcagggtgcgggagacgat

SEQ ID NO: 98276 - DNA, 241 bp, Oryza sativa
  Clone ID: PAT_MRT4530_96198C.1
cattccggagacggaggctacaaccgcttggtcgttgtcggggattggagatgcagttctgagaggccgcagcggcggcgagctttctctggacttttctcatcctgatatcagggatcgatgcagcagttcggcaacaatgcccaacatctctgattgtcaatcaatggttcaaggcacgatcctcatcacaatggcactgaatagatcaaaggctacactaacaagaatccaagcatga

SEQ ID NO: 98277 - DNA, 786 bp, Oryza sativa
  unsure (1)..(786): unsure at all n locations
  Clone ID: PAT_MRT4530_96199C.1
aggggtagggcataaacaagtttgtactgagctaaaggtccaaagcaaaatagtaatcattccttgaaaaaacaagaaaaggaacagaagaggacaagagcaaaagaatccatgggaggaagagaaaaaagaaagaagcgttcaaaggnnnnnnnnnnnnnnnnnnnnnnnnnnnnnnnnnnnnnnnnnnnnnnnnnnaagaaaaaaaaaataaaaaaaaaagaacgaaaataaaaaagaggaacaaaaaaagagaaaaaaaaaaggatggggtcaaaacttaaaaaaagtaaaaaacggaacggagagagaaacaaaaaaaaagaaaacatagaaaaataaaagaaaaataaaggacggaaaaaaaaaaaggaaaagaataaatagaaaaaaggaaagaaaagaacaaaaagataacgacaagggaaaaggaaaaaacaaaaaaaaaggaaaagaaaaaaaaaaaaaaaaaaacaaaacatgaaaaaaaaaaaaaagacaaaaaaaaaaaaataaaggagaaagttaaataaaaaaaaaataaaaaaaattaaaaaagtaacgctattaaaaataatatttaaaagaaggtaaagaagaaaaaaaaaaaaaagagagaaaaagataaaggaaataaaaataaaaaagaataaaaaaaaaataaaaaaaaaaagaaaaaaaaaaaatatataagtaaataaaatgtatgataaaagagagaaaaaaaaaaaaacgaaacaaaaagaatggcaccggtgcaacagcaacaaaagcctcccgatccga

SEQ ID NO: 98278 - DNA, 465 bp, Oryza sativa
  Clone ID: PAT_MRT4530_9619C.1
cccacgcgtccgctcaggtgtccacacacgcgtacgcaaaagacatgtgtcatggagaggcaccaaacaccttgctatcatacggctgcagagagacctgaagaaatggagtatgctcctctactcaagtcatctctgcttcccaagaagtctgattgtcgtgccacccggcatgctgccgctcctactcgggggactgtatccatggatgctcgcgctgacgcgtacaaccaacatctagtagagaccgtcaggactatagcatcgccaggaagggagattcttgccatgcatgagtctaacgcaagatgaggtacgaggcttgcttcaatagtgcttgacaacactgaaggcaacctccaggcttacctgactctatatgtctaaggaccagggctagagacagtacatctccggtgctatcctcttagacgatactcttgatgaacctactctggatcgcag

SEQ ID NO: 98279 - DNA, 147 bp, Oryza sativa
  Clone ID: PAT_MRT4530_961C.1
atggacttaccaatgatattccgacaactcttcacaggagcaaagctgattgccctgttccagaggagtgagaaacagcctattgctagagaagatgaagattacaattttgttggagatgaagttgactattctgctaacaaataa

SEQ ID NO: 98280 - DNA, 353 bp, Oryza sativa
  Clone ID: PAT_MRT4530_96200C.1
atgcgggtcccacatggcagtgactcggggagggcggtccatggtggactgggtccacggaccgggaaggagcggtgcgccacgtggtgcactcgtggcgccgacgcggcgcacacgcggcagccacgcgggcagccgaaccgacggccccgatccactcggggtggatcggacggcggagggggcggtacgcggccggcgcgcacgtgcggctcaagccggcccggcggccatggcgcacggcggcgtggcttgacgcagcggcggcgcaagggggcgaccggcggcgaccggccagcggcagagagcggcggcgtcgcggcgacgcggatggcgacagcagcggctaagcg

SEQ ID NO: 98281 - DNA, 329 bp, Oryza sativa
  Clone ID: PAT_MRT4530_96201C.1
gtgtcttctgtgtcatgggtggtctctactacttcatgcagggcagcaccggcttcgataacctcatgcacggcaagtctcccaagcagaaccagaagcagcgatccctcgaggatttcgttgtctctcttcagcgtgtttcgacccagcacgagaagtctcagtaaacaaagatggtatatacccggagcaccatcgaccggacttttcactttcgctacgtccaaatttgccctttaatactcgcacccgagtactgagactcatggagtggctgaggaatgtttcatacccctagaacgtctattagacacttaataatacaagcc

SEQ ID NO: 98282 - DNA, 9253 bp, Oryza sativa
  Clone ID: PAT_MRT4530_96202C.1
atggccgaacgggcagtggtgcacagcctctctccgaacgctagcggtgacgacggggagcagaacccgcgccgtcgggctcgcaccccaccgtccccctctcgccgaaatcttgggcggggggaggcgctcggggaggtcggaggatccgcgacttcgccgcccgcgggcgacgggggaggacggcgagacggggcgcgtcgccgcctcgtctacggcgatggcggcatgccccagggcgcgctccaggctgcgggcgcgctcctgcgtcacccgcccgtcgtccccgatccagagactccggcccgacgttggctggatgacgtggctgacttggtcatgacggcgcagcagcgcctaggcgccggcgggcggtcctccgccaccgaggcctctggcgctgccgccgccggctccatgtcgtcgaggcggagggcgcggcgagcggcggccgttacccgccgttcgtccgccgttccctcgtcaacgcctccgacccaagaagatgtgcgtggggggccggatgcccgcctcgatatcgagcgccggcgcgacgatcgtcgcgccgccgacgcaacggagggcgcttcctcgtccggagcgccacttcggtccgggcacgggggccggccccccgtgtccccggttggcggtgccggctgtcgagcctttgtggcgagccttcggaacgtccgttggcccccaaggttctggtccaccatcaccgaaaaatacgacggaagcgtcaaccccgctgagtttctccagatctacacgaccgggatcgaggccgccgggggtgacgacagggtcatggcgaatttcttccccatggccctgaagggtcaggcgcggggttggctaatgaacttgccacccgcgtcggtctactcttgggaggatttgtgccagcagttcaccacgaacttccagggcacatatccgcgcccaggcgaagaagcggacttgcatgcggtacagcgaagggacgatgagcctcttcgctcgtacattcagcggttctgtcaagtccgcaacaccataccgtgtatccccgcacacgcggtgatctacgtgttcagggggggcgtgcggcacaaccgcatgctcgagaagatcgcctccaaggagccccagaccaccgcgcagctttttgagctcgcggaccgtgtggctcgcaaggaggaggcctggacctggaactcctccggttctggtgtggcagctctggccgcccccgggtccgccgctcggtcagagcggcgggacaggaggaggaagaagaagtcggcccgttccgacgacgagggtcatgtcctcgccgtcgagggcgcttcgcgggccccacgaaaggggaggcctgcgagcgacaaaaagaaggaggccggcgctcccagcagggagcgcccgaccggcaagtggtgtaccgtgcacaacaccaccctccacgatctcgcggactgccgcgcggtcaaaagtttggctgagcggacgaggaaatgggaggaggagaagaggcaggagcgccgtgagggcaaggccccggcggctcccgccggcaaccggcgaggtgaggccaagcagaaggccaccgccgaggacatcgacgatggcgacgatgacctggggttccaggagcctgaggccaccgtcgccaccgtcgatgggggagcgtgcgctcacgtttctcgccggagcctcaaggccatgaagcgcgagcttctggccgcggcccctacccatgaggcgacacggcgggcgcggtggtcggaggttgccctcaccttcgaccagaccgaccacccgccgtgcgttgcctggggaggacagatcgcgatggtggtttcccccaccgtttgcaatgtgaagttggggcgtgtcctcatagacgggggtgcagccctcaacatcctttcccccgcagcctttgacgccatcaaggccccggggatggtgctccggccatcccagccgatcatcggtgtgacgccggggcacacctggccgctgggtcatatcgacctcccggtcaccttcggtggttccgccaacttccgcacggagcgggtggacttcgatgtggcggacctcagtctgccctacaacgcggtcctggggaggcccgtgttggtgaagttcatggcggcggtccactacgcctatcaccagatgaagatgccgggccccggtggccccatcaccgtccatggcgacctcaaagtcgcgcttgcttgtatggagcagcgcgcggaccacctcgccgcggcgtccaagcccgcgggtggcgacgagaggctcagtacctccgtcccggccgccccaaggcagcggatggtcacgtgcgacgaggtcccggtcaaggaggttgccctgagcgacggcccgtccaagaccacacgaatcggtggtcttctggacgacaaataggataacggcacccagttcactagtgtcgcgtctcaaaacgactctaaaatacatcctcgaaattatgcctagaataattaaaatccatgtgaaagcctctggaattttcagagcacaaataataattattaagaaataaacgaagttaaaatggttttataaaaagaaaagctctaaaaagtccttttttccccctccccctcttgggccagctcggcccatctctttccctctctctcctcttccccgcggcccattcggcctcctccccgcgcgcgcgccgctgacgggcgggcccgcccgccaccctcgctgacgggtggggcccacccgtcatccccttcctcccgccgctcccgccgccccgcccgcgccctagcgccgccgctgccgccgcgaatcccgccgcccccgtccgccccgcgtgcaatcaagagaggggaaatattccccgggatcccctccctctttccccccatttttccctctctctctccctcggattcatttggaaactttccccctaacctcgccggcgccattaatggcggccgggactcccgcgcccgtttccccctcctccggccaccccttccctctcttaaccctatataaaccctccccgtgcctccctccaccgtttccgccactcgccgctctctctccccgccggaatcgagctcgcgccgtcgctctctctctccgccgtcgccgccgagctccggtccgccgccgttgtcgccccggaccacctctcccctcggcgccgcctccttcggcttcgccgcatcctcgccgacctcgtccacccctccgtttcgcacgccgaccgccggagcaccgtcgaccccgtccacccgagccgcgccgccgccttcctcagctccggtcgccgttcccgtcgtcgccatcgacccggggtgagccgtggaccgccgattcgtttcccccttccctcccctctctcggccgccgctccgccgtacctatggccgccaccggcgaccataggggcgcgggcgcgccgcctcccgtcggctgtgccggcgtggccgcctttgggcacgccccgcggctgccgtgtggggcccggctgtcagccgcccgcgcccttaggtgcggctgacgcgtgggacccacggcgccggccggtgcgaccccgggtgcgcccggtccaccgtgggccgtggggctgccacgtgggccccactcccgtggacccagtccgcgcgcccctcccctcggctgacgcaataaatccattttaaattaaaatttaaatgaagaaattcgcaaatattcatttaaagagcatataaacttcaaatggccataacttggccatttgaactcggaattagaccgttcaagtctctaatttttccttaagaagtcaagaacccatttttgtgctttgtttctgcttgttatatggagtttattagagtaaaagccttttcttttccgttggtcgtgtagacgctgcagcttcggaagatccgctcttcgtggaggttgaagccgacgtttgggaaagcgagcaaggcaagtcacatcatctttgaacatattgaatcccagtttataaaattatgttgctttaaattattgcattatcgctttatttaaattcccgcgttatcactgttttatctagccatgcctattttcctttgttatgaccttattattgttattgttattatttccttgttcaccctagaataaacaaaaccccaactagtggacactctactcatggtaccactagtatgattttaggtagatgcttcgctatttaattaggtaacattaggtggtttttcaactctagactttgggatattcgtatcacctggacactatggattggtttgattattgtggaattggattcacacctccccctctattcaaaaccctcaaaatagttttaggctgggctcggggtgcatggttttgatagtagcacctcggccatataaggaccggtcttcgggcctctgttgcaaagcactaccgtacttccacatgtctagtgggtaaggcttagtttgtggctcagtctggttataaacaaaagtacacggatggagatggacgaagtcgggggtcgatggacatctctaggacaaatgaaggctacacgagctgcggcccggtagtcgagatgtcatggcacagggccggtgtcctgctgctaggggctcagtcctgcctacctgtcccgggggttgcggccgtaggtgggattgggtcggtactcttgtctatggctaggatgggttggaaactatgtcacgtcttccgtctgtataccgtggtggtatgtggcacgtggttgcacgtgaggaagatgtgtcttgtgggtaaagatgtacacctctgatcagagtataatctattcgaatagccgcgccctcggttatgggcaagccgagcaatgtacccaaattccggcaatggtccgccaccacttcccgagaatccgacccttgcccaagttatggcacatcagactcagatgatggcagccatgatacagcagatgcagcagcagcaccagcagatgcaccagaggatgatgcagcacgtcgaacagcagcaccagcagtttggtccccctccccctcagtccaagttgccagagtttctacgcgtcaggccacccaccttctccagcaccaccaaccccatggaggcgaatgactggctccatgccatagagaagaagctgaatctcctgcagtgcaatgatcaggagaaagtcgctttcgccacacaccagcttcagggtcccgcgtcagcttggtgggacaatcacatggccacccgcccaccaggtactgaagtcacatgggcagagttctgccgtagcttaaggaaggcgcaggtgccagacggggtcgtggcacaaaagaagagggaattccgggcactccatcagggcaacaggactgtgacacagtacctccacgagttcaatcgcctcgcgcgatatgcaccagaggatgtccgcaccgacgccgagaagcaggagaagttcatggcgggtctggatgatgagctgaccaaccaactgatatccggggactacgctgactttgagaggctggttgacaaggcaatccgccaggaggatcaacgcaacaagatggacaggaagaggaaggccgcacagttcagggcacctcagggaagtcaccagaggccgcgcttcgctcctgggcagcagggtggacctaccaccatgatcgttcgtcagcaccgcccgttcaaccctagcaactttccccagggcgccagtggcagtcagaaccaccatggaggtcagtccaaccgcggtgcagcttcacgcccaccaatggcaccggcacagtcaggccagcccgcgcaagccaagaaggagactggagcaaaaccagggtcctgcttcaactgtggcaagcttggccacttcgctgacaaatgcccgaagcctaggcgtgccgggccaaggtttatccaggctcgtgtcaaccacgcatctgcggaggaggcacaagcagcaccagaggtcgtactgggtacgtttcctgttaactcaatccctgcaacagtactttttgattctggtgcaacgcattctttcatttcaaagaaatttgtcgggatgcatgggttaataagagaggaacttagcacaccaatgcgggttcataccccagggaatagctccacttcggttcaattcagcccttctataacaatagaaattcaaagatcaccatttctagccaacctcattcttctcgaatccaaagacctagatgtcattcttgggatggattggctgaccaagtttaagggggtcatcgattgtgcaaatcgcacagtcaccttgaccaacgagaagggagaaaccgtggtgtacaaatctctagtctcgccaaagaaaggggtctctttgaatcagattgaagcggaaatcccagtggacaccgtagagaagaactcgagaaaattggaagatatacccatagtctgcgagtatccagaagtgttccccgaagacctcactaccatgccacccaagagagagattgaattccggattgacttggcaccgggaactgctccaatctataagagaccgtacaggatggcggccaacgaactagcagaggtcaagaagcaggttgataagcagctgcagaaagggtacattcgaccaagtacttcaccttggggtgctccggtcatttttgtggagaaaaaggataagacgaagaggatgtgcgttgattaccgcgcactcaacgagttgagaattcgggaagaggatattccgaagacggccttcaccactcggtacgggctatatgagtgcacggttatgtctttcggacttaccaacgcacccgcattcttcatgaatctgatgaacaaagtgttcatggaatttctggacaagtttgttgtggtgttcatcgacgacattcttatctattcaaagtccgaagaagaacatgaacaacatctccgtctggtactcgagaagttgagggagcaccagctatacgccaagttcagcaagtgtgacttctggttgacggaagtcaaatttctgggccatgtcattacagctcagggtgtggcagtcgacccatcgaacgtggagtcagttaccaaatggaccccaccgaagaccgtgtcgcagattcgaagttttcttggacttgcaggttattaccgtcgattcatcgaaaatttctccagaatcgcccgacccatgactcagttgcttaagaaggatgagaagtttaaatggacagccgagtgcgataagagcttcgaggagctcaagaagaaattagtatccgcaccagttttgattctgcccgacccgatgaaagacttccaagtctattgtgatgcatcccgtcacggacttggatgtgtcctaatgcaagaggacagagtggttgcgtatgcctcgcggcagttgcgtccacacgaagggaattatccaactcatgacttggaattggcagcagtggttcatgctttgaagatctggaggcactatctgattggcaaccgctgcgaagtatatacggaccataagagtctgaaatacatcttcacccaaccggacctaaatctccgacaacgaagatggttggaactaatcaaagactatgacatgagtattcactaccacccgggtaaagccaatgtggtggcagacgctttaagccggaaaagttactgcactgccctatgcatcgagggcatgtgtgaggaattgcggcaggagtttgagcatctcaacgtgggaattgttgaactcgggttcgtagccgctctggaggcacggcctacgctcgtggatcaagtcagagcagctcaagcaaatgattctgaaatagcagagctgaaaaagaacatgagagtcggaaaagcccgggatttccacgaagatgagcatggcacaatctggttgggagaaagattgtgtgtacctgacgacaaggaactgaaggatctgatactcaccgaggctcatcagacccagtactccattcacccaggcagcactaaaatgtatcaagacctcaaagaaaagttttggtgggtcagcatgaggagagaaatagctgaattcgtcgcactctgcgatgtttgccaacgagtgaaggcagagcaccaaagaccagcaggtttactccaacctcttcaaatcccggaatggaaatgggaggagattggaatggactttataacaggactgccccggacatcatcgggtcacgatttgatctgggtagtcgtggatcgactcactaaggttgctcacttcataccagtacataccacatatacgggcaaaaggttggcggagctttacctttcgagaatcatgtgcctacatggagtacccaaaaagattgtatctgaccgagggagtcagttcacctcaaaattctggcagaagctacaggaagaactggggacccgtttaaatttcagcacggcctatcacccgcaaactgatggtcagaccgagcgagtcaatcaaatcttggaagatatgttgagagcttgtgctcttgattttggtggagcttgggacaaaagcttgccatatgcggaattctcgtacaacaacagctaccaggccagtctacagatggcaccgtttgaagctttatacggccggaagtgccgcacacctctcttctgggatcagacaggcgaacgtcaactgttcggaacagaagtattagcggaagcagaagagaaagtcagaatcatcagggaaagattgaggattgctcagtctcgacagaagagctacgcggataaccgtcgaagggagctcacttttgaggcaggagattacgtgtatcttcgtgtcactccgctccggggagtacaccggtttcagacgaaaggcaagttggcaccacgcttcgtgggaccatacaaaatcttggaacgaaggggagaagttgcttatcagttagaacttccatccaatatgatcggcatccatgacgtgttccatgtgtcccaattaaagaagtgcttaagggtacctgaagaacaggctgattcgaagcacattgatatccaggaggacctaacatatgtggagaagccggttcgtatacttgataccagcgaaagaagaactagaaataaggtcaccaggttttgccgagttcagtggagtcatcattcagaagaggaagcaacctgggaaagggaagatgagttgaaagccgcccatccgcacctcttcaccagctcctccgaatctcggggccgagattccgtttaa

SEQ ID NO: 98283 - DNA, 2279 bp, Oryza sativa
  Clone ID: PAT_MRT4530_96203C.1
atgtcggtgcacggaaacatgtcgtggggctgtgtcttgtgggtacagttgtacacctctgatcagagtaaaactattcaaatagccatgcccacggttatgggcgggaaaaatcttggtcgctcgttaaagagagatttgtcaaatcagatagccgatcacccacccaaccaccgtggagaaggcatggatgactttgtggcagagttggctcgcatgacactggtggtgagctaccccaacgcgccggagtactcgactgttccgccgctcagtggcgagtttcctcaccgtgttcgtctggaggttcatggctatgtgggcacctgcctcgctaacatggtggttgaggcatctggaggcacagcagatcacgcctgtcaggaggcagcatacctgatgatggccagacttcgtgagcgccacaactacatcttctgcaacacggcgtaccggtttcaccctcgtcaagcaagtggcgatgacgtcaacaccttccgtccgatagccggtgagaacgacaccacctttggtcacatgtgtgccgcgtccaaggccttgaatgacgggaagctcgtgaggatcatagctctgaaggataagatagcacgcttgaagaaggagaatgctcagttgaagggtctccccattcccggaggagtccgggtcagcaacacgtcccgcaagtcgacgacgtcacctgtgcgcattcagctcgcgcccaggaacccacatccgcccgcagttcccgcagctcacgcagttcctgcagtgcccgcagctctagctccagccccagctcctgctccagtgtcagctcccgcatccgctctctccttcgctccagcgtcagccgtcagggggccaaccggtggcaacggaggttggttacctgctactcctagtggcagccgcgaccatagcagcagcagttctagtggcacagagccgggcagcggcgagacgtatctgccagactccaggagccgctcagagggacctggtctctcccttcagatggtcaacaccaggaatggcagccgtgcagcaggtaagggcagcagcggtgaagaacgcactgacggtggacaccccaacagcgcctctagcaacggtccgccaccgctcccagagaacccgacgctcgcacaagtgatggcccataagacccagatgatggcggccatgatgcaacagatgtagcagcagcaccagcagatgcaccagaggatgcatcagcaagccgagcaacggcagcagcggtttggtcctcctcccccttagtccaaactgccggagtttctacgcgtcaggccacccattttctctagcaccaccaaccccatggaggcgaatgactggctccatgccatagagaagaagctaaaccttatgcagtgcaatgatcaggacaaggtcgcctttgccacacaccagctccagggtcccgcgtcagctttgtgggacaatcacatggctacccacccgccaggcacagaagtcacttgggcggagttctgtcgtagcttcaggaaggcgcaggtgccagacggggttgtggcagaggagaagagggaattccgggcaccccaccagggcaacagaatagtgactgagtatccccatgagttcaatcgtctagcgcgatatgcaccggaggatgtccgtaccgacgccgagaagcaggagaagttcctagcaggcctggatgacgagctgaccaaccagttaatctctggagactacgccgactttgagaagctggttgacaaggcaatctgtcaggaagatcagcgcaacaaaatggacaggaagagaaaggtagcgcagttccggtccaaccaaggaagccactgtcacgaccggaaataacccaacgggcgtccctgacgtgcgtgcattaatccttgtcccaggaggcaaggtacaccaaaagttgatacaattcagagtttaacaagcggaagcgtaaatagttacggcggtgaccatcggggcgcgggcgcgccgctcccgtcggccgcgccggcgaggccgccctcgggcgcgccctcgcggctgccaagtgggcccggccgtcagccgcccgcgcccgcgggtgcggctgacgcgcgggacccacggcgccgaccgccgccagccgcgtgcgcccggtccaccgtggaccgagcggctgacgcgtgggccccacttcccgtggacccggtccgcgcgcccgcccctcggcagaaattcgcaaatatccatttaaagagcatataaacttcaaatggccatat

SEQ ID NO: 98284 - DNA, 2295 bp, Oryza sativa
  Clone ID: PAT_MRT4530_96204C.1
atgtccaccaccaccaccaccaccgtcacagaacccgacaatgccgaagcctcgccatcgccgtcgccgtcgccgtcgacgccgcccaagaaggtgatcatgtacgagctcgccgcgcggaacatctactacgccaagccggccgccgccgcggtggccacgacgacggtggcgtcgctggcgcggctcctgaggccctgcggcgcggcgcagccgccgtcgccggagtacatcctccgggacgtgtcgctgacggcgcggcccggggagatcctcgccgtcgtcggccccagcggcgccggcaagtccaccctgctcgacatcctcgccgcgcggacggcgccgacgcacgggaggctgctcctcaacgcggcgccgctccgaccgtcctcgttccggcggctgtccgcccacgtgccgcagatggacgtcgcgctgccgttgctcaccgtcgcagagacgttcgccttcgcggcgtcgctgctgtacccggcggcggcggaggcgtcggccgcggtcgccgccctcctcgcggacctccggctgggccacgcggcgcacacccgcgtctccgccacgcggctgtccggcggcgagcggcgtcgcgtgtccatcgggctcgccctcctccgggaccccggggtcctcctcctcgacgagcccacctccggcctcgactcctcctccgcgcacgtcgtcgtcggctgcctgcgcgccgtcgcggccgcgcgcggcacgacggtggtgctctccatccaccagcccagctcgcgcctcctctccgccgtggactccctcctcctcctctcccgtggcgccgtcgtgcaccacggctccgtcgactccctcgacgccgcgctcctctcccacggcctcgccgtgccggcgcagctcaacccgctggagtttgccctcgaggtactcgaccagatgccccacccgtccgcctcctcccctgagcccaagacgacggaggagctcgccgccgtgacgtcctccaagtcgtcgtcgtcgtcaacctcgccgtgctcgaggatacacgaggtggtggtcctgtacaagcgggcatggaaggtggtgtaccgaagcaagcaactgctgctgaccaacttcctggagtcggtggtggtggggacgctgctggggagcatctacatcaacgccggcgacggcgagggcggcgcgcacaagcggctggggctgttcgccttcacgctgacgttcctcctgacgtccacgacggagacgctgccgacgttcgtgtcggagcggccgatcgtgctggcggagacggcgtcggggctgtacaggctgtcgtcgcacgcggcggcggcgacgctggtgttcctcccgtacctcctggcggtggcgctcctctactccgcctgcgtctacttcctcgtcggcctctgcgcgtcggcggcggcgttcgcggcgttcgtgatggtggtgtgggcggtggtgctgacggcgaactccttcgtgctgttcgtgagctcgttcgcgccggactacatcgccgggatgtcgctggtgtcggtgtccctcgccggcttcttcctcttctccggctacttcctgtccagggggagcatgccgccgtactgggtgttcatgcactacgtctccccgtacaagtacgccctcgacgccctcctcgccaacgagtacacctgcgccgccacccgctgcttcggcgtcgccggccccgccgccggcgattgctccgagaccggcgccgacgtgctggcggagaaggggctcacggccaaggagcggtggaccggggtgcaggtgctcttcggcttcttcctcctctacagagttctctactgggtggtgctcagccgccgagccgccagggccaagaggtgacccatccatcgtcacctccagctcaggcgacggcgagcggccgcaccgtacgtacgtacgtgtgaacgcgtgcatggagacgaagtggggcccatgcatgcgcatgcaagtcaaggtatgacgtcaacaatggcgtagacaaggtggtgatcgagttaattaactggtaattaagctgctgctgctgctatactgataagtgatgatgtgtatattttatgaacataaaaaaacgagccttttatatgtgtaatgatgagtggttgatagtgcgatcttgacttgaaaatcacgatcgaattacttctagatgagtttttggccgtcgatctcgttcattgattgatttgatcggtcaggatatagaaacaagtacgtattgaatatatcactggaaatagtgttgcttgatttttgccc

SEQ ID NO: 98285 - DNA, 327 bp, Oryza sativa
  Clone ID: PAT_MRT4530_96205C.1
atgaagaagaaggctttgcaccgcatgttcgctgccatcttcttgctccatattctcctcgctgtaactgctgctgcatcaccaaagaccagcaccggcttgttgcgtgacggcaacaacaatgcagtagctgctgttgctgctaggagtagcaggagattgctgctgcagcaacagcagcccagggcagcggcgccgacggcggcaatggctaccaacaccttccgagtcaatggcgttcatcaggcgaacggcgagcccaaggtggagttcgacgccagcatgaagcacaaccccgggaccaacttcaatcccaggcacaattag

SEQ ID NO: 98286 - DNA, 4152 bp, Oryza sativa
  Clone ID: PAT_MRT4530_96206C.1
atggtctacaccaggaatggcacccgcaccacgggcgagggcagcaacggcgaagagcgcactgatggtgtgcatcccaatagtgattccggcaatggtccgccaccactccccgagaatccgacccttgcccaagtaatggctcatcagacgcagatgatgacagccatgatgcagcaaatgcaacagcagcaccaacagatgtaccagaggatgcagcagcaagccgagcagcaccagcagcagtttggcccccctccccctcagtccaaactgccagagtttctacgcgtcaggccacccaccttttctagcaccaccaaccctatgaaggcaaatgattggctccatgccatagagaagaagctcaatctcctgcagtgcaatgatcaggagaaggtcgccttcgccacacaccagctccaaggtcccgcgtcagcttggtgggacaatcacatgactacccgcccgccaggcactgaagtcacttgggcagagttctgccgcaacttcaggaaggcgcaggtgctagatggggtcgtggcacaaaagaagagggaattccgagcactccaccagggcaacaggacagtgacggagtatctccatgagttcgatcgcctcgcgcgatatgcaccggaggatgtccgtactgacgccaagaagcaggagaaattcctagcaggtctggatgatgagctaaccaaccagttgatatccggagattacgccgactttgagaggctggttgacaaggcaatccgtcaggaggatcagcacaacaaaatggataggaagaggaaggcggcgcagttccggtccaaccaagcaagccaccagcgaccgcgcttcattcccagacagcagggtgaacctaccaccatgatcgtccgccagcaccgccctttcaactcaagcaacttccaccagggcgctagtggcagccagaaccaccgtggaggtcagcccaaccgcagtgcaactccgcgcccaccaatggcaccagcacagtcagctccgtctgtgcaagccaagaaggagaccggagcaaagccagggtcctgcttcaactgtggtgagcttggccacttcgctgacaaatgcccgaagcctaggcgtgctgggccaaggtttgtccaggcccgtgtcaaccacgcgtctacagaggaggcacaagcagcaccagaggtcgtactggtcaccttgatcaatgagaagggagaaacagtagtgtacaaatcactagtctcaccaaaacaaggggtctctttgaatcagattgaggtggagatcccagtggtcaccgaggagaagaattcgaggaaattggaagagattcccatagtctgcgagtacccagaagtgtttcccgaagacctcactaccatgccacccaagagagagattgaattccggattgatttggcaccgggaaccgctccaatttacaagagaccgtacaggatggcagccaacgaactagcagaggtcaagaagcaggttgatgagcagctgcagaaagggtacattcgaccaagtacttcaccttggggtgcaccggtcatttttgtggagaaaaaggataagacgaagaggatgtgcgtcgactatcgcgcactcaatgaggtcacaatcaagaacaaatatcctttaccgcggatcgatgatttgtttgatcaactgaagggagctaaagtgttttctaagatagacctacgatcaggctaccaccagttgagaattcgggaagaggatattccaaagacggccttcaccactcagtatgggttgtatgagtgcacggttatgtctttcggacttaccaatgcacccgcattcttcatgaacttgatgaacaaagtgttcatggaatttctggataagtttgtggtggtattcattgacgacatactcatctattccaaattggaagaagaacatgagcaacatctccgtctggtactcgagaaattgaaggagcaccagttgtatgccaagttcagcaagtgtgacttctggttgtcggaagtcaaatttctgggtcacattattacagctcaaggcgtggcagttgattcatcgaacgtggagtcagttaccaaatggaccccacctaagaccgtgtcgcagattcggagttttcttggacttgcagggtattaccgtcggttcattgaaaatttctccaggatcgcccgacccatgactcagttgcttaagaaagatgagaaatttaaatggacagccgagtgtgacaagagttttgaggagctcaagaagaaattagtatccgccccagttctgattctgcccgaccagatgaaagacttccaagtctattgcgacgcatcccgccacgggcttggatgtgttctaatgcaagagggtagagtggtcgcatacgcctcgcggcagttgcgtccacatgaagggaattatccaactcatgacctggaattggcagtagtggttcatgctttgaagatctggaggcactatctgattggcaaccgctgcgaagtatatacggaccacaagagtctgaaatacatcttcacccaaccggacctaaatctccgacaacgaagatggttggaactaatcaaagattatgacatgagcattcactaccacccgggtaaagccaatgtggtggcagatgcattaagcaggaaaagctactgcaatgccctatgcaccgaggacatgtgtgaagaattgcagcaggagcttgagcgtctcaacgtgggaattgttgaacataggttcgtagccgctctggaagcacggcctacgcttgtggatcaattcagagcagctcaagtaaatgaccccgaaatagttgaactgaaaaagaatatgagagtgggaaaagcccgggacttccttgaggatgaacatcgcacaatctggatgggagaaagattgtgtgtacctgacgacaaggaactgaaggatctgatactcaccgaggctcatcagactcagtactccattcatccaggcagcaccaaaatgtatcaagacctcaaagaaaagttttggtgggtcagcatgagaagggaaatagctgaattcgtcgcactctgcgacgtttgccaacgagtgaaggcagagcaccaaaggccagtaggtttattccaacctcttcaaatcccgaaatggaagtgggaggagattggaatggactttataacaggactgccccggacatcatcgggctccgttaaaggcaaattaccgaagccgggattgactgacatcattgatgacaatgtcctgccgatcgatcccgagaaattcacgcctgaccagaagcaaaaatttgaagcaatgatgcagcaagcacgggatcagtatctaagctcgttcatgcaaacccgcaagggaatgctggttcagaagtacaagttaaaactggttgctgacaaccctggaaccggttcttctaaagatggagaagtgaaacaagctccagatggctcggctcagccgagcaacaagggtgctaccagtggttctataggaaatcaaggcgataaccctcaagaagtgcacggagctccaggcgactccatctgtcgaacccacgactcaaccaacagcgccagcatcaacgcccttacctgctacatcggccacggctgcagcagcagccgatccagcagacgtcatcaattcagccggttgtacagccgatccaacaacaggtcgcgcagccagctcagcaaacaccaccaattcagccggtggtacggccgatccaacaacaggtcttgcagccagttcagcaagcaccatcaacgcagcagcatctccaaccaatccagcaaacaccgccaaggcaacgccttcagccgatccaacggactccggtacgacagcaggtcgttcagccgattcagcacctggggccagccaatgcatcggctggatttgcagcacatggggggcaacctgcgcagcaccgccgctaggctcgccgccgcaccgtgccgtcgccgccgttgggttcgcgtggtcgaggtccacccagtccgcccctcctccatcgagggcatctcggagctcgtccgtccgtcgccgccatcctcccatggctcacagtcgccgttcgccgtcgtcctcctccgcgccggccactctcggtga

SEQ ID NO: 98287 - DNA, 265 bp, Oryza sativa
  Clone ID: PAT_MRT4530_96207C.1
tccaattctgcctccggagacatcactgacttcaaacggacctagcgccttcatgccaatccgatttgggtgatcttggacttcgtggaaagcttatctcgctacctttcaaatgcatccagtctcctgtccaaattcatctcgagtcaacgggaatcgccaaaataagacagtgctattgctgaaaccgaacttgggctttgggccttgtaataggctaggcctatcttggaagtgtctccctccacctccactaattagcaca

SEQ ID NO: 98288 - DNA, 435 bp, Oryza sativa
  Clone ID: PAT_MRT4530_96208C.1
ggaccaacgaccggcgaggctgatgaagaagatcggagagagggcacggcaggggaggcccatgtcatcatgcgcgtgtgccgccggtccgggagactgacgcggccgcggtggcctggttggtcgccgaccgatcttttgaccggaacttgccttaccggccggccggccaaaagctctctccaattcgtgcaccgtctcgctggacaccggacagatcgacgagcccggcctctggtccagactccagacatcgaaaagacaggaagtggctcgggctggcccgctagccccggtggtccatcgctatggcaatgggacgcgagatggcgagggatcattaggctagtggctaccatcagtcgagcagaacaatcatgccgtgacgacaacaacaacggaagcagttcaggcattagccaggcaccttcctga

SEQ ID NO: 98289 - DNA, 2890 bp, Oryza sativa
  Clone ID: PAT_MRT4530_96209C.1
tacggccagtgagaacgacaccaccttcagccacatgtgcgccgtgatgaggggaatggacaggatgcactctgacctgcacaaggcatccaaggccttgaatgatgggaagcttgtgaggatcatagctctgaaggatgagatagcacgcttgaagaaggaaaacgcttagttgaagggtctcccagcgccaggaggagtccagatccgcaccacgcctcgcaagtcaacgaatgcacccgtgcgcattcagcttgcgcccaggaacccacctcctcccgcagctcctccagcacctcccgcagttcccgcagcgcccgcagctccagctccagctcccgcgtccgctctctctttcgctccagcgtcagccgccaggggtccagccagtggcaacagaggttgctcccttcagatggtcaacaccaggaatggcagccgtgtagcaggtgagggcagcaacggcaaagaatgcaccgacggtggatatcctaacagcgcctctggcaacggtccgccaccgctccccgagaacctgactcttgcacaagtgatggcccatcagactcagatgatggcggccatgatgcaacagatgcagcagcagcaccagcagatgcaccagaggatgtagcagcaagccgagcagcagcagcagcagtttggtccccctccccctcagtccaagctgccggagtttctacgcgtcaggccacccaccttctctagcaccaccaaccccatggaggcaaatgactggctccatgacatagagaagaagctcaatcttctgcagtgcaacgatcaggagaaggtcgccttcgccacacaccagctccagggtcccgcgtcagcttggtgggacaaccacatggctacccgcccgccaggcacagaagttacttgggcagagttctgtcgcagcttccggaaggcgcaagtgccagacggggtcgtggcacaaaagaagagagaattccgggcactccatcagggcaacaggacagtaacagagtatctgcatgagttcaatcgcctagcgtgatatgcaccggaggatgtccgcactgacgcagaaaagcaggagaagttcctagcaggcctggatgacgagctgaccaaccagttgatctccggggattacgctgacttcgagaagctgcatcgccctttcaactcaagcagcttccaccagggcgccagtggcagccagaaccacccgggaggtcagcccaaccgcagtgcatctccgcgcccaccaatggccacagcacaggcagctccatcagtccaagccaagaaggagactggagcaaagccagggtcctgcttcaactgtggcgagcatggccactttgctgacaagtgcccgaagccaaggcgtgccgagccaaggtttgcccaagctcgtatcaaccacgcatccgtagaagaggcgcaagcagcaccagaggtcgtactgggtacgtttcctgtcaactcaatttctgcaaaagtacttttagattctggtgcgacgcattcattcatttcaaagaagtttgttggggtacatgggttaataagagaagaacttagtacaccaatgcaggttcatacccccgggaatagctccacctcggttcaattcagcccttctgtaacaatagaaatccaaagatcaccatttctagccaacctcatccttctcgaatccaaagatctagatgtcattcttgggatggattggctgaccaagttcaagggtgtcattgattgtgcgaatcgcacggtcaccttgaccaatgagaaaggggaaacagtggtgtacaagtcaccagtcgcactgaagcagggaatctccttaaatcagattgaggtggaaaatccggtggtcactgaggagaagagttcgaggaaattggaagatatccccatagtctgcgagtatctagaggtgttccttaaggacctcactaccatgccacccaagagagagattgaattccggattgatttggcaccggggactgctccaatttacaagagaccgtacagaatggcagccaacgagctagcagaggtcaagaagcaggttgatgagcaactgcagaaagggtacatttgaccaagtacttcaccttggggtgctccggtcatttttgtggagaagaaggacaagacgaagagaatgtgcgtcgattatcgcgcactcaatgaggtcaccatcaagaacaaataccctttgccgcagattgatgatctgtttgatcagctgaaaggagccagggtgttttccaaaatagacctgtgatcaggctaccatcagttgatgattcgggaagaggatattctcaagacagccttcaccactcggtatgggttgtatgagtgcacggttatgtcttttggacttaccaatacacctgcattcttcatgaacctgatgaacaaagtgttcatggaatttttggataagtttgttgtggagcaccagctttatgccaagttcagcaaaggcgacttttggttatcagaggtcaaattcttgggtcacgtcattacagctcagggcgtggcagtcgatccatcgaatgtggagtcagtcaccaagattgccagacctatgactcagtttcttaagaaagacgagaaattcaagtggacagctgagtgtgacaagagttttgaggagctcaagaagaaattagtgtctgctccagttctgattctacccgatcagacgaaagacttccaagtctattgcgacgcatcccgtcacgggcttggatcggtggttcatgctttgaagatctggaggcactatctgattggcaaccgctgcgaagtatatacggatcacaagagtctgaaatatgtcttcacccaacctgatctaaatctccgatag

SEQ ID NO: 98290 - DNA, 574 bp, Oryza sativa
  Clone ID: PAT_MRT4530_9620C.1
gcacgaggctcctccattttctctctctagttcgggggacctttgagtaggaaattcttggacatggacgacgacggcgactggatcacagcgaggtacctcctctcgtcgatcctcgggcggaacccgctcgtcgtcgattacgtggacgaggagtccttccccgtcgaggaccctcccccggtggccggtggcgcccgtggagggaggcaagcggtggtgtcgcagccgccggtggtgcgcgcgacggcgggcgtggccgggacggtgtgctcggtttgcacggaggagatcgcggtggcggacgccgtggtgcgtctcccctgcgcgcactggtaccacgccggctgcatctccccgtggctcgggatccggagcacatgccccatgtgccgcgccgagctgccggccagcgacgacgccgccgaggaaggcggtggtgccggccgggagaagccgccgcgcgcggcccccgccgggactagcgccggcggcggtgtcaggcgtgacgcgtcgtatgagctcctcgccggcggcggcgtcttgtctggctgagtggctgagcgtgtgggcc

SEQ ID NO: 98291 - DNA, 255 bp, Oryza sativa
  Clone ID: PAT_MRT4530_96210C.1
atggtggcggcgtccgcgggcgcgcgtcagagtggtgaagcggcacacggcggcagcagccagcaggtcgcggtgacggggacgcacagggtcacaggcggcacgacgtcggaggtgtgccggctgaccggctgcggcgcgagtgcggagcgacgtcggcggcgtgtggaaggaccggtggcggcgtgcgtgcggcaggggcgccacaaggtgttcgataaaatgtcgataagggaggtcgtggcgtggagctga

SEQ ID NO: 98292 - DNA, 4307 bp, Oryza sativa
  Clone ID: PAT_MRT4530_96211C.1
atggtctacaccaggactggcaaccgcacgacaggcgagggcagcaacggtgaagaacgcgctgatggtgtgcaccccaacagtgattccggcaatggtccgccaccacttcccgagaatccgacccttgcccaagttatggcacatcaaactcagatgatggcagccatgatgcagcagatgcagcagcagcaccagcagatgcaccagaggatgatgcagcacgccgaacagcagcaccagcagtttggtccccctccccctcagtccaagttgccagaatttctacgcgtcaggccacccaccttctccagcaccaccaaccccatggaggcgaatgactggctccatgcaatagagaagaagctgaacctcctgcagtgtaatgatcaggagaaggtcgcttttgccacacaccagcttcagggtcctgcgtcagcttggtgggacaaccacatggccacccgcccaccgggtactgaagtcacatgggcagagttctgccgtagcttcaggaaggcacaggtgccagacggggtcgtggcacaaaagaagagggaattccgggagctccatcagggcaacaggactgtgacagagtacctccatgagttcaatcgcctcgcgcgatatgcaccagaggatgtccgcaccgacgccgagaagcaggagaagttcatggcgggtctggatgacgagctgaccaaccaactgatatctggggactacgccgactttgagaggctggttgacaaggcaatccgccaggaggatcaacgcaacaagatggataggaagaggaaggccgctcagttcagggcacatcagggaagtcaccagaggctgcgcttcactcccgggcagcagggtggacctaccaccatgatcgtccgtcagcaccgcccgttcaaccccagcaacttccaccagggctccagtggcagccagaatcaccatggaagtcagcccaaccgcggtacagctccacgcccaccgatggcaccggcacagtcaggcccgcccgcacaagccaagaaggagacgggagcaaagccagggtcctgcttcaactgtggcgagcttggccacttcgctgacaaatgcccgaagcccaggcgtgccgggccaaggtttatccaggctcgtgtcaaccacgcatctgcggaggaggcacaagcagcaccagaggttgtactggtcaccctgaccaatgagaaaggagaaaccgtggtgtacaaatctctagtctcgccaaagaaaggagcctcgttgaatcagattgagacggaaatcccagtggacatcgaagagaagaacttgagaaaattggaggacatacccatagtctgcgagtatccagaggtgttccccgaagacctcaccaccatgccacccaagagggagattgaattccggattgatttggcaccaggaaccgctccaatctataagagaccgtacagaatggcggccaacgaattagcggaggtcaagaagcaagttgatgagcagctgcagaaagggtacatacgaccaagcacttcaccttggggcgctccggtcatttttgtggagaaaaaggataagacgaagaggatgtgcgtcgattatcgcgcacttaacgaggtcacaatcaagaataaatatcccttaccgcgaatcgacgatttatttgatcaactgaaaggagctaaagtgttctctaagatagacctgcgatcaggctaccaccagttgagaacccgggaagaggatattccgaagacggccttcaccactcggtacgggctatatgagtgcacggttatgtctttcggacttaccaacgcacccgcattcttcatgaatctgatgaacaaagtgttcatggaatttctggacaagtttgttgtggtattcatcgacgacattcttatctattcaaagtccgaggaagaacatgaacaacatctccgtctggtactcgagaagttgaaggagcaccagctatacgccaagttcagcaagtgtgacttctggttgacggaagtaaaatttctgggtcatgtcattacagctcagggtgtggcagtcgacccatcgaacgtggagtcagttaccaaatggaccccacctaagaccgtgtcgcagattcgaagttttctaggactggctggttattaccgtcgtttcatcgaaaacttctcaagaatcgcccgacccatgactcagttgcttaagaaagacgagaagtttaaatggacagctgagtgcgacaagagctttgaggagctcaaaaggaaattagtatccgcaccggtgttgatcctgcccgaccagacgaaagacttccaagtctattgcgatgcctcccgtcacggacttggatgtgtcctaatgcaagagggcagagtggttgcatatgcctcgcggcagttgcgtccacacgaaggaaattatccaactcatgacttggaattggcagcagtggttcatgctttgaagatctggaggcactatctgattggcaaccgctgcgaagtatatacggaccataagagtctgaagtacatcttcacccaaccggacctaaatctccgacaacgaagatggttggaactaatcaaagactacgacatgagtattcactaccacccgggtaaagccaatgtggtggcagacgctttaagccggaaaagttactgcactgccctatgcatcgagggcatgtgtgaggaattgcggcaggagtttgagcatctcaacgtgggaattgttgaacacgggttcgtagccgctctggaggcacggcctacgctcgtggatcaagttagagccgctcaagtaaatgatccggaaatagcagaactgaaaaagaacatgagagtcggaaaggctcgggatttccttgaggatgagcatggcacaatctggatgggagaaagattgtgtgtaccggacgacaaggaattgaaggatctgatactcaccgaagctcatcagacccagtactccattcatccaggcagcactaaaatgtatcaagacctcaaagagaagttttggtgggtcagcatgaggagagaaatagctgaattcgtcgcactctgcgatgtttgccaacgagtgaaagcagagcaccaaagaccagcaggtttactccaacctcttcaaatcccggaatggaaatgggagaaaattggaatggactttataacaggactgccccggacatcatcgggtcacgattcaatctgggtagtcatgaatcgactcaccaaggtagctcactttataccagtgcataccacctatacgggaaagagattggcagagttgtacctggcaaggatcatgtgtttgcatggggtacccaagaatctgaccgagggagtcagttcgcctcaaaattttggcagaaactgcaggaagaattggggacccgtttaaatttcagcaccgcctaccatccgcagacagatggtcagactgagcgagtcaatcaaattttggaagatatgttcagagcttgcgctcttgactttggtggagcttgggacaaaagtttgccatatgcggaattctcgtacaacaacagctaccaagctagtctacagatggcaccgttcgaagctttatacggccggaagtgccgcacacctctcttctgggatcagacaggcgagcggcaattgttcgggacagaggtattaacggaagcagaagagaaagtcagaaccatcagggaaaggttgagaattgcccagtctcgacagaagagctacgcggataaccgccgaagggagctcacttttgaagcaggggattatgtgtatcttcgggttactccgctccggggagtgcaccgttttcaaaccaaaggcaagttagcaccacgtttcgtgggaccctacaaaatcttggaacgaaggggggaagttgcttatcagttagaacttccatccaatatgatcggcatccatgacgtgttccacgtgtcccaattaaaaaagtgcttaagagtacccgaagaacaggctgattcggagcatattgatatccaggaggacctgacatatgtggaaaagccggttcatatacttgataccagcgaaagaagaaccagaaacaaggtcaccaggttttgccgagttcagtggagtcaccattctgaggaggaagcaacctcccacgtcgccggcgaaatcgggcgtgctcgggccgttcctgatcttcccgccccgcgccgccatcgccgtcgggttcgcgaggccgaactccacctcgtccgccccttccccgtcgagattcgtcgccggaatccgcat

SEQ ID NO: 98293 - DNA, 405 bp, Oryza sativa
  Clone ID: PAT_MRT4530_96212C.1
atgggcgaagcagcgaacgctgcggaatcacggcagggcggggacgcagtcacgcagccgcacgcggtagctgtcggctcggtgactctacggcttgccgccaccgcccgccgcgaccaagactgccacttccagatgctcggctccatcctataccagattgcagtggaaccagcacaggagaatatgaaagacacacgagcggtagggaaggcgatgcccccgaacctgaagaatgcgagcgcgacgtcggaggcggcggcagcggcttcccgtcatcccatggctgagtggctccaccgcttcctccacgggaggcaatgggaagtgggcttcggctcgaatgagaaaaagggaactctccaggagacatctctcattatctacatatcactcaaacaatag

SEQ ID NO: 98294 - DNA, 3999 bp, Oryza sativa
  Clone ID: PAT_MRT4530_96213C.1
ctagacgtcggggtgttgaggatccgaactagcgtagcgatccttgtgtatacctactaccacattggtgccagcgtcctctccctttgtcttctccagatggccgagcacccacccaaccaccacggagaaggcatggatgacttcgtggcagagttggcacgcatgacactggtggtgggctaccccaacgcaccggagtacacgactattccaccgctcagtggcgagcttcctcaccgtgtccgcttggaggtccatggctacatggggacttgcctcgctaaaatggtggttgaggcgtctggaggcacagcagatcacgcatgtcaggaggcagcatatctgatgatggccagactacgggagcgccacaactacatcttccacgacacggcgtaccggttccaccctcgtcgagccagcggcagtgatgtcagttccttccgtccgacagccggcgagaacgacaccacctttggtcacatgtgcgctgtgatgagggggatggacaggatgcactcggacctgcacaaggcgtccaaggccttgaatgatgggaagcttgtgaggatcattgctctgaaggacgagatagcgcgtctgaagagggagaatgctcaattgaagggtcttcccgcgccaggaggagttcggatccgcactacgccccgcaagtcgacaacggcacccgtgcgcgtccagcttgcgcctaggaacccacctccgtcagcagctcccgcagctccagcagttcccgcagcacctccagttccgcccgcagctccagcagttcctgcagctccagcgccagctccagctcctgttcccatgtcagctcctgcatctgctctctccttcgctcctgcatcagccgtcaggggccccgccagtggaaatggaggttgcttcctccagatggtctacaccaggaatggcacccgcacgacaagcgagggcagcaacggcgaagaacgcgctgatggtgtgcaccccaacagtgattccggcaatggtccgccaccatttcccgagaatctgacgctggcccaagtaatggcacatcagactcagatgatggcagccatgatgcagcagatgcagcagcagcaccagcagatgcaccagaggatgctgcagcacgccgaacagcagcaccagcagtttggtccccctcctcctcagtccaagctgcccgagtttctacgcgtcaggccacccaccttctccagcaccaccaaccccatggaggcgaatgactggctccatgccatagagaagaagctgaatctcctgcagtgcaatgatcaggagaaggtcgctttcgccacacaccagcttcaaggtcctgcgtcagcttggtgggacaatcacgtggccacccgcccgccaggcactgaagtcacttgggcggagttctgtcgtagcttcaggaaggcgcaggtgccagacggggtcgtggcacaaaagaagaggggattccgggcactccatcagggcaacaggacagtgacagagtacctccatgagttcaatcgcctcgcgcgatatgcaccggaggatgtctgcaccgacgccgagaagcaggagaaattcctagcaggcctggatgatgagctaaccaaccagctgatatctggagactatgccgactttgaaaggttggttgacaaggcaatccgtcaggaggatcagcgcaacaaaatggacaggaagagaaaggcggcacagttccggtccaaccaaggaaaccatcagcgaccgcgcttcactctcggacagcagggtggacctaccaccatgatcgtccgccagcaccgcacgttcaagtctagcaacttccaccagggcgccagtggcagtcagaaccaccatggaggtcagcctaaccacggtgcagctccacacccaccagtggcaccagcacagtcaggcccgtccgcgcaagccaaggagactggagcaaagccagggtcctgcttcaactgtggtgagcttggccacttcgccgacaaatgcccgaagcctaggcgtgccgggtcaaagtttgtccaggctcgtgtcaaccacgcgtctgcaaaggaggcgcaagcagcaccagaggtcgtactgggtacgtttcctgttaactcaatccctgcaacagtactttttgattctggtgcaacgcattcgttcatttcaaagaagtttgtcaggatgcatgggttaataagagaggaacttagcacaccaatgcgggttcataccccagggaatagctccacttcggtacaattcagcccttctataacaatagaaattcaaagatcaccatttctagccaacatcattcttcttgattccaaagacctagatgtcattcttgggatggattggctgaccaagtttaagggagtcattgattgtgcgaatcgcacagtcaccttgactaacgagaagggagaaacaatagtgtataaatcactagtctcaccaaagcaaggggtctccttgaatcagattgaggcggaaaccccagtggtcaccgaggggatgaattcgaggaaattggaagaaattcccatagtctgcgagtacccagaagtgtttcccaaagacctcaccaccatgccacccaagagagagattgaattccggattgatttggccccgggaaccgccccaatctacaagagaccgtataggatggcagccaatgaactagccgaggtcaagaaacaggttgatgagcagctgcagaaagggtacatacgaccaagtacctcaccttggggtgctccggtcatttttgtggagaaaaaggataagacgaagaggatgtgcgtcgattatcgcgcactcaacgaggtcacaatcaagaataaataccctttaccacgaatcgatgacttgtttgaccaactgaagggagctaaggtgttctctaagatagacctgcgatcaggctatcaccagttaagaattcgggaagaagatattccaaagacggctttcaccacccggtacgggctgcatgagtgcacggttatgtctttcggacttaccaacgcacccgcattcttcatgaatctgatgaacaaagtgttcatggaatttctcgacaagtttgtggtggttttcatcgacgacatacttatctattcaaagtctgaagaagaacatgagcagcatctccgtctggtactcgagaagttgaaggagcaccaattatacgccaagttcagcaagtgtgacttctggttgacggaagtcaaatttctgggccatgttattatagctcagggcatggcagttgatccatcgaacgtggagtcagttaccaaatggaccccaccgaagaccgtgtcgcagattcgaagttttcttagactggcgggttattaccgccaattcatcgaaaacttctccaggatcgctcgacccatgactcagttgcttaagaaagatgaaaagtttaaatggacagctgagtgcgataagagctttgaggagctcaaaaagaaattagtatccgccccagttctgattctgcccgaccagatgaaagatttccaggtctattgcgacgcatctcgccacgggcttgggtgtgttctaatgcaggaaggcagagtggtagcgtatgcctcgcgatagtcgcgtccacacgaagggaattatccaacccatgatctggaattggcagcagtggttcatgctttgaagatctggaggcactatctgattggcaaccgctgtgaagtatatacggatcataagagtctgaaatacatcttcacccaaccggatctaaatctccgacaacgaagatggttggaactaatcaaagactatgacatgagcattcactaccacccggggaaagccaatgtggtggcagacgcattaagcaggaaaagttactgcactgctctatgcatcgagggcatgtgtgaggaattgcagcaagagtttaagcggctcaacgtgggaattgttgaacacgggttcatagct

SEQ ID NO: 98295 - DNA, 5508 bp, Oryza sativa
  Clone ID: PAT_MRT4530_96214C.1
tcagccgctgacaggtgggtcccacttgtcagggtcgtcgtcctcctcgcgccgccgccgccgccgctggagcaccgtcgccgccgtcgacccgatcttctccgccgctttgacctcgtcgccgtcgccgtccgttggtcttccgccgctcctttggtcaccggtgagttcgtcgtgccgtccgcttcgtcccggtgccttccgttcacgccgtcgcgccgtcgttcgccggcgagcgtgcgccgtccgagctgccgagccgcccgagccgccgccgccggtggtgacgtcatcgctgacgtcatcgtcgtcctttgtcttctctagatggccggacacccacccaaccaccgcggagaaggcatgattgattttgtggcagagttggcacgcatgacgctggtggtgggctaccccaacgcgccagagtacacgacggttccaccgctcagtggcgagcttcctcaccgtgttcgcctggaggtccacggctacgtgggtacctgcctagctaatatggtggttgaggcatccggaggcacagtagatcacgcctgtcaggaggcagcatacctgatgatggccagactacgggagcgccacaactacatcttccacgacacggcgtaccgatttcacccttgtcgagccagcggtgatgatgtcagtactttccgtccgacagctgacgagaactacactacctttggtcacatgtgtactgtgatgaggggattggataggatgcactcggacctgcacaaggcgtccaaggccttgaatgatgggaagctcatgaggatcgtcgctctgaaggacgagatagcgcgcctgaagagggagaatgctcagttaaagggacttcccgcgccaggaggagtccggatccgcactacaccccgcaagacgacgactgcacccgtgcgcatccaacttgcgcccaggaacccacctccgcccgcagctcccgcagcacctccagttccgcccgcagttcctgcagctccagcaccagctccagctcccgttcacatgtccgctcccgcgtccgctctctccttcgctccagcatcagccgccaggggtccagccagtggcaacggaggttgcttgtttgggatggtctacaccaggaatggtagccgcgcaacaggcgagggcagcaacggcgaagagcgcactgagggtgtgcatcccaacagcaattccggcaatgttccgccaccacttcccgagaatccgacgctagcccaagtgatggcacatcagactcagatgatggcagccatgatgcaacagatgcagcagcagcaccagcagatgtaccagaggatgttgcagcacgccgaacagcagcaccagcagtttggtccccctccccctcagtccaagttgccagagtttctacgtgtcaggccacccaccttctccagcaccaccaaccctatggaggcgaatgactggctccatgccatagagaagaagctgaatctcctgcagtgcaatgatcaggagaaggttgctttcaccacacaccagcttcaaggtcctgcgtcagcttggtgggataatcacatggccacccgcccaccaggtactgaagtcacttgggcagagttctgccgtagcttcaggaaggcgcaggtgccagacggggtcgtggcacaaaagaagagggaatttcgggcactccatcaaggcaacaggactgtgacggagtatctccatgagttcaatcgcctcgcgcgatatgcacccgaggatgtccgtaccgacgccgagaagcaggaaaggttcatggcaggtctggatgatgagctgaccaaccaactgatatctggggactacgccgactttgagaggctagttgacaaggcaatccgtcaggaggatcaacgcaacaagatggacaggaagaggaaggccgctcagttcagggcacctcagggaagtcaccagaggccgcgcttcgctcccgggcagcagggtggacctaccaccatgatcgttcgccagtaccgcccgttccaccctagcaactttccccagggcgccagtggcagtcagaaccaccatggaggtcagcccaaccgcggtgcagctccacgcccaccaatggcaccggcacagtccggcccgtccgcgcaagccaggaaggagactggagcaaaaccagggtcttgcttcaactgtggcgagcttggccacttcgccgacaaatgcccgaagcctaggcgtgccgggccaaggtttatccaggctcgtgtcaaccacgcatctgcggaggaggcacaagcagcaccagaggttgtactgggtacgtttcctgttaactcaatccctacaacagtactttttgattctggtgcaacgcattcgttcatttcaaagaagtttgtcgggatgcatgggttaataagagaggaacttagcacaccaatgcggctgaccaagtttaagggagtcatcgattgtgtgaatcgcacagtcaccctgaccaacgagaagggagaaacggtagtgtacaaatcaccaaactcaccaaagcaaggggtctccttgaatcagattgaagcggaaatcccagtggtcaccatggagaagaatttgaggaaattggaagatatccccatagtctacgagtatccagaagtgttccccgaagacctcactaccatgccacccaagagagagattgaattccggattaacttggcaccgggaaccgctccaatttacaagagaccgtacagaatggcggccaacgaactagcagaggtcaagaagcaggttgatgagcagctgcagaaagggtacattcgaccaagtacttcaccttggggtgctccagtcatttttgtggagaaaaaggataagacgaagaggatgtgcgttgattatcgcgcactcaacgaggtcacaatcaagaacaaatatcctttgccacgaatcgatgatttgtttgatcaactgaaaggagctaaagtgttttctaagatagacctgcgatcagcctaccaccagttgataatccgggaagaggatattccaaagacggccttcaccactcggtacgggctatatgagtgcacggttatgtctttcggacttactaacgcacctgcattcttcatgaatctgatgaacaaagtgttcatggaatttctggacaagcttgttgtggtattcatcgacgacatacttatctattcaaagtccgaagaagaacatgagcaacatctccgtctgttcagcaagtgtgacttctggttaacggaagtcaaatttctgggccatgtcattacagctcaaggtgtggcagttgatccatcgaacgtggagtcagttaccaaatggaccccaccgaagaccgtgtcgcagattcaaagttttcttggacttgcgggatattaccgccgattcatcgaaaacttctccaggatcgcccgacccatgactcagttgcttaagaaagatgagaagtttaaatggacagctgagtgcgataagagttttgaggagctcaaaaagaaattagtatccgcaccagttttgattctgcccgatcagatgaaagacttccaagtctattgcgatgcatcccgccacggacttggatgtgtcctaatgcaagagggcagggtggttgcgtatgcctcgcggcagttgcgtccacacgaagggaattatccaactcatgacctggaattggcagcagtggttcatgctttgaagatctggaggcactatctgattggcaaccgctgcgaagtatatacggaccataagaatctgaaatacatcttcacccaaccggacctaaatctccgacaacgaagatggttggaactaatcaaagattataacatgagcattcactaccacccgggtaaagccaatgtggtggcagacgcattaagcaggaaaagtcactgcactgccctgtgcatcgagggcatgtgtgaggaattgcggcaggactttgagcatctcaacatgggaattgttgaatacgggttcgtagccgctctggaggcacggcctacgctcgtggataaagtcagagtagctcaagtaaatgattctgaaatagcagagctgaaaaagaacatgagagtcggaaaagcccgggatttccacgaagatgagcatggcacaatctggttgggagaaagattgtgtgtacctgacgacaaggaactgaaggatctgatactcaccgaggctcatcagacccagtactccatccatccaggcagcaccaaaatgtatcaagacctcaaagaaaagttttggtgggtcagcatgaggagagaaatagctgaattcgtcgcactctgcgatgtttgccaacgagtgaaggcagagcaccaaagaccagcaggtttactccaacctcttcaaatcccggaatggaaatgggaggagattggaatggactttataataggactgccctggacatcatcgggtcacgattcaatctggatagtcatggatcgactcactaaggttgctcacttcataccagtacataccacgtatacgggcaaaaggttggcggagctctacctctcgagaatcatgtgtctacatagagtacccaaaaagattgtatctaaccgagggagtcagttcacctcaaaattctggcagaagctgcaggaagaattggggacccgtttaaatttcagcacggcctatcacccgcaaactgatggtcaaaccgagcgagtcaatcaaatcttggaagatatattgagagcttgcgctcttgattttggtggagcttgggacaaaagcttgccatatgcggaattctcgtacaacaacagctaccaggccagtctacagatggcaccgtttgaagctttatacggccggaagtgccgcacacccctcttctgggatcagacaggcgagcgtcaactgttcgggacagaggtattagcggaagcagaagagaaagtcagaatcatcaaggaaaggttgaggattgcccagtctcgacagaagagctacgcggataaccgtcgaagggagctcacttttgaggcaggggattacgtgtatcttcgtgtcactccgctccggggagtacaccgctttcagacgaaaggcaagttggtaccacgcttcgtgggaccatacaaaatcctggaacgaaggggggaagttgcttatcagttagaacttccatccaatatgatcggcatccatgacgtgttccacgtgtcccaattaaagaagtgcttaagggtacctgaagaacaggctgattcggaacacattgatttccaggaggacctaacatacgtggagaagccggttcatatacttgataccagcgaaagaagaaccagaaacaaggtcaccaggttttgccgagttcagtggagtcatcattcagaagaggaagcaacctgggaaagggaggatgagttgaaagccgcccatccgcacctcttcgccagctcctccgaatctcggggccaagattccgtttaa

SEQ ID NO: 98296 - DNA, 5223 bp, Oryza sativa
  Clone ID: PAT_MRT4530_96215C.1
aacggaatctcggccccgagattcggaggagctggtgaagaggtgcggatgggcggctttcaactcatcctccctttcccaggttgcttcctcttctgaatgatgactccactgaactcggcaaaacctgttgaccttgtttctggttcttctttcgctggtatcaagtatacgaatcggcttctccacgtatgttaggtcctcctggatatcaatgtgtttcgaatcagcctgttcttcaggtacccttaagcacttctttaattgggacacgtggaacacgtcatggataccgatcatattggatggaagttctaactgataagcaacttctccccttcgttccaagattttgtatggtcccacgaagcgtggtgccaacttgcctttcgtctgaaaacggtgtactccccggagcggagtgacacgaagatacacgtaatctcctgcctcaaaagtgagctcccttcggcggttatccgcgtagctcttctgtcgagactgggcaatcctcaacctttccctgatgattctgactttctcttctgcttccgctaatacctctgtcccgaacagttgacgctcgcctgtctgatcccagaagagaggtgtgcggcacttccggccgtataaagcttcaaacggtgccatctgtagactggcctggtagctgttgttgtacgagaattccgcatatggcaagcttttgtcccaagctccaccaaaatcgagagcgcaagctctcaacatatcttccaagatttgattgactcgctcggtctgaccatcagtttgcgggtgataggccgtgctgaaatttaaacgggtccccaattcttcctgcagcttctgccagaattttgaggtgaactgactccctcggtcagatacaatctttttgggtactccatgtaggcacatgattctcgaaaggtaaagctccgccaaccttttgcccgtatacgtggtatgtactggtatgaagtgagcaaccttagtgagtcgatccacgactacccagatcgagtcgtgacccgacgatgtccggggcagtcccgttataaagtccatcccaatctcctcccatttccattccaggatttgaagaggttggagtaaacctgctggtctttggtgctctgccttcactcgttggcaaacatcgcagagtgcgacgaattcagctatttctctcctcatgctgacccaccaaaacttttctttgaggtcttgatacattttagtgctgcctggatgaatggagtactgggtctgatgagcctcggtgagtatcagatccttcagttccttgtcgtcaggtacacacaatctttctcccaaccagattgtgccatgctcatcttcgtggaaatcccgggcttttccgaccctcatgttctttttcagctctgctatttcagaatcatttacttgagctgctctgacttgatccacgagcgtaggccgtgcctccagagcggctacaaacccgtgttcaacaattcccacgttgagatgctcaaactcctgccacaattcctcacacatgccctcgatgcatagggcagtgcagtaacttttccggcttaatgcgtctgccaccacattggctttacccgggtggtagtgaatactcatgtcatagtctttgattagttccaaccatcttcgttgtcggagatttaggtccggttgggtgaagatgtatttcagactcttatggtccgtatatacttcgcagcggttgccaatcagatagtgcctccagatcttcaaagcatgaaccactgctgccaattccaggtcatgagttggataattcccttcgtgtggacgtaactgccgcgaggcatacgcaaccactatgccctcttgcattaggacacatccaagtccgtgacgggatgcatcgcaatagacttggaagtctttcatctggtcgggcagaatcaaaactggtgcggatactaatttctttttgagctcctcaaaactcttatcgcactcagttgtccatttaaaataacctgcaagtccaagaaaacttcgaatctgcgacacggtcttcggcggggtccatttggtaactgactccacgtttgatggatcaactgccacaccctgagctgtaatgacatggcccagaaatttgacttccgtcaaccagaagtcacacttgctgaacttggcgtatagctggtgctcctttaacttctcgagtactagacggagatgttgttcatgttcttcttcggacgttgaatagataagaatgtcgtcgatgaacaccacaacaaacttgtccagaaattccattaacactttgttcatcagattcatgaagaatgcgggtgcgttggtaagtccgaacgacataaccgtgcactcatatagcccgtaccgagtggtgaaggccgtcttcggaatatcctcctcccgaattctcaactggtggtagcctgatcgcaggtctatcttagaaaacactttagctcctttcagttgatcaaacaaatcatcgattcgcggcaaaggatatttgttcttgatggtgacctcgttgagtgcgcgataatcaacgcacatcctcttcgtcttatcctttttctctacaaaaatgaccggagcaccccaaggtgaagtacttggtcgaatgtaccctttctgcagctgctcatcaacctgcttcttgacctcggctaattcgttggccgccattctgtacggtctcttgtaaattggggcggttcccggtgccaagtcaatccggaatcaatctctctcttgggtggcatggtagtgaggtcttcgaggaacacttccggatactcgcagactatgggtatatcttccaatttcatctgattcaaagagaccccttgctttggtgagactagtgatttgtacaccacggtttctcccttctcgttggtcaaggtgactgtgcgattcgcacaatcgatgacccccttaaacttggtcagccaatccatcccaagaatgacatctaggtctttggattcgagaagaatgaggttggctagaaatggtgatctttgaatttctattgttatagaagggctgaattgaaccgaagtggagctattccctggggtatgaacccgcatcggtgtgctaagttcctctcttattaacccatgcatcccaacaaacttctttgaaatgaacgaatgcgttgcaccagaatcaaaaagtactgttgcagggattgagttaatagaaaacgtacccagtacaacctctggtgctgcttgtgcctcctccgcagatgcgtggttgacacgagcctggataaaccttggcccggcacgcctaggcttcgggcatttgtcagcgaagtggccaagctcaccacagttgaagcaggaccctggttttgctccagtctccttcttggcttgcgcgggcgggcctgactgtgccggtgccattggtgggcgtggagctgcaccgcggttggactgacctccatggtggttctgactgccactggcgccctggggaaagttgctagggttgaacgtgatacgctgcctctggctactaccttgtgcctcctggaatacaatcattttccttttacggttatccatcctgttcttcttgtcttcaagtcgaattgctttgtcaaccagctgctgaaaatcaacatagtcatgggagattaacgtaactgacagttcatcctttaagccttccaagaacttctcctgcgccctaaactcacgcttcttcaaagcaacaactcctacaggtatgtgtgtcttcttgaatccttcagtaaactcttcccaagtgattggttgtcgttctgcttcatcaatgaacttctctaatgatgggaatgcaaccatacctacacacaaagcaaacaacaaagtcttcgagtttctccatcaagattaacgactactcaagttgaaagaggaagggggaagaatgacaaaacgatttgcaaagaattctagataagaaagaaaggaaaattttcacaaattatgttttcggaaaaatagtccttaaggtttgaccatttggcttatcctacagtcgagatggctctgataccaacttgtcacgcccggaaattcactaataatttccgaactaatttgtgcatgaaatcctcgtccaggaatcagccgaggtacccaaactgacaatttaatatacaaatccatcataataataacgttacatacttacgaaaaaaaagaaaaacagcagcggaattaacggtctagcgatggcttcagctccactcccacaggcagctcaactggggtataagccaaacgtcttctccttctggatcctttttcttcaacttacaataatcggtcttcaattaatcttcttgaatacttccggcgcactcgcgaaccttcgaaacgacggaaacgacaagataatcagttcagaccaccctccaagctcaatagatctccagtataaatgccaacggatctgaaatctggcaccaccaatatatcagtgtatgtgtcatcctttagatcataactttgtagaacattagttccccgcagtaggaagacaatcttctcatcgtctaacagcagcaaaggataagcattgttattatagtattcgaaatctatgctgtacttcttaacccagagtccttgctcaagatctgacagaaaccacaggtccatgggggaaccgtatacagcatgcaccatcactaaggacccattcaagtcggctagcgagaggggctccataatttccaaggttgaggagataacaatcatatcccgtcccctggcgactggtttcggtccgtttagaatacccatccattcctccgtctcaaggtcaaatggaactatgttacctggtcgaataagcaagccatcatttgagcaatagagcctcgaataatctaacaggaaatacgcaaccccattgatgaccacacttctcatattgttacttgaacaaacaggcaactgaggtccttgtatcgccctccattgcaaagcgccagcactgttcacggtcatgatctcgcactcgtatagctcacatggattaccagaaccaaggagacggaccaccttgtactctcctgtagaggggaccttcccaaaagcacaggattccattatgagacggcctgaactcagcaaatccttattatccgcagagatactctttgccgggatcctgcagcccggg

SEQ ID NO: 98297 - DNA, 341 bp, Oryza sativa
  Clone ID: PAT_MRT4530_96216C.1
cttattggttccggaaactcactttcattcctccgatcagcattattgccaactgcttacatgactgccacaaatgaaagaattacacacgatccgtatatacattaacaaaaaaatcgccatctgttgccttttgctctacaccagcgtgttgcatgtaccattggaggggttgcagagcgcgctaagcaggtattacctcccgggcgcgccattggcgttatatgcttgccccggtcgcctgatccaccttcagctcaccggcgaatccagggtacgcgccgcttccgaagactcccgggcccgccgagggggccttcagcggggcgtccctgctggcc

SEQ ID NO: 98298 - DNA, 5819 bp, Oryza sativa
  Clone ID: PAT_MRT4530_96217C.1
atggccggccacccacccaaccaccgcggagaaggcatgattgactttgtggcagagttggcacgtatgacgctggtggtgggctaccccaacgcgccagagtacacgactgttccaccgctcagtggcgagcttcctcaccgtgttcgcctggaggttcacggctacgtgggtacctgcctagctaatatggtggttgaggcatccggaggcacagcagatcacgcctgtcaggaggcagcatacctgatgatggccagactacgggagcgccacaactacatcttccacgacacggcgtaccgatttcaccctcgtcgagccagcggtgatgatgtcagtactttccgtccgacagccggcgagaacgacactacctttggtcacatgtgtgctgtgatgaggggattggataggatgcactcagacttgcacaaggcgtccaaggccttgaatgatgggaagctcatgaggatcgtcgctctgaaggacgagatagcgcgcctgaagagggataatgctcagttaaagggtcttcccgcgccaggaggagtccggatccgcactacgccccacaagaccacgactgcacccgtgcgcatccagcttgcgcccaagaacccacctccatcagcagctcccgcagcacctccagttccgctcgcagctccggtagttcctgcagctccagtaccagctctagctcccgttcacgtgtcagctcccgcgtctgctctctccttcgctccagcatcagccgctaggggtccagccagtggcaacggaggttggttgtctgctactcccagtggcagctgcgatctcagcagcagtagatccagtggctcagagctgggcagcggcgagacttatctgccaggctccaggagtcgctcagagggacctggtcttttcctccagatggtctacaccaggaatggtagccgcgcaacaggtgagggcagcaacggcgaagagcgcactgagggtgtgcatcccaacagcaattccggcaatggtccgccaccacttcccgagaatccgacgctagcccaagtgatggcacatcagacttagatgatggcagccatgatgcagcagatgcagcagcaacaccagcagatgcaccagcggatgctgcagcacgccgaacagcagcatcagtagtttggtccccctccccctcagtccaagttgctagagtttctacgtgtcaggccacccaccttctccagcaccaccaaccctatggaggcgaatgactggctccatgccatagagaagaagctgaatctcctgcagtgcaatgatcaggagaaggttgctttcgccacacaccagcttcaaggtcctgcgtcagcttggtgggacaatcacatggccacccgcccgccaggcactgaagtcacttgggaagagttctgtcgtagcttcaggaaggcgcaggtggcagatggggtcgtggcacaaaagaagagggaattccgggcactccattagggcaacagaactgtgacggagtatctccatgagttcaatcacctcgcgcgatatgcaccggaggatgtccgcactgacgccgagaagcaggaaaaattcctagcaggtctggatgatgagctaaccaaccagttgatatctggagattacgccgatttcgaaaggctggtggacaaggcaatccgtcaggatgatcaacgcaacaagatggacaggaagaggaaggccgctcagttcagggcacctcagggaagtcaccagaggccgcgcttcgctcccgggcagcagggtggacctaccaccatgatcgtccgccagtaccgcccgttcaaccctagcaactttccccagggcgccagtggcagtcagaaccaccatggaggtcagcccaaccgcggtgcagctccacgcccaccaacggcaccggcacagtcaggcccgtccgcgcaagccaagagggagactggagcaaaaccagggtcctgcttcaactgtggcgagcttggccacttcgctgacaaatgcccgaagcctaggcgtgccgggccaaggtttatccaggctcgtgtcaaccacgcatctgcggaggaggcacaagcagcaccagaggtcgtactgggtacgtttcctgttaactcaatccctgcaacaatactttttgattctggtgcaacacattcgttcatttcaaagaagtttgtcgggatgcatgggttaaggaaagaagagcttagcacaccaatgagggttcatacctcgggaaatagctcaacctcagtcagttttagcccttcagtgctaatagaaatccaaagatcaccatttctagccaacctcattcttctcgaatccaaagacctagatgtcattcttgggatggattggctgaccaagtttaagggagtcatcgattgtgcgaatcgcacagtcaccttgaccaacgagaagggagaaacagcagtgtacaaatcaccagactcaccaaagcaaggggtctctttgaatcagattgaggcggaaatcccagtggacaccgtgaagaagaatttgaggaaattggaagatatacccatagtctgcgagtatccagaagtgttccccgaagaccttactaccatgccacccaagagagagattgaattccggattgacttggcaccgggaaccgctccaatttacaagagaccgtacagaatggcggccaacgaactagcagaggtcaagaagcaggttgatgagcagctgcagaaagggtacattcgaccaagtacttcaccttggggtgctccggtcatttttgtggagaaaaaggataagacgaagaggatgtgcgttgattatcgcgcactcaacgaggtcacaatcaagaacaaatatcctttgccgcgaatcgatgatttgtttgatcaactgaaaggagctaaagtgttttctaagatagacctgcgatcaggctaccaccagttgagaattcgggaagaggatattccaaagacggccttcaccactcggtacgggctatatgagtgcacggttatgtctttcggacttaccaacgcacccgcattcttcatgaatctgatgaacaaagtgttcatggaatttctggacaagtttgttgtggtattcatcgacgacatacttatctattcaaagtccgaagaagaacatgagcaacatctccgtctggtactcgagaagttgaaggagcaccagctatacgccaagttcagcaagtgtgacttctggttgacggaagtcaaatttctgggccatgtcattacagctcagggtgtggcagttgatccatcgaacgtagagtcagttaccaaatggatcccaccgaagaccgtgtcgcagattcgaagttttctaggactggcaggttattaccgccgattcatcgaaaacttctccaggatcgcccgacccatgactcagttgcttaagaaagatgagaagtttaaatggacagctgagtgcgataagagttttgaggagctcaagaagaaattagtatccgcaccagttttgattctgcccgaccagatgaaagacttccaagtctattgcgatgcatcccgtcacggacttggatgtgtcctaatgcaagagggcagagtggttgcgtatgcctcgcggcagttgcgtccacacgaagggaattatccaactcatgacctggaattggcagcagtggttcatgctttgaaaatctggaggcactatctgattggcaaccgctgcgaagtatatacagaccataagagtctgaaatacatcttcacccaaccggacctaaatctccgacaacgaagatggttggaactaatcaaagactatgacatgagcattcactaccacccgggtaaagccaatgtggtggcagacgcattaagcaggaaaagttactgcactgccctatgcatcgagggcatgtgtgaggaattgcggcaggagtttgagcatctcaacgtgggaattgttgaacacgggttcgtagccgctctggaggcacggcctacgctcgtggatcaagtcagagcagttcaagtaaatgattctgaaatagcagagctgaaaaagaacatgagagtcggaaaaacccgggatttccacgaagatgaacacggcacaatctggttgggagaaagattgtgtgtacctgacgacaaggaactgaaggatctgatactcaccgaggctcatcagacccagtactccattcatccaggcagcaccaaaatgtatcaagacctcaaagaaaagttttggtgggtcagcatgaggagagaaaagctgaattcgtcgcactctgcgatgtttgtcaacgagtgaaggcagagcaccaaagaccagcaggtttactccaacctcttcaaatcccagaatggaaatgggaggagattggaatggactttataatagcactgccccggacatcatcgggtcacgattcaatctgggtagtcgtggatcgactcactaaggttgctcacttcataccagtacataccacgtatacgggcaaaaggttggcggagctctacctctcgagaatcatgtgtctacatggagtacccaaaaagattgtatctgatcgagggagtcagttcacctcaaaattctggcagaagctgcaggaagaattggggacccgtttaaatttcagcacggcctatcacccacaaactgatggtcagaccgagcgagtcaatcaaatcttggaagatatgttgagagcttgcgctcttgattttggtggagcttgggacaaaaacttgccatatgcggaattctcgtacaacaacagctaccaggccagtctacagatggcaccgtttgaagctttatacggccggaagtgccgcacacctctcttctgggatcagacaggcaagcgtcaactgttcgggacagaggtattagcggaagcagaagagaaagtcagaatcatcagggaaaggttgaggattgcccaatcttgacagaagagctacgcggataaccgccgaagggagctcacttttgaggcaggggattacgtgtatcttcgtgtcactccgctccggggagtacaccgttttcagacgaaaggcaagttggcaccacgcttcgtgggaccctacaaaatcttggaacgaaggggagaagttgcttatcagttagaacttccatccaatatgatcggcatccatgacgtgttccacgtgtcccaactaaagaagtgcttaagagtacctgaagaacaggctgactcggagcatattgatatccaggaggacctgacatatgtggagaagccggttcgtatacttgataccagcgaaagaagaaccagaaacaaggtcaccaggccgaggcccagccaggccgccccgactccctcctctcccggggtcgccgacaggtggggcccacctgtcgggtcctcccccaacctcccgccgctcccggcgcgccaccgcgcccgcaaccgccgccgcgcccacgtctccgcctccttcgggccacgtcgaccacgtccgcgcttgcgccgcgtctcccgcgcccactcccctctctctcccgcccgcgcccgcggcacccggaagctcgtccgccggttgccgtatcctcccgtggcttgccgtcgccgttcgccatcgtcttcctccgcgccggccaccctcggtgaggcatccctcccctcttttccccttcctctcctcctagtgccgcgccgccgcttcaagttgcgcaccgtcgccttcggccgccaccgccgcctcccgtgccgccggtcgccgccgtcgtcggccgcatgccgtcgccgctag

SEQ ID NO: 98299 - DNA, 888 bp, Oryza sativa
  Clone ID: PAT_MRT4530_96218C.1
atgtcggccacgcagccggtgagcgaggtgttgatccggcgggtgacagcggacaacctcgccgtcgagatgctgaccatccgctcccacctgccctacttcccttacatcaccatccacgccgactaccccgtcgacaacgccgcggcgcgccacgggaggcgccgccgccgccgccgtggcggtggacgcggcaacaagagggagagcgaggccgacgagcggtgctacaggctcgccaagtccagggtggacgagctcgacgtgctccagctcggcatcacgctctgcgaccaccacggccgcctccccgccaccgcgatcgcctgcccgggcggcgccgccgtcgccgtcgagatggcgtggcaggtcggcttctccgacttcgacgtgagccagtccgccgtcgacgccctccgcgccgccggcgtcgacttggagcacctgcgcgcgcgcggcgtccccgcggcggtgttcgggcaagcgctgcgggtgttcgacatcgtgtccgccgccaacctcgggcggctcacctgggtggcgttcggcggcctctacgacttcggcttcctcctcaagatgctcgacggcgggcgtccgctgccggagacggccgaggggttcgcgtcgcggctgcgcgggcacctcggcgtcgtgtacgacgccaagtacgtggcggcgcggctgccgatggacggcgtcgagctgcgcggcgggctggtgagggtggcgagggtgctgggcgcgccggcggcggcggtggaggagccccggcaggccggcgagaagagcctggtggcgagccaggtgttcattaggatgactgggctcttcttcgcctaccacgacgtcgccgtgcacgccggcaagatcgacggcctggaatga

SEQ ID NO: 98300 - DNA, 336 bp, Oryza sativa
  Clone ID: PAT_MRT4530_96219C.1
atgtcaatttctgccagcccgtctgctgtgccattagccgaatatgcagagcatctttccaatctggttgcgattcccagtctatcccatgagcatcagtatttccttggtcctatcggcgattccgaccccattgagttcattatcaccgaaaccaataggataccttttagattggcaacccaaatctaggtcattggaaaaacactttcaaatcttggccttcccttgagaaaagatggcccgcctggtacaagcgcgtgtcggctagcaaacaagttcactgggacgaactcggaatcggccaagcgcttgctctcacaatagcaaattcgg

SEQ ID NO: 98301 - DNA, 1233 bp, Oryza sativa
  unsure (1)..(1233): unsure at all n locations
  Clone ID: PAT_MRT4530_9621C.1
atggcggccggacctcccacgcctattccttccccgccggctgccctctcccccttccaaccctatataaaccctccccgcacttctcccgtcagtttccgcctctcgccgccgttcctcctcgccggattcgagctcgcgccgtcgctctctttctccgccgtcgccgccgagctccggtccgccgccgtcgtcgccccgggaccacctcccacctcagcgccgcctccttcggcttcgccgcatcctcgccgaccccgtccacccctccgtttcgctcgccgaccgccggagcgccgccgaccccgtcgacccgagccgcgccaccgccttcctccgctccggccgcctcctccgtcgtcgccgtcgcctcggggtaagccgtggaccgccgcctcctttcccccttccctcccctctctcggccgctgctccgccgcgccggtggtcgccggcggcgaccatcggggcgcgggcgccgtctcccgccggccgcgccgacgtggccgccttcgggcgcaccgcgcggttgccgcgtggggcccggccgtcagccgcccgtgcccacgggtgcagttgacgcgtggggcccacggcgccggccggtgtgagccggcggctgcgcggtcgcccccgtgggtcccacgcgtcagccgcacccgcgggcgcgggcggctgacgccngggccccacctggcagccgcggggccgcccgaaggcggcctcgccggcgcgnccgagggagggggacgcgcccgcgccccgatgttcnacgccggcgaccaccggcgcgcgggagcgccacccgagagagaggagggaagggggaagcgagggggacggtcttcggctcaccccggtcgacggcgacgacgggaacggcggccgaagcggaagaaggcggcggcgcggttcgggatgacgatgacgacggtgctccggcggtcggcgggcgaaacggagatgcggacggggtcgacgggaacgcggcgaagcccgatggaagtgacgccgcgtcgggaggaggaccggagcgacgacggcggcgaaacggagctcggcggcgacggcggagagagaggagcacggcgcgagcacgaatccgacggcaagagcgagcggcgagcggcggaaacggaagagcggagctcggggattgattttatagcgccgagagggggagagcgcggccggagagggaggaaacggccgcggagatctcggctccattga

SEQ ID NO: 98302 - DNA, 2289 bp, Oryza sativa
  Clone ID: PAT_MRT4530_96220C.1
atgggagataggtgggggcaaaatctgtatccatataaaatgttcttggtatttggtgaggaacaagattttggaacaaaccaggcttacgtgtactatgggctacgagaggacagatatgggctatgtgagagagagtttgaattcatgaaagggtctgatttgaggctatgtgaacgggtaatcggtgagctcccacagcctcgatcgatgtcattggtggatctgcagtgctgggtcatcaagttgcttcgactccatccagaaatacaagatcttcaaatcaaagggttcttctcagaaggcttgccccttgagtttcgtccggagtggttttataaaggtgactgggagacacaccatatgcataatgatgattcatgggcttcctatgtcaagaaagtaaagagaagatatggtatgtcaatgttcgtgctctgtgtggattgctctgaaatcaagcactacagaagtttggtcaaagctgggtatggtgtttacgctcaagtggggaaggttgcggatcatgaatgcatgcctacggaggttttgcctgggcaaaaaagtctgtcatctaaatttcctgctcagtatctctcctatcgccttaaggatgagcataacatgtcaatgacagctgaagaaattgtaccttttattgctgacagatatggcgacaagatcagtctccctgaggcatggaggataaagatgaaggctttggagattctatttggtaccttctatgattcatacaactctgtaccaaggttacttaaggacataggatataaaaactatggcaattatgtgaacatcaaggacacagaggttgtaggctgtaaaagtttccgagtcctcgatcgtatattttggtcacctgcaccgtgcgtactggcctttacatactgtcgtcctgtgctttgcatcaagggcacttcactatgtgggaaataccaaccacttctgttaactgctctagcattagatgctaatgataacttgattccagtagcatttgccatcattgaaggtgagagcaaggagagctggctgtggtttcttaggaatgtgaagcaatcagttgtgaaagagcgatctggtatctgcattatacatgactacaaaagggagttgcttgatgctatagaggacctccagaataaccctcaagaacaagaaccacacacatggagagacatacaaagcaggtggtgcatcgaacaccttactgaaaacttatctgcacattttggtggcaagaagtcggcggtgctgttcaataaactctgtcagcagagccaaccaagtaagtttactgatatctggaaggacctagatgatttgacactcaggtatacgactgagaatgactctgttgctagtgaggaaatggaacaggagtcagtcgagcatgatgaggcagaacttgaatcacaaagcccatcccaccaacttgattcagcggatgatgaggaggaagtaaatcagggcggtgacagcaagagcaagattacaaggtttactgagtggatccgtctgaaaccattggagaagtggtcgctgctgcatgacacagatggagctaggtatggcatcatgggcattaatatagctgatatatatgaaggtaatcatgtgttgaaggggataaagtgccttcctctcaacgcaatagtggaggttacacaccagcgcatggcagaatacttcaaggaaagaagtgctgcagcgaagaaagcaattggcaatccttcaatgaactttcctgaatgtgtccaggatgccatgaatgccaaaatgcaaaaggcgcagattcatagtgtgacctgcatggaaatcaaggagaacaaatattttcccggggaagaggttcaaaagtttaaggttcagtcaaatcagaagaaggttgttgttcaattaacatcggagtatacccgcatcagtagggatcatgcacgcgagctcacgaaacgcgctgaatgttcctgcaacaagtcaaagctgcttcataagccctgttctcatgtcattgccgtctgttgtcagattggagttaccactgctgattacatgtccccgtactacaccctgccctatctggataacacttggagtggaaattgtgatgtacccaaattctcaccagactacaaaatcatcatgccatttgacaaaccaacttggatccctgacaaaaagctggagtgtggtctttctgtttttagaacatcagatcgcgtgcagtctgtcatggatgaggaagagcaacagagtagcagcacttag

SEQ ID NO: 98303 - DNA, 346 bp, Oryza sativa
  Clone ID: PAT_MRT4530_96221C.1
attcataagagcacaaggtcaaatctttagccaccaagatcccatcagccacaaatcgatccatctccaagctcaaaatcccaattctttccaagaaagatttttctcggaggccatgtcgaccgccggcggcggtggtggctgtcggcgggtcaccatcaggtccatctgctgcaggggcgtcaaggcgttagctcccttccagaagccgtcgctctacgcgacggcgtcggtcgccggtcggcgggagaagacgagcggagacccccacggacgggagaaacccgactgggacgccgacgtctttcactttgaccttcctcgtcggcgacgatggtatgctgca

SEQ ID NO: 98304 - DNA, 492 bp, Oryza sativa
  Clone ID: PAT_MRT4530_96222C.1
ttagtagccttttcccgcgcgcttcagcagcacggccgggacgaacggcgcggcgaaggcgtaggggtcgacggcgacggcggcgccgcccccccacggcgccggcgcgtcgggcgccgccgccgccgctccggccccgagcgggccagacagcgccgcgacgcagagctccgcgagccgccacacggcgcggcggagccaccggagcctgagccggcgtaggcacagcccgcggcctccgccgccactgcccgtccgcgcgctgctgcatccgccgccgcggccgacgacgtcgcccgtgcgccggccgacgcggcgcggcaggcggaggccgccgccccgccgctgcgcgaggctgaatgatgccgcagccggcgcttgcgcctcccccattatcagtctccggcgagcgagctgaggtgtaggtgcaggtgagctcgtcgccgggaggtcgcctttgtggttggctggctggttgtgtttactctccat

SEQ ID NO: 98305 - DNA, 429 bp, Oryza sativa
  Clone ID: PAT_MRT4530_96223C.1
gatatgaactgaggctgttattagctctaggtcaaaagagtaattgggagacaattgagacatgaagtgctggccacttgttctgaacggttgagatacaaataaaagtaataaaccacataaacagaaagaaaaaaaaaacatattttgtctaatggccgccggtaggaagaatgcataacgagaatatttcatctgaaggtcccatatatagaggctactattatggcgatgcactgcaggaagaaggccgacagatgctcatagtgaaggaaaaaccagaaagaataaagccaaggggtggagtcggtggaaccgcttaaaaggtagtctctgcctcttgcggaagccaacccagcaaattccttttgtcgctgaattacaggcttaattgaagtcaatcagttgatgccagtcttaaagcattca

SEQ ID NO: 98306 - DNA, 268 bp, Oryza sativa
  unsure (1)..(268): unsure at all n locations
  Clone ID: PAT_MRT4530_96224C.1
caacacaaattcatccgtggatccccccataggcgccgaagcgcccagttgttaaataaatcgaaaacaccggggtttaattcagcattaatcggcccacacccaaaccacccttatggggggggttttaatgggggcctaataagggggggggactcgccggcggggagggttcggttgcttngggacttaactggccgaacttgcagtcggggcaggagcagttggggcccaacttgcagccgccgttctcctggcggggggggac

SEQ ID NO: 98307 - DNA, 1615 bp, Oryza sativa
  Clone ID: PAT_MRT4530_96225C.1
gcgcgaccacatacacggcttcaaagcggtatacgcgttaagcgtatttatacagatggtatagttaaatggggttgttttacttcctatgatgaacctcggaccttaaatgaagctttcaccgacaaaaattggaaagaagctatggatgcagaatatctagctctcatgaaaaataaataagatgtggcatttagtcccgccacgacagggaagaaatattattgatttgtaaatgggtgtataaagtcaagaggaaagcagatgggagtttggatagatacaaggctagacttgttgcaaagggcttcaatcaaaggtacggcatagattatgaagacacttttagtctagttgtcaaagctgctactattagaactgtcttgtctattgctgtatctagaggttggagcctacatcaattagatgtgcaaaatgctttccttcatggagttctagaggaagaagtatatatgaggcaaccaccaggttatggtgatgctatatctcctgattatgtgtgtaaacttgagaaggcattatatgatcttaaataagctcctagagcatggtactcaaggttaagtggaaaattgcatgaattaggttttaagtcatcaaaggcagatacttccttgtttctttacaataaagggagtgtcaaaatttatttgtttatctatgttgatgatataattgtaccatttgtcactttgctgacttcaatccctagaaaataatgcaagtctcccaaatctttgagtgcaaagtccttagtaagatcctgtaacaaggcaaaagttccactaggcacacaactgactacaattatatcatcaacatagataaacaaataaattatgacactccctttattgtaaagaaacaaggaagtatctcccacctcctctccctccaaggggcaaaacccaccctcccacctcagtcaaaggtcacccacctcggtcaaactagcctgtggctttccccaccacctccactcttctcaactctcgtcacagaacagcgtagtaacgtgatgttcatcgtgcagtaacaccatgtcttacttacagtaacgatattgaaatatcgtcataatatagtcatgatgggtctacttttgataaacattttttttctaacatcatagtgcaaacggtttttaaaagtagtgcatgggagggatcgcgactcgcgagagggcgggtcgtggggacgcgagcaggagagggtgcgcgcttgcgcggggcgggtgggagggggaggggtacaaaatagtacagaagcagaatacaagcctttagcgaatgtgacagcaaaaattatgtggattcaaactttgttgctggaacttggtgttgatgcacctaaggcggcgaggatttggtgcgataatattggagctaagtatttgtctgctaatactgtatttcatactcgtactaaacatatttaagttgactatcattttgtttgagaacgagtatctcgaaaattacttgagatagaatatatttcttccatggatcaggttgcagatggatttactaggccattggctgtaaaacaatttgaagacgttagagtcaatcttaacattagaagtttagat

SEQ ID NO: 98308 - DNA, 3547 bp, Oryza sativa
  Clone ID: PAT_MRT4530_96226C.1
atggcggagagggcgattgggcggcgactcctctcgcaggagagttcatcggcggcgagggtctctccggcgacctcggcggcgctcagagacggaggtaaggttcaaggggcgggatccggaagtttgaaagggcatatcgcgacaaaattcctcgcgggaggggtttcgcgctgcttttcggaagtttctggggaagggcccaaggagctcatccatggcggagggagattgggccatctagcccatccctatagccggggttttggccctagactttcacgtcagctggcacatctggatcggcacctgaagcatctgtggggatcgaatcctcgagagctagggtttagaggggggtggagaaaagaggagttgagggaggtgaaggcggcggcggaggagtggccgaggctaggaattggtggcggggaatcgaggtggacaggtacgatcaagggagatacgcgcagatttgagaaggttgttcgaggtcggattccagcaatggcgcaacaaggagggggttggagagggcgcttccaaccaaggccagcgttccatgggaggcgaccgctaggagtggagcatcatgggaggcaaggccaggagggagttcgagcagttcatccactaccagggcgcgctgaagaaaagagggatgagcaagtctcggctgtggcaaccaaagaggggagtttagtgcagcagatcaagccgatgcagatgcaggagaagaccgaagtgggaattactgtctcaaacctcaagcaggatgaggcgaaagctgaggttgcagcttctcgtcctcctccccaagcaaacccaagacatggtatgaatccgaactctcacagaatcttttgtgtgagatgcaaaggtgttggtcacttggttaaggattgtcatgttgctgtgttttgtgtcaattgtgctaagcctactcacaagactaaggattgtctatatgataagcaacccagacctattgccaagttggtgagatatggtgctccagggcttggatgtatattgattcagaacactagatctgagccagcaaaggaacacattaatcctttggcaatgatttcaatcattagtggagggggattaactgtggcgcaattggaacaaggttttactcagcagttcaagtggaattggatatggaaagcaaaagaaattcctaatgggacctttcaaatgaggtttcccaataggatgaggtttgatgagctgtcaaactttgatcactttactgtcaaggggactaatgtgcaggttaatgtcaaagaatggacccaagaacctgaagctgtagggaagatgcatacagtttgggcaagagtgacaggtattccggatgaaatgaagacttaccctgccccttttgaggttggttctaacttgggactagtgatggaagtagacatgattactttcagggcaaaaggtctcatcagaatcaaggtgggtatgatggatttggaagcccttcctctaaaactaattctgactacaccaaaagggctgctattccaggctcagtacactttggaggaagtggtagagcaagggtggtttagagagcaagtctttgaagaggataaggaagctgtctatactccaaccaagttccatagggacagagatttggccatgaagttgcaagatgaggagatggaaaaacaatctgctaggattttggtccaagaaggaaatgtgattctatctaaaagcaaaggggctgggaaagggtctgagatgtctgaaattcccattgtagaagagacacgtgctggagatggggctttatctagtggtgggacaggaactttaagctgtttggaggtgatggctgagactgaattgggccctaggggagaagaaggagaaagagttaacttgggagacagtgaggatttcctagattcccaagaatctgaaggaaactttgccaagcaagttggtgtggttctgactgaagagggcatcgacagtcaagaagaagacacaaggagaagcaagagactgagagataaagaagacaaaaaaccacaagacatggcaatggaaaggaaagaggctcagaatgcctttattaacaaaggtcaggcttcaatcccttctattattgatgaaccaaatagctctctcatgaacattgctaatttgttaggagttagtcttgggtgtgccttggttgatgttgattctaatcttcatctaataaaggatatggagaatgctagagtcaatttgtttatgaaaaatcaagaagcaattttagacaaaactcaagagagcaaatcaggagattttcctgaactctctggcttgggagaattatactctttagaagatgatgtggactctgaacttgatgagatcgaaaatttgattaaaaacatacacacttccagtgggaaagggaaaagaatgaagggaaaccttgacactgttaagaacagacccttggttgtaggtgaggatttcaatattctgagaaaggaaagtgaaaagaataaacctaggggatacaacaaatggagtttcttatttaatgccatcattgagcaatccaatctaagagagattgaagcacttggtatgacccataagtatagggaagatagaaaggagttagaacagaaactagcctatgttataagggaggaaaaatggaagtggtttcaaaggagtaagcaaagtggcattctcttcaaagtcgatttggaaaaagcttatgacaaagtgaattgggtttttgtgcatagaatgctagtctctaaaggtttccctgatcaatggtgtgactggattatgaaagtcattaagggagggaaggtggctgttaaagttaatgatgagataggtcctcttttccaaactcacaaaggtctgaggcagggagaccctttgtccccattgctgttcaatttggcagctgaagcacttactttactggtgcagagggctgaggagcactctcttctggagggtctaggtaataatgaagaaaataagatctctattttacaatatgctgatgacaccatcttcttgctccctgacaacttagaatatgctaggaacttgaaatttattctttgtctgtttgaacagctttcagacctcaaaatcaattttcataaaagtgaggtcttttgtataggagaggccagagatagaaaagtgttgttcagccagcttttcacttgtaacataggtgatttgcctatgagacttcccactggtgtgaaggaaaggatggatttctttagaaggagattgctctggcaagaagatcaggggattaggaaatatcatcttgtacagtggcctgtgatttgtactcctagagatcaggagggtttgggtgttctagatttggatcttatgaataaagctcttttaggaaaatggatttggaaacttgagaatgaggacgggtggtggcaggaggtgttgagggataaatacctgaagaagaaaacaatgtctatacagaaacctaaacctggtgattcccacttttggcaag

SEQ ID NO: 98309 - DNA, 1102 bp, Oryza sativa
  Clone ID: PAT_MRT4530_96227C.1
cggtgcgaagaagactttcacggttaacttccatgtggatgtgcctcaacgggatcatgtatttggttccttgttgtggcatggaaaggatgctcgactgatgatgccattagtagtaaaagttgatactgcagcaaaggcttgatctgattacctagcacctgcacagatacttgatgtacgactagcatagcttacagattagttgagcgatttacaactagtactcgaaggaagagttaaccacatctcttagtttgaccatggctagctgaaatctaatgaaacctcttcttcaacaagattattttctgattagtgtcgatttgagcaatgtaaatgttgaggatgcagaagctgatgttgtagagtgcgagtaccgtatgaggtaccttttccttttgagttcatctacatttttacatgaacaaatggacatagtacagaacaaacttatgatgaatcgctatgcagtataaaaaaggttaaaagtgtacacaaggtctcccaaattccagtcactgttgacaagcactatttcaactttgaccactaatgatttttaaatggttagaatacgatgaacgagagctcgatgcttatatttaggacacaagtcacacaacacactttaataatacgacatcctttatgtattcattttttttcagaaaatatacgggtggccaaaatttaaacatgaatagattactttctgaattaaaacctttcctttcccacttaagcaatatatagagcttatttgaacgaataccctttgaacaaaagaacaatgaaactgaactagactctgaactgtaatttagtcaagggtaaaaacaaatgtactatggtgccaatcagaaagcggataggggaaaattagataacatcgcataagaattactgcggctacttgattagatcaaggattacagaaaacaaatatactaccccaacctaggaaaacctaggaaatggatcggatgattctccgtaaaaagaagaaatcggtgtcgaatgggacgcacaaaaacctggagggctgccgccctttcctccgatcccatcgaggcctgcagcccggggatccactagttta

SEQ ID NO: 98310 - DNA, 4524 bp, Oryza sativa
  Clone ID: PAT_MRT4530_96228C.1
atggcggagagggcgattgggcggcgactcctctcgcaggagagttcatcggcggcgagggtctctccggcgacctcggcggcgctcagagacggaggtaaggttcaaggggcgggatccggaagtttgaaagggcatatcgcgacaaaattcctcgcgggaggggtttcgcgctgcttttcggaagtttctggggaagggcccaaggagctcatccatggcggagggagattgggccatctagcccatccctatagccggggttttggccctagactttcacgtcagctggcacatctggatcggcacctgaagcatctgtggggatcgaatcctcgagagctagggtttagaggggggtggagaaaagaggagttgagggaggtgaaggcggcggcggaggagtggccgaggctaggaattggtggcggggaatcgaggtggacaggtacgatcaagggagatacgcgcagatttgagaaggttgttcgaggtcggattccagcaatggcgcaacaaggagggggttggagagggcgcttccaaccaaggccagcgttccatgggaggcgaccgctaggagtggagcatcatgggaggcaaggccaggagggagttcgagcagttcatccactaccagggcgcgctgaagaaaagagggatgagcaagtctcggctgtggcaaccaaagaggggagtttagtgcagcagatcaagccgatgcagatgcaggagaagaccgaagtgggaattactgtctcaaacctcaagcaggatgaggcgaaagctgaggttgcagcttctcgtcctcctccccaagcaaacccaagacatggtatgaatccgaactctcacagaatcttttgtgtgagatgcaaaggtgttggtcacttggttaaggattgtcatgttgctgtgttttgtgtcaattgtgctaagcctactcacaagactaaggattgtctatatgataagcaacccagacctattgccaagttggtgagatatggtgctccagggcttggatgtatattgattcagaacactagatctgagccagcaaaggaacacattaatcctttggcaatgatttcaatcattagtggagggggattaactgtggcgcaattggaacaaggttttactcagcagttcaagtggaattggatatggaaagcaaaagaaattcctaatgggacctttcaaatgaggtttcccaataggatgaggtttgatgagctgtcaaactttgatcactttactgtcaaggggactaatgtgcaggttaatgtcaaagaatggacccaagaacctgaagctgtagggaagatgcatacagtttgggcaagagtgacaggtattccggatgaaatgaagacttaccctgccccttttgaggttggttctaacttgggactagtgatggaagtagacatgattactttcagggcaaaaggtctcatcagaatcaaggtgggtatgatggatttggaagcccttcctctaaaactaattctgactacaccaaaagggctgctattccaggctcagtacactttggaggaagtggtagagcaagggtggtttagagagcaagtctttgaagaggataaggaagctgtctatactccaaccaagttccatagggacagagatttggccatgaagttgcaagatgaggagatggaaaaacaatctgctaggattttggtccaagaaggaaatgtgattctatctaaaagcaaaggggctgggaaagggtctgagatgtctgaaattcccattgtagaagagacacgtgctggagatggggctttatctagtggtgggacaggaactttaagctgtttggaggtgatggctgagactgaattgggccctaggggagaagaaggagaaagagttaacttgggagacagtgaggatttcctagattcccaagaatctgaaggaaactttgccaagcaagttggtgtggttctgactgaagagggcatcgacagtcaagaagaagacacaaggagaagcaagagactgagagataaagaagacaaaaaaccacaagacatggcaatggaaaggaaagaggctcagaatgcctttattaacaaaggtcaggcttcaatcccttctattattgatgaaccaaatagctctctcatgaacattgctaatttgttaggagttagtcttgggtgtgccttggttgatgttgattctaatcttcatctaataaaggatatggagaatgctagagtcaatttgtttatgaaaaatcaagaagcaattttagacaaaactcaagagagcaaatcaggagattttcctgaactctctggcttgggagaattatactctttagaagatgatgtggactctgaacttgatgagatcgaaaatttgattaaaaacatacacacttccagtgggaaagggaaaagaatgaagggaaaccttgacactgttaaggtaacacccatattagttgaaaactctatttctattgaaatggaagggatctgccaagttactgaagaggataagaggagactcactgagcccttctctatggaggaaatcaaaagagtggtctttgaactgaaacaacacaaggcccctggccctgatgggatacctggggaattctacaaaaaattctgggatttaattaaaaatgatttgtttgaactccttagtgatttccaaaagggtttgttaaatgtggaaaggctcaattatggcatcatcacccttgttcctaaaacaaaagatgctgcccaaattcaaaaatttaggccaatttgccttttgaatgttagcttcaaaattataacaaaggttctgatgaacagaatttatcatgtgatgtgttatattatctcaaaaaatcaatctgctttccttaagaacagatatattttagaaggggttgtcattttgcatgaaattttgaattctcttcatcataaaaagcaaagtggcattctcttcaaagtcgatttggaaaaagcttatgacaaagtgaattgggtttttgtgcatagaatgctagtctctaaaggtttccctgatcaatggtgtgactggattatgaaagtcattaagggagggaaggtggctgttaaagttaatgatgagataggtcctcttttccaaactcacaaaggtctgaggcagggagaccctttgtccccattgctgttcaatttggcagctgaagcacttactttactggtgcagagggctgaggagcactctcttctggagggtctaggtaataatgaagaaaataagatctctattttacaatatgctgatgacaccatcttcttgctccctgacaacttagaatatgctaggaacttgaaatttattctttgtctgtttgaacagctttcagacctcaaaatcaattttcataaaagtgaggtcttttgtataggagaggccagagatagaaaagtgttgttcagccagcttttcacttgtaacataggtgatttgcctatgagacttcccactggtgtgaaggaaaggatggatttctttagaaggagattgctctggcaagaagatcaggggattaggaaatatcatcttgtacagtggcctgtgatttgtactcctagagatcaggagggtttgggtgttctagatttggatcttatgaataaagctcttttaggaaaatggatttggaaacttgagaatgaggacgggtggtggcaggaggtgttgagggataaatacctgaagaagaaaacaatgtctatacagaaacctaaacctggtgattcccacttttggcaaggtttgatggaagtaaaggagagattctataatttttgcacaaagaaagtgggggatggaaggtccattatgttttgggaagatagttggctcgggggcagacctctggctcacttattccctactctctataacattactctctcaaaacatgtttccttggttgagattaaaaacaaaggttgggaggttataaagtttagaaggtctttgtatggaagcaaattgagggactggaataaaattaaactttctgtggaagggattcaggttgaggagggggtgagagataagcttgtctggaatctgacaaaaacaggggtcttcagtgtgaaatccttctacaatgcactatctgttcaacaaatagacattcctcttaagaaaatttggagtttcaaaattcctttgaaaattaaaattttcatttggattcttttgagaggcaagaatctgactaaggacaatttgtttaggagaggttggagaaagggtgatacaaaatgtcagttttgtgacaaacaggaatcaattcaacaccttttctttgattgctctcttgtcagactaatttggaatataatacaatgtgcttttgatctcaaaacagctaaagactgccaacacctttttggggcttggctttctgctttctcgaacaaaaccaaaaacttgattgtaactggtattgctgctgtaatctgggctgtctag

SEQ ID NO: 98311 - DNA, 1431 bp, Oryza sativa
  unsure (1)..(1431): unsure at all n locations
  Clone ID: PAT_MRT4530_96229C.1
aaacagccaaatccggacagtagttttctccacaagttatcgtagtgtgactgtatgaagtatcagactatcagtggcagaaacataattatcgttttgataattagcgattcctttagggagagaacaaaaatacagggcgccatacaattctactactcagtgcaatacaattcattgcatcttcttcctgacttcctgtagaacagaaactaccagcatttttttagctattaccatacatctcagttttttatcgatgtaaaacttctcctgaatcagtaatgggctgcaataattatctcccatataacccaacaacaaacatgtccaatcgaagctacaaattggaatgagctaaaatattaaactcattccttgtggtctctgaccttctttctcttccatttgagaaagatttgtaaagagagaccagaaaagaccatcacaacacttccccattgcttcaaggagagtgggttaccactgatgacggaggagatgacaatgctcatgaacttgcgggtggtggtgatggtagtgttagtaagagagccaaatcggctgatggttaggaagatgaaattctgacccacggcaccacacaggcagaacaggagaatgtcccatgccacctctgggttctcctggcaaaatctcactgcctcaaaaccgttggcgtaaggccaattactgaatagtaatggagcaacaaacataatcacagcattgtatatggtcccccagagattcatgccaagcattatatcccatggattagtctttggatacctagactttatcaaatcttgggtcgaattggtgtaaccatcaaaagctaagttgaggaagcacaatgtgtagcccagaggcgcattagggttagcaagcttcttgatagtcttggagcttgtcttcaacaacgcaaaggatgatacacccccagcaacaagaaaggtgcaaatgtactccggaaatgtgtacttgacaccatacagtatagttcccatcagcattactggaatcatcttagaagattttgccaggacctgagctgggtagctgatgaacttgagcgcctcgatccccatggccgggccgacagtgttggtgatgctgacgccccagtacttccgcagcggcgcgcggccagcggaggagctcccaccactcgaccacagcttgatcattatgaaggaccagacgaagcagacgacgttctgcgcgaagttgaggaacgcgaggtggtcgaaccgccgcgcctccggcccgaaccgcttcgtcgacagggtttcctggaggacgccctgggtgatgtacgccgaccagatcccggcgacgcagaatgcgagcacggccacgcgcgacaccatgctccntcngccgccgtngacgacgcgggggcggggagggcctctgcctccgcggccc

SEQ ID NO: 98312 - DNA, 10116 bp, Oryza sativa
  Clone ID: PAT_MRT4530_9622C.1
atgtgcagccgggatgattgttcagaatggttgggcctaagcaacaggatgccgcgctacaagcctgagtacttgtttggtgttgagcgatttgtccaggagttgcgtacgatgtcctttgccataggatttgggactgcccctttgtatgcccagattcctcatgatcgtgatgaagagaagtgccgagtcaaagtcaccttgaacagtaatagtgaagatatcccatcagtgatgttcgaagttggaggaggaaactacattcatgcatgtcaggaggtggcaaggatcgccataggagagctccgcgatcgctacagtgatcagttggccgacactgagtatcgctaccatcctcgccaaccccagggaggtgaccgtggcagctaccttgagactgaggggattgagaatgatgctaccacaaggcatttggttgagatactgtgggctatggatgagacccgcgcggaggttgtgctagcagctcaagatcgtgaagaccggaatcgtgataagatttgcaagctagaggacaatgtggattctatcagatgtaagtgggcccggcctgggggaggcgggacgttacatggatcgtttgggcccggcctgggggaggcgggacgttacatggatcgtttggagaaggaactagccgcattgaagggagaagcaccaccacaaaaggccagggttcgtcttaccgcaaggaagagagctctattcgtccctcgctaccaattggcgccaaaggttcgtgtggtggaaaaagaagctaccccaaccctagcggatcctccggtcgtcaacgtaagtgatgatgaaggagaagaatcgaagcgcacccactcaaaggtcgaatggggagctactcaagatgatggagacgagccgaacgagccttcaatcaactccgatgccggatctggtgattggctgcacgccatagagaagaagttggatttgcttcagtgcactgatcaggagaaggtctcatttgcatcacaccaactgcatggccccgcctctgagtggtgggatcacttctgccttaataggactactgctgaacctatcacttggcttgaattcaccgctgctttccggaagacgcatataccatcgggagtggtgtctctcaagaagaaggaattcaagtcgctcacccagggatctcgcacggtcaccgagtatctgcacgagttcaatcgtctggctcgttatgctccggaagatgtgcgcactgatgaagagcgccaggagaggttcttggaaggacttaatgatgagctttcttacccactcatgactggggattatcatgatttccagaagttagtggataaggctatttgccaggaggacaagtataaccgcatgaagcagaagaaacgccggattgctcacttcaaggcacaacaggggaatagtcagaagccgcgtcttcctttaggaccccagtccatgccacagggaggttctttgtctgttgttcgtccgcagcgtcagttcttcaacaacaatgctggcaacaacatccgcaatcaagctccactccctgttgcagctccaacacagcaacagcctgccaagaaggagcaaggcagcaagcctggagtgtgcttcaactgtggtgaaccaggccattactctgacaagtgtccgaagccccgacgcgtgaaggttgtccctgcccagagcaactctaccgcaccagcatcaaaggctcgtgtcaatcatgttgctgctgcaaaagctcaaggtgctccagatgtgattttgggtacgttccttgttaactcagttcctgcaacagtgcttttcgattttggtgctacacattcatttttatctatgagttttgcgggaaatcatgggatggaagtagaagatcttagatgtcctttgatggttagtaccccaagtaatcaagcactctctttgcaacgtagcccctcggtcagaatagaaattcaaggagtaccatttctggccaatcttattctgttagaatccaaagaccttgatgtcatcctagggatggactggttagccagatataaaggtgtgatagactgtgccaacagaaaagtaactctcaccagcaatgatggtcgagttgtaactgttcatgcattgtcttctgagtttttaaggtcaagtctgaaccaaatagctttggaagagattcccatagtacaggaatacccggacgtgttcccggacgatttacctgccaatgaattagcagaagtcaagaggcaagtagatgatttgcttcagaaaggatacattagaccaagttcgtctccatggggagctccagttatttttgtggaaaagaaagatcatacccagaggatgtgtgtggactatcgtgcactaaatgatgtgactatcaagaataagtacccgctgcccagaattgatgatttgtttgatcagcttaaaggtgccaccgttttctccaagatagatctccgatcagggtatcaccagttgagaatcaaagaggaagatatacataagacggcttttaccactagatatgggttgtttgaatgtactgttatgtcttttggacttaccaatgcccccgctttcttcatgaacttgatgaataaggtgtttatggaatacctagacaagttcgtggtggtctttattgatgacattctcatttattctcgaaccaaagaagagcatgaagaacatcttcgtcttgcactagagaagctgcgagaacatcaactgtatgccaagtttagcaagtgtgaattttggttgtctgaagtgaagttccttggtcacgtcatcttagccggaggagttgccgttgatcctagtaatgtggaatccgtaaccaactggaaacaaccaaagacagtttcagagattcgcagtttcctgggtcttgcaggttattaccggaggtttatagagaatttctccaagattgctaagcccatgacacggctgcttcagaaagatgtgaagtacaagtggtcagaagaatgtgagcagagttttcaagagttgaaaagtcgcttaatatcagcacccattttgattttgcctgatccaaagaagggtttccaagtgtattgcgatgcatctaagcttgggttaggttgtgttctgatgcaagatgggaaggtggttgcctatacatctcgtcagttacgtccgcatgagaagaactaccctactcatgatcttgagttagctgcagtggttcatgcgttgaagatttggcgtcattatcttttcggtactcgtacagaggtgtacaccgatcacaagagtttaaagtatatctttactcagccagatctgaacatgagacaacggagatggttggaattaattaaggattatgacatgggaattcattatcacccgggaaaggctaatgttgtagcagacgctcttagcaggaaaggctattgcaatgctacggaaggacgacagttgccattggagttatgcaaggaatttgaaatattaaatttgggaattgtcagtagaggtttcgttgcagccttagaagcaaagcccactctaatcgatcaggttagagaagcccaaattaatgatcctgatattcaagaaatcaagaagaatatgagaagaggaaaagctatcgggtatttggaagatgagcaaggaactgtatggttgggcgagagaatctgcgtcccagacaacaaagatttaaaagatgcaattctgaaagaagctcatgatactttatactccattcaccctggtagtaccaagatgtaccaagatctcaaggaaagattttggtgggcaagtatgaagcgtgagatagcggaatatgtagctgtgtgtgatgtttgtcagcgggtcaaggcagaacatcagaaacccgccggtttgttgcagcctttaaagataccagagtggaagtgggaggaaatcggtatggatttcatcactggtctacccagtacgtcatcaggccacgactctatttgggtgatagtcgacagacttaccaaagtggctcatttcatcccagtaaagacaacatattccggaagtcggttggcggaattgtatatggcaaggattgtgtatttgcatggcgttcctaagaaaatagtgtctgatcgagatgaacaaaccgaaagggtaaatcagattttggaagacatgttgagagcttgtgctttagacttcggtggaagttgggataagaatctatcttatgcggaattctcgtacaacaacagttatcaagctagtcttcagatggctccttacgaagcactgtatggtcggaagtgccgcactctgcttttgtgggatcaaacgggagaacgtcaggttttcgggactgatatcttaagggaagcagaagaaaaggtaaaaatcattcaagaaagattgcgtgtggctcagtctcgtcataagagttatgccgacaatcgccgcagagatttgagttttgaagaaggagatcatgtgtaccttcgtgtcacgcctcttcgaggggttcatcgttttcacaccaaaggaaaattggcaccgtgttttgtgggaccttataagattatcaatagaagaggagaggttgcttatcagttggagttacctcaatctctggcaggagtccataatgtgtttcacgtgtcacaattgaaaaagtgtttaagggtacctaccgaagaagctaatcttgaacagatagaagttcaagaggatctgacatatgttgagaagccaatccgtatcttggaaacaaacgagagaagaaccaggaatagagttatccgtttttgcaaggttcaatggagtaatcactcagagggagaatcaacttgggaacgagaagatgaattaaagtcagctcatccccatttgttcgccagttcttccgaatctatttcgacgtttccggagagtccgttttcgcaggagaagaatttgaagagttccaagtccagcaaggcaactcctggtttggaatggttaattcctggtttggagatagaactgtgcagccggggttggttgttcagaatagttgggcctatgcaacaggatgccgcgctacaagcctgagtacttgtttggtactgagggatttgtccaggagttgcgtacgatgtcctttgccataggctttgggactgcccctttgtatgcccagattcctcatgatcatgatgaagagaagtgccgtgtcaaagtcaccttgaacagtaatcgtgaagatatcccatcggtgatgttcgaggctggagggggaaactatattcatgcatgtcaggaggtggcaaggatcgccataggagagctccgtgatcgctacagtgatcagttggccaacactgagtatcgctaccatcctctccaaccccagggaagtgaccgtggcagctaccttgaacctgaggggattgagaatgatgccaccacaaggcatttggttgagatgctgtgggctatggatgagacccgcgcggagattgtgttagcagctcaagatcgtgaagaccggaatcgtggtaagatttgcaaactagaggacaaggtggatcgtttggaaaaggaactagccgcgttgaagggagaagcaccaccacaaaaggccagggttcgtcttaccgcaatgaagagagctctatttgtccctcgctaccagttggcgccaaagatggtgctcactcgcagcaacgggaaaggccccaacatcaacaacaacaacaacaacaatggagagaatcccacgcttgcccaagtcctggctcaacaggcacagcttatgaacatgatgatgcagcaactccagaaccagcagaaccagggaaacaaccatgcacctccccagaacaagttagcagaatttcttcgtgtgaggccgcctactttttctagcactactaatccagttgaggctggtgattggctgcacgccatagagaagaagttggacttgcttcagtgcactgatcaggagaaggtctcatttgcatcacaccaactgcatggccctgcctctgagtggtgggatcacttccgccttaacaggactactgctgaacctatctcttggcttgaattcaccgctgctttccggaagacgcatataccatcgggagtggtgtctctcaagaagaaggaattcaggtcgctcacccagggatcccgcacggtcaccgagtatctgcacgagttcaatcgtctggctcgttatgctccggaagatgtgcacactgatgaagagcgtcaggagaagttcttggaaggacttaatgatgagctttcttacccactcatgactggggattatcatgatttccagaagttagtggataaggctattcgtcaggaggacaagtacaaccgcatggagcagaagaaacgccggattgctcacttcaaggcacaacaggggaatagtcagaggccgcgtcttactttgggaccccagtccatgccacagggaggttcttcatctgttgttcgtccgcagcgtcagttcttcaacaacaacgcgggcaacaacatccgcaaccaagctccacgccctattgcagctctgacacagcaacagcctgccaagaaggagcaaggtagcaagcccggggtgtgcttcaactgtggtgaaccaggccattactctgacaagtgtccaaaaccccgatgcgtgaaggttgtccctgtccagagcaactctaccgcaccagcatcaaaggctcgtgtcaatcatgttgctgctgcagaagctcaaggtgctccagatgtgattttgggtacgttccctgttaactcatttcctgcaatagtgctttttgattctggtgctacacattcatttttatctatgagttttgcggggaatcatgggatggaagtagaagatcttagacgtcctttgatggttagtaccccgagtaatcaagcactctcattgcaacgtagcccctctgtcagaatagagattcaaggagtaccatttctggccaatcttattctgttagaatccaaagaccttgatgtcatcctagggatggactggttagccagatataaaggtgtgatagactgtgccaacagaaaagtaactctcaccagcaatgatggtcgagttgtaactgttcatgcattgtcttctgagcctttaaggtcaagtctgaaccaaatagctttggaagagattcccatagtacaggaatacccggatgtgttcccggacgatttacctggtatgccgcctaaaagagatattgaattcagaatagatctggtaccaggaacaactttgatccataagagaccttatagaatggcagccaatgaattagcagaagtcaagagacaagtagatgatttgcttcagaaaggatacatcagaccaagttcgtctccatggggagctccagttatttttgtggaaaagaaagatcatacccagaggatgtgtgtggactatcgtgcactaaatgatgtgactatcaagaataagtatctgctgcccagaattgatgatttgtttgatcagcttaaaggtgccaccattttctccaagatagatctccgatcagggtatcaccagttgaggatcaaagaggaagatatacctaagacggcttttaccactaggtatgggttgtttgaatgtactgttatgtcttttggacttaccaatgccgccgctttcttcatgaacttgatgaataaggtgtttatggaatacctagataagttcgtggtggtctttattgatgacattcttatctactcccgaaccaaagaagagcatgaagaacatcttcgccttgcactagagaagctacgagaacatcaactgtaggccaagtttagcaagtgtgaattttgattgtctgcagtgaagttccttggtcacgtcatctcagccggaggagttgccgttgatcctagtaatgtggaatccataaccaactggaaacaaccaaagacagtttcagagattcgcagtttcctgggtcttgcgggttattaccggaggtttatagagaatttctccaagattgctaagcccatgacatgactgcttcagaaagatgtgaagtacaagtggtcagaagaatgtgagcagagttttcaagagttgaaaagtcgcttaatatcagcacccattttgattttgcctgatccaaagaagggtttccaagtgtattgcgatgcatctaagcttgggttaggttgtgttctgatgcaagatgggaaggtggttgcctatgcatctcgtcagttacgtccgcatgagaagaactaccctactcatgatcttgagttagctgcagtggttcatgcgctgaagatttggcgtcattatcttttcggtactcgtacagaggtgtacaccaatcacaagagtttaaagtatatctttactcagccagatctgaacatgagacaacggagatggttggaattcattaaggattatgacatgggaattcattatcacccgggaaagactaatgttgtagcagatgctcttagcaggaaaggctattgcaatgctacggaaggacgacagttgccattggagttatgcaaggaatttaaaagattaaatttgggaattgtcagtagaggtcttgttgcagccttagaagcgaagcccactctcatcgatcaggttagagaagcccaaattaatgatcctgatattcaagaaattaagaagaatatgagacgaggaaaagctatcgggtatttggaagatgagcaaggaactgtatggttgggcgagagaatctgcgtcccaaacaacaaagatttaaaagatgcaattctgaaagaagctcatgatactttatactccattcaccctggtagtaccaagatgtaccaagatctcaaggaaagatttttgtgggcaagtatgaagcgtgagatagcggaatatctagctgtgtgtgatgtttgtcagcgggtcaaggtagaacatcagaaatccgccggtttgttgcagcctttgaagataccagaatggaagtgggaggaaatcggtatggatttcatcactggtctacccagaacgtcatcaggccacgactctatttgggtgatagtcgacagacttaccaaagtggctcatttcatcccagtaaagacaacatattccggaagtcggttggcggaattgtatatggcaaggattgtgtgtttgcatggcgttcctaagaaaatagtgtctgatcgaggtagtcagtttacttcaaagttttggaagaagcttcaggaagagatgggttctaagctgaacttcagtactgcttatcatccgcagacagatggacaaaccgaaagggtaaattagattttggaagacatgttgagagcttgtgctttagacttcggtggaagttggaataagaatctgccttacgcggaattctcgtacaacaacagttatcaagctagtcttcaaatggctccttacgaagcactgtatggtcggaagtgccgcactccgcttttgtgggatcaaacgggagaacgtcgggttttcgggactgatatcctaagagaagcagaagagaaggtaaagatcattcaagaaagattgcgtgtggctcagtctcgtcaaaagagttatgccgacaatcgtcgcagagatttgagttttgaagaaggagatcatgtgtaccttcgtgtcacgcctctttgaggagttcatcgttttcgcaccaaaggaaaattggcaccgcgtttcgtgggaccttataaggttgtcagtcgaagaggtgaggttgcttatcagttggagttacctcaatcgttggcaggtgtccataatgtgttccatgtgtcacagttgaaaaagtgtttaagggtacccactgaggaagctaatcttgaacagatagaaatccaagaggatctggcatatgttgagaaaccaatccgtatcttggaatggaaacagatgagagaagaactaggaatagagttatccgtttttgcaaggttcaatggagtaatcactcagaggaagaatcaacttgggaacgagaagatgaattaaagtcagctcatccgcatttgttcgccagttcttccgaatctcgaggacgagattctgtt

SEQ ID NO: 98313 - DNA, 194 bp, Oryza sativa
  Clone ID: PAT_MRT4530_96230C.1
gcgtggaggacgcaaactgacaccacggttactgaccgacactactgggtgacacactacttgacaaggcacagtggttgctacgactacctgcttcacgataggtcaccgaccacaccacactcactgttggcctgactctaccaagaactttcacgacaacgtgacctgacgactctactggccaaactact

SEQ ID NO: 98314 - DNA, 5347 bp, Oryza sativa
  Clone ID: PAT_MRT4530_96231C.1
atggccggtcacccacccaaccaccgcagagaaggcatgatcgactttgtggccgagttggcacgcatgacactggtggtgggctaccccaacgcgccggagtacacgaccattccaccgctcagtggcgagcttcctcaccgtgtccgcttggaggtccatggctacgtggggacttgcctcgctaacatggcggtcgaggcgtcaggaggcacagcagatcacgcctgtcaggaggcagcctacctgatgatggccagactacgggagcgccacaactacatcttccacgacacggcgtaccgctaccacccccgtcgcgccaacggtgatggcgtcagctccttccgtccgacggctggcgagaacgacaccacctttggtcacatgtgtgctgtgatgaggggattggacaggatgcactcggacctgcacaaggcgaccaaggccttgaacgatgggaagctcatgaggatcgtcgctctgaaggacgagatagcgcgcctgaagagggagaacgctcacctaaagggtcttccagcgccaggaggagtccggatccgcactacgccccgcaagacgacgacgacacccgtgcgcatccagcttgcgcccaggaacccacctccagcagcagctcccgcagcacctccagttccgcccgtagttcctgcagctccagctccagcccccgcgtccgctctctccttcgctccagcatcagccgccagaggtccggccagtggcaccggaggttggttgtctgctactcccagtggcagccgcgatctcagcagcagcagctccagtggctcacagtcaggcagcggcgagacatatctgccaggctccaggagtcgctcagagggacctgatggtctacaccaggactggcaaccgcacgacaggcgagggcagcaacggcgaagaacgcgctgatggtgtgcaccccaacagtgattccggcaatggtccgccaccacttcccgagaatccgacccttgcccaagttatggcacatcagactcagatgatggcagccatgatgcagcagatgcagcagcagcaccagcagatgcaccagaggatgatgcagcacgtcgaacagcagcaccagcactttggtccccctccccctcagtccaagttgcctgagttcctacatgtcaggccacccaccttctccagcaccaccaaccctatgaaggcaaatgactggctccatgcaatagagaagaagctgaatctcctgcagtgcaatgatcaggagaaggtcgctttcgccacacaccagcttcagggtcctgcgtcagcttggtgggacaaccacatggccacccgcccaccgggtactgaagtcacatgggcagagttctgccgtagcttcaggaaggcacaggtgctagatggggtcgtggcacaaaagaagagggaatttcgtgcactccaccagggcaacaggactgtgacagagtacctccacgagttcaatcgcctcgcacgatatgcaccagaggatgtccgcaccgacgccgagaagcgggagaagttcatggcgggtctggatgatgagctgaccaaccaactgatatccggggactacgctgactttgagaggctggttgacaaggcaatccgtcaggaggaccaacgcaacaagatggacaggaagaggaaggccgctcagttcagggcacatcagggaagtcaccagaggccgcgcttcactcccggacagcagggtggacctaccaccatgatcgtccgccagcaccgcccgttcaaccctagcaactttccccagggcgccaatggcagtcagaaccaccatggaggtcagcccaaccgcggtgcagctccacgcccaccaatggcaccggcacagtcaggcccgtccgtgcaagccaagaaggagactggagcaaaaccagggtcctgcttcaactgtggcgagcttggccacttcgctgacaaatgcccgaagcctaggcgtgccgggccaaggtttgtccaggctcgtgtcaaccacgcatctgcggaggaggcacaagcagcaccagaggtcgtactgggtacgtttcctgttaactcaatccctgcaacagtactttttgattctggtgcaacccattctttcatttcaaagaaatttgtggggatgcatgggttaaggaaagaagagcttagcacaccaatgagggttcataccccgggaaatagttcaaccttagtcagttttagcccttcagtgctaatagaaatccaaagatcaccatttctagccaacctcattcttctcgaatccaaagacctagatgtcattcttgggatggattggctgaccaagtttaagggagtcatcgattgtgcgaatcgcacagtcaccttgaccaacgagaagggagaagccgtggtgtacaaatcactagtctcaccaaagcaaggggtctccttgaatcagattgaggcggaaatcccagtggacaccgtggagaagaatttgaggaaattggaagacatacccatagtctgcgagtatccagaagtgttccccgaagaccttactaccatgccacccaagagagagattgaattccgaattgacttggcaccgggaaccgctccaatttacaaaagaccgtacagaatggcggccaacgaactagcagaggtcaagaagcaggttgatgagcagctgcagaaagggtacattcgaccaagtacttcaccttggggtgctccggtcatttttgtggagaaaaaggataagacgaagaggatgtgcgttgattatcgcgcacttaacgaggtcacaatcaagaacaaatatcccttgccgcgaatcgatgatttgtttgatcaactgaaaggagctaaagtgttttctaagatagacctgcgatcaggctaccaccagttgaggattcgggaagaggatattccaaagacggccttcaccacccggtacgggctatatgagtgcacggttatgtctttcggacttaccaacgcacctgcattcttcatgaatctgatgaacaaagtgttcatggaatttctggacaagtttgttgtggtattcatcgacgacatacttatctattcaaagtccgaagaagaacatgagcaacatctccgtctggtactcgagaagttgaaggagcaccagctatatgccaagttcagcaagtgtgacttctggttgacggaagtcaaatttttgggccatgtcattacagctcagggttattaccgccgattcatcgaaaacttctccaggatcgcccgacccatgactcaattgcttaagaaagatgagaagtttaaatggacagctgagtgcggtaagagttttgaggagctcaaaaagaagttagtatccgcaccagttttgattctgcccgaccagatgaaagacttccaagtctattgcgatgcatcccgccacggacttggatgtgtcctaatgcaggagggcagagtggttgcgtatgcctcgcggcagttgcgtccacacgaagggaattatccaactcatgacctggaattggcagcagtggttcatgctttgaagatctggaggcactatctgattggcaaccgctgcgaagtatatacggaccataagagtctgaaatacatcttcacccaaccggacctaaatctccgacaacgaagatggttggaactaatcaaagactatgacatgagcattcactaccacccgggtgaagccaacgtggtggcagatgcattaagcaggaaaagttactgcactgccctatgcatcgagggcatgtgtgaggaattgcggcaggagtttgagcatctcaacgtaggaattgttgaacacaggttcgtagccgctttggaggcacggcctacgctcgtggatcaagttagagccgctcaagtgaatgatgccgaaatagcagagctaaaaaagaacatgagagtcggaaaggctcggaatttccttgaggatgaacacggcacaatctggttgggagaaagattgtgtgtacctgacgacaaggaactgaaggatctgatactcaccgaggctcatcagacccagtactccattcatccaggcagcaccaaaatgtatcaagacctcaaagaaaagttttggttggtcagcatgaggagagaaatagctgaattcgtcgcactctacgatgtttgccaacgagtgaaggcagggcaccaaagaccagcaggtctactccaacctcttcaaatcccggaatggaaatgggaggagattggaatggactttataacaggactgccccggacatcgtcgggtcatgattccatctgggtagtcgtggatcgacttactaaggttgctcacttcataccagtacataccacgtatacgggcaaaaggttggtggagctttacctttcgagaatcatgtgtctacatggagtacccaaaaagattgtatctgatcgagggagtcagttcacctcaaaattctggcagaagctgcaggaagaattggggacccatttaaattttagcacggcctatcacccgcaaactgatggtcagaccgagcgagtcaatcaaatcctggaagatatgttgagagcttgcgctctcgattttggtggagcttgggacaaaaacttgccatatgcggaattctcgtacaacaacagctaccaggccagtctacagatggcaccgtttgaagctttatacggccggaagtgccgcacacctctcttctgggatcagacaggcgagcgtcaactgttcgggacagaggtattaacggaagcggaagagaaagtcagaatcatcagggaaaggttgaggattgcccagtctcgacagaagagctacgcggataaccgccgaagggagctcacttttgaggcaggagattacgtgtatcttcgtgtcactccgctccggggagtacaccgttttcagacgaaaggcaagttggcaccatgcttcgtgggaccctacaaaatcttggaacgaaggggagaagttgcttatcagttagaacttccatccaatatgatcggcatccatgacgtgttccacgtgtcccaattaaagaagtgcttaagggtacttgaagaacaggctgattcggaacacattgatatccaggaggatctaacatatgtggagaagccggttcgtatacttgataccagcgaaagaagaaccagaaacaaggtcaccaggttttgccgagttcagtggagtcaccattcagaagaggaagcaacctgggaaagggaagatgagttgaaagccgcccatccgcacctcttcgccagctcctccgaatctcggggccgagattccgtataa

SEQ ID NO: 98315 - DNA, 4605 bp, Oryza sativa
  Clone ID: PAT_MRT4530_96232C.1
acgacgacggcacccgtgcgcatccagcttgcgcccaggaacccacctccatcagcagctcccgcagcacctccagttctgcccgcagttcctgcagctccagctccagctcccgttcacatgtcagctcccgcgtccgctctctccttcgctccagcatcagccgccaggggtccagccagtggcaacggaggttggttgtctgctactcctagtggcagccacgatctcagcagcagcagctccagtggctcagagtcgggcagcagcgagacttatctgccaggctccaggagtcgctcagagggacctggcttttccctccagatggtctacaccaggaatggtagccgcgcaacaggcgagggcagcaacggcgaagagcgcactgatggggtgcatcccaacggcgattccggcaatggtccaccaccacttcccgagaatccgacgctagcccaggtgatggcacatcagactcagatgatggcagccatgatgcagcagatgcagcagcagcaccatcagatgcaccagaggatgctgcagcacgccgaacagcagcaccagcagtttggtcctcctccccctcagtccaaattgccagagtttctacgtgtcaggccacccactttctccagcaccaccaaccctatggaggcgaatgactggcttcatgccatagagaagaagctgaatctcctgcagtgcaatgatcaggagaaggttgctttcaccacacaccagcttcaaggtcctgcgtcagcttggtgggacaatcacatggccacccgcccaccaggtactgaagtcacttgggcagagttctgccgtagcttcaagaaggcgcaggtgccagacggggtcgtggcacaaaagaagagggaattccgggcactccatcagggcaacaggactgtgacggagtatctccatgagttcaatcgcctcgcgcgatatgcaccggaggatgtccgtactgacgccgagaagcaggaaaaattcctagcaggtctggatgatgagctaaccaaccagttgatatctggagattacgccgatttcgaaagactggtggacaaggcaatccgtcaggaggatcaacgcaacaagatggacaggaagagcaactttccccagggcgccagtggcagtcagaaccaccatggaggtcagcccaaccgcggtgcagctccacgcccaccaatggcaccggcacagtcaggcccgtccgcgcaagccaagaaggagactggagcaaaaccagggtcctgcttcaactgtggcgagcttggccacttcgctgacaaatgcccgaagcctaggcgtgccgggccaaggtttatccaggcccgtgtcaaccacgcatctgcggaggaggcacaagcagcaccagaggtcgtactgggtacgtttcctgttaactcaatccctgcaacaatactttttgattctggtgcaacgcattcgttcatttcaaagaagtttgtcgggatgcatgggttaaggaaagaagagcttagcacaccaatgagggttcataccccgggaaatagttcaacctcagtcagttttagcccttcagtgctaatagaaatccaaagatcgccatttctagccaaccttattcttctcgaatccaaagacctggatgtcattcttgggatggattggctgaccaagtttaagggagtcatcgattgtgcgaatcggacagtcaccttgaccaacgagaagggagaaacagtagtgtacaaatcaccagactcaccaaagcaaggggtctctttgaatcagattgaggcggaaatcccagtggacactgtggagaagaatttgaggaaattggaagatatacccatagtctgcgagtatccagaagtgttccccgaagaccttactaccatgccacccaagagagagattgaattccggattgacttggcaccgggaaccgctccaatttacaagagaccgtacagaatggcggccaacgaactagcagaggtcaagaagcaggttgatgagcagctgcagaaagggtacattcgactaagtacttcaccttggggtgctccggtcatttttgtggagaaaaaggataagacaaagaggatgtgcgttgattaccgcgcactcaacgaggtcacaatcaagaacaaatatcctttgccgcgaatcgatgatttgtttgatcaactgaaaggagctaaagtgttttctaagatagacctgcgatcaggctaccaccagttgagaattcgggaagaggatattccaaagacggccttcaccactcggtacgggctatatgagtgcacggttatgtctttcggacttaccaacgcacccgcattcttcatgaatctgatgaacaaagtgttcatggaatttctggacaagtttgttgtggtattcatcgacgacatacttatctattcaaagtccgaagaagaacatgagcaacatctccgtctggtactcgagaagttgaaggagcaccagctatacgccaagttcagcaagtgtgacttctggttgacggaagtcaaatttctgggccatgtcattacagctcagggtgtggcagttgatccatcgaacgtagagtcagttaccaaatggaccccaccgaagaccgtgtcgcagattcgaagttttcttggacttgcaggttattaccgccgattcatcgaaaacttctccaggatcgcccgacccatgactcagttgcttaagaaagatgagaagtttaaatggacagctgagtgcgataagagttttgaggagctcaagaagaaattagtatccgcaccagttttgattctgcccgaccagatgaaagacttccaagtctattgcgatgcatcccgtcacggacttggatgtgtcctaatgcaagagggcagagtggttgcatatgcctcgcggcagttgcgtccacacgaagggaattatccaactcatgacctggaattggcagcagtggttcatgctttgaagatctggaggcactatctgattggcaaccgctgcgaagtatatacggaccataagagtctgaaatacatcttcacccaaccggacctaaatctccgacaacgaagatggttggaactaatcaaagactatgacatgagcattcactaccacccgggtaaagccaatgtggtggcagacgcattaagcaggaaaagttactgcactgctctatgcatcgagggcatgtgtgaggaattgcggcaggagttggagcatctcaacgtgggaattgttgaacacgggttcgtagccgctttggaggcacggcctacgctcgtggatcaagtcagagcagctcaagtaaatgattctgaaatagcagagctgaaaaagaacatgagagtcggaaaagcccgggatttccacgaagatgaacacggcacaatctggttgggagaaagattgtgtgtacctgacgacaaggaactgaaggatctgatactcaccgaggctcatcagacccagtactccattcatccaggcagcaccaaaatgtatcaagacctcaaagaaaagttttggtgggtcagcatgaggagagaaatagctgaattcgtcgtactctgcgatgtttgtcaacgagtgaaggcagagcaccaaagaccagcaggtttactccaacctcttcaaatccaggaatggaaatgggaggagattggaatggactttataacaggactaccccggacatcatcgggtcacgattcaatctgggtagtcgtggatcgactcactaaggttgctcacttcataccagtacataccacgtatacgggcaaaaggttggcggagctctacctctcgagaatcatgtgtttacatggagtacccaaaaagattgtatctgatcgagggagtcagttcacctcaaaattctggcagaagctgcaggaagaattggggactcgtttaaatttcagcacggcctatcactcgcaaattgatgaattctcgtacaacaacagctaccaggccagtctacagatggcaccgtttgaagctttatatggccggaagtgccgcacacctctcttttgggatcagacagacgagcgtcaactgttcgggacagaggtattagcggaagccgaagagaaagtcagaatcatcagggaaaggttgaggattgcccagtctcgacagaagagctacgcggataaccgccgaagggagctcacttttgaggcaggggattacgtgtatcttcgtgtcactccgctccggggagaagttgcttatcagttagaacttccatccaatatgatcggcatccatgacgtgttccacgtgtcccaattaaagaagtgcttaagggtacctgaagaacaggctgattcggaacacattgatatccaggaggacctaacatatgtggagaagccggttcgtatacttgataccagcgaaagaagaaccagaaacaaggtcaccaggttttgccgagttcagtggagtcaccattcagaagaggaagcaacctgggaaagggaagatgagttgaaagccgcccatccgcacctcttcgccagctcctccgaatctcggggccgagattccgtttaa

SEQ ID NO: 98316 - DNA, 8305 bp, Oryza sativa
  Clone ID: PAT_MRT4530_96233C.1
atgacgaagccgccatccaagatggaggtggagccatccaatgtgataccggtcacattggatgacttcgaaggagaagatcgtaaagctatggaggagtacatcaacgagctcacacgggaggcgttgatgagagcaaacactaggactcgtcaaggcgtgatcatcaagcccgggccacatcccaagctcgctcccgacgtagtaagcaatgatgaggtatcacaatctatccaacaacaaattgcatctacaatagattcatcaatggttgcttttaaagatcagctagatgtaatgtttaaggataaatttgatgggtttttaaggattaagttcggttctcttatggatgattacacattaaaggataaagcctctaccactgctaatcaacctcctatagatcaaacgggtaataaaaccgacagaacggcgttcacggccggtcagaccgggtattaccccggcggttagaccgggtctcaagccggtccgaccgcacatcatgacgccggtcagaccggaccctgggccggtcagaccgacgcaattgttccaatacagggaatagatccgatgactaatactagttatttgtatcactttaaaacatttgatcctcctgtatctactgctacaagtagtccccaagttcccccacatattcctaatgcttataatgatgtttctaggggatatcctcccgatattagacaaggccaatataatcatattgcgccacaaacacaacctattaggccaccgaatccaccgccaagttaacaagggcctaataacatggaggatgtaattcgtgatattattaggaatagattcgggattgaaactaggaatcgtgctagaacttacaaaaagccatatcctgattattatgataatgtgccgtttccttgaaattatagagttcccgaatttgccaagtttagtggtgaggatggtaagaccacatgggagcatgtaggtcaatttttgatgcaatgtggtgaggctaatagtgatacttttaagttgcgcttgttttctttatctttatccagtaatgctttcacatggtttacttttttaccggcaaattctattcatacttgggctcaattagaagaacaatttcatgattattcaatttcatgattatttctatactggagaaactgagcttaggttatgtgatttgacatcggttaagcaaaagtataatgaatctgtcattgattatattaagagatttagagatgttagaaaccgatgttatactttgaatataactgatagagatttggctggtcttgcttttaatggtttggttgctcctcttagagaaagactagacggccaacaatttcttgatgttagtcaactcatgcaaagggctctggctcaagaaagccgggttaaggataatagaaaacttgctagaccatttgacaaaaaacctaatgttaatgtggttgattaccctgaggctagtgatagtgaggaagagggtgatcatgatatttatgttgccgaatggttatggactaataaaaataagccttttgtttgctctaacctaatgccgactcctcgcaaagatcggcaaagtgaggttaaatatagttttgatgtggccaagtgtgataagattttttattatcttttgcaagagaaacaaattagattacctaaagaccatatcataccttctcaagaagagttgaaacgtcgagcatattgtaagtggcatgattctcattctcactctactaatgattgcaatgtgtttcggcgacaggttcaatcggccatagatgaaggtcgattgaagttcaccgatggctccaagatgaagcttgatcatgatccttttccggtgaatacaattaatttcaatgataagaaggtgttgattcggccggagcaagccgaatctactatgggaaaggaagtggtcattggtgaaccaagatccaagatgatagtgcccaagaagccggagaaatatgagaagcaaggtagtgggaaaattcacaacaaagggaagagaccaagatcacctcctagggagcgatttggtcattcaccaagacggtcgcattcaccttcatatcattatccacaagacatgtcatggggttcctatccaatgctgccgtcgggttatccctatccttacttcttgccatggggggcgacgccgccaatgttcaatcatatgcctccaatgcaattcaaccaagggtggagaggaccacggaagccaattcatgagcgtttgtcttcaccaaacaatagccgattttatggtaagaatcgggctaatgaagaaaagagggaaggaaagcgcgtcaaggtggaggaaaagacttcggaagtgattactatcaaagtggggtctcatgatgtgccaatacctactggagatggagttgaagtgtccccgaacagaaaatccgaagacggccggtctgaccgccgacccgatagtggtccgaccgacacctcaggccggtctgaccgtgctccggatgtcggtctgaccggcgcgtctggccggtctgaccggtggtctacggctggtctgaccgggctccagcgccggtttgacaggaggattgcaaagggcgatgtggaggcttcatcgtcttcaaacaaaactaatagagggcattatttacctcctggaacagagccgaatcctaggtggatgcctaaggatttgacggctactcaaaagagaaggttgcaacgtcttcgggcccaagagttgagagagaaaaaggccgaagagcaaagggataaaatgttcaatgagttgcgacccacaccggaaaaggaagaataattggttgataaaagtgaatcatctccaaaagaagacatggatatcaacatggtatgtatgttgcctatggagttttgtgctatggatgaagccgaggttgctcaattctcattagatcctaaagacgcggtttttgagaagcccgatgaatcaaaccgtcatatgaagcctctctatctcaaaggccatgttgatgggaagccagtctctaggatgctagtggatggaggtgccgccgtgaacttgatgccgtactcattattcaagaagttagggcgtgaggatgatgagttgaagaagaccaacatgattctcaatggcttcaatggtgaaccaacggaggcaaagggtatcttttcggcggaactcaccgtgggaaacaaaactgtcacgatgggttggaaactatgtcacgtcttccgtccgtataccgtggtgatggccggtcacccacccaaccaccgtggagaaggcatgattgacttcgtggcagagttggcacgcatgacactggtggtgggctaccccaatgcgccagaatacacgacgattcccccgctcagtggcgaacttcctcaccgtgtccgcttggaggtccacggctacgtggggacttgcctcgctaatatggcggttgaggcgtcaggaggcacagcggatcacgcttgtcaggaggcagcctacttgatgatggccagactgcgggagcgccacaactacatcttccacgacacggcgtaccgcttccaccctcgtcgagcccacggtgacgacgtcagttccttccgtccgacagctggcgagaacgacaccacctttggtcacatgtgtactgtgatgaggggattggacaggatgcactcggacctgcacaaggcgaccaaggccttgaatgatgggaagctcatgaggatcgtcgctctgaaggatgagatagcgcgcctgaagaaggagaatgctcagttgaagggtcttccagcaccaggaggagtccggatccgcactacgcctcgtaagaggacgactgcacccgtgcgcatccagctcgcgcccaggaacccagttccgaccgcagctcctgcagcacctccagttccgcccgcagctccggcagttcctgcagctccagctccagctcccgcgttcgatctctccttcgccctagcatcagccgccaggggtccagccagtggtaccggaggttgcttgtttgggatggtctacaccaggactggcaaccgcacgacaggcgagggcagcaacggcgaagaacgcgttgatggtgtgcaccccaacagcgattccggcaatggtccgccaccacttcccgagaatccgacccttgcccaagttatggcacatcagactcagatgatggcagccatgatgcagcagatgcagcagcagcaccagcagatgcaccaaaggatgatgcagcacgccgaacagcagcaccagcagtttggtccccctccccctcagtccaagttgccagagtttctacgcgagaaggtcgcttttgccacacaccagcttcagggtcccgcgtcagcttggtgggacaaccacatggccacccgcccaccgggtactgaagtcacatgggcagagttctgccgtagcttcaggaaggcacaggtgccagatggggtcgtggcacaaaagaagagggaatttcgtgcactccaccagggcaacaggactgtgacagagtacctccacgagttcaatcgcctcgcgcgatatgcaccagaggatgtccgcaccgatgccgagaagcaggagaagttcatggcgggtctggatgatgagctgaccaaccaactgatatccggggattacgctgactttgagaggctggttgacaaggcaattcgtcaggaggaccaacgcaacaagatggacaggaagaggaaggccgcacagttcagggcacctcagggaagtcaccagaggccgcgcttcactcccggacagcagggtggacctaccaccatgatcgtccgtcagcaccgcccgttcaactccagcaactttcaccagggctctagtggcagtcagaaccaccatggaggtcagcccaaccgcggtgcagctccacgcccaccaatggcaccggcacagtcaggcccgcccgcgcaagccaagaaggagactggagcaaaaccagggtcctgcttcaactgtggcgagcttggccacttcgccgacaaatgcccgaagcccaggcgtgccgggccaaggtttatccaggctcgtgtcaaccacgcatctgcagaggaggcacaaacagcaccggaggtcgtactggtactttttgattctggtgcaacgcattctttcatttcaaagaaatttgtggggaggtatgggttaaggaaagaagagcttagcacaccaatgagagttcataccccgagaaatagttcaacctcagtcagttttagcccttcagtgctaatagaaatccaaagatcaccatttctagccaacctcattcttctcgaatccaaagacctagatgtcattcttgggatggattggctgaccaagtttaagggggtcattgattgtgcgaatcgcacagtcaccttgaccaacgagaagggagaaaccgtggtgtacaaatcaccagactcaccaaagcaaggagtctccttgaatcagattgaagcggaaatcccagtggacaccgtggagaagaacttgagaaaattggaagatatacccatagtctgcgagtatccggaagtgttccccgaagacctcactaccatgccacccaagagagagattgaattccggattgacttggcaccgggaactgctccaatctataagagaccgtacagaatggcggccaacgaattagcagaggtcaagaagcaagttgatgagcagctgcagaaagggtacattcgaccaagcacttcaccttggggcgctccggtcatttttgtggagaaaaaggataagacgaagaggatgtgcgtcgattatcgcgcacttaacgaggtcacaatcaagaataaatatcctttaccgcggatcgatgatttgtttgatcaactgaaaggagctagagtgttttctaagatagacctgcgatcaggctaccaccagttgagaatccgggaagaggatattccgaagacggccttcaccactcggtacgggctatatgagtgcacggttatgtctttcggacttaccaacgcacccgcattcttcatgaatctgatgaacaaagtgttcatggaatttctggacaagtttattgtggtgttcatcgacgacattcttatctattcaaagtctgaagaagaacatgaacaacatctccgtctagtactcgagaagttgaaggagcaccagctatacgccaagttcagcaagtgtgacttctggttgacggaagtcaaatttctgggccatgtcattacagctcagggtgtggcagttgatccatcgaacgtggagtcagttaccaaatggaccccaccgaagaccgtgtcgcagattcggagttttcttggacttgcgggttattaccgtcgattcatcgaaaatttctccagaatcgcccgacccatgactcagttgcttaagaaagatgagaagtttaaatggacagccgagtgcgataagagcttcgaggagctcaagaagaaattagtatccgcaccagttttgattctgcccgacccgacgaaagacttccaagtctattgtgatgcatcccgtcacggacttggatgcgtcctaatgcaagagggcagagtggttgcgtatgcctcgcggcagttgcgtccacacgaagggaattatccaactcatgacttggaattggcagcagtggttcatgctttgaagatctggaggcactatctgattggcaaccgctgcgaagtatatacggaccataagaactatgacatgagcattcactaccacccgggaaaggccaatgtagtggcagacgcattaagccggaaaagttactgcactgccctatgcaccgagggcatgtgtgaggaattgcggcaggagtttgagcatctcaacgtgggtattgttgaacacgggttcgtagccgctctggaagcacggcctacgctcgtggatcaagtcagagcagctcaagtaaatgattctgaaatagtagagctgaaaaagaatatgagagtcggaaaagcccgggatttccacgaggatgaacacggcacaatcaggatgggagaaagattgtgtgtacccgacgacaaggaactgaaggatctgatactcaccgaggctcatcagacccagtactccattcatccaggcagcactaaaatgtatcaagacctcaaagaaaagttttggtgggtcagcatgaggagagaaatagctgaattcgtcgcactctgcgatgtttgccagcgagtgaaggcagagcaccaaagaccagcaggtttactccaacctcttcaaatcccggaatggaaatgggaggagattggaatggactttataacgggactgccccggacatcatcgggacatgattcaatctgggtagtcgtggatcgactcaccaaggtggctcactttataccagtacataccacctatacgggaaagagattggcagaattgtacctcgcaaggatcatgtgtttgcatggggtacccaagaagatagtatccaaccgaggtagtcagttcacctcaaagttttggcagatactgcaggaagaattggggacccgtttaaatttcagcacggcctatcacccgcaaactgatggtcagaccgagcgagtcaatcaaatcttggaagatatgttgagagcttgcgctcttgattttggtggagcttgggacaaaagcttaccatatgcggaattctcgtacaacaacagctaccaggccagtctacagatggcaccgtttgaagctttatacggccggaagtgccgcacacctctcttctgggatcagacaggcgaacgtcaactgttcggaatagaagtattagcggaagcagaacagaaagtcagaatcatcagggaaagattgaggattgctcagtctcgacagaagagctacgcggataaccgtcgaagggagctcacttttgaggcaggagattacgtgtatcttcgtgtcactccgctccgaggagtacaccgttttcagacgaaaggcaagctggcaccacgcttcgtgggaccatacaaaattttggaacgaaggggagaagttgcttatcagctagaacttccatccaacatgatcggcatccatgacgtgttccatgtgtcccaattaaagaaatgcttaagggtacctgaagaacaggctgattcggaacacattgatatccaagaggacctaacatatgtggagaagccggttcgtatacttgataccagtgaaaggagaaccagaaacaaggtcaccaggttttgctga

SEQ ID NO: 98317 - DNA, 627 bp, Oryza sativa
  Clone ID: PAT_MRT4530_96234C.1
atgacggctgagacccgggaggcagcggcagacgcaacggcggcgcacggaggctgtggatggctggcagggattgcggctggcatggccagctcagcgatggctcagccggcaaccagcatgatgagcgcgtggagtgtggccggcggtgccggtgtggcacgccaaagtgcgcagcaggaggtgaagctggttgagatggagaccggccaggttctcagcgagcagctccggtgccacactcctgaggttggcaacgcttaccgtattcaccaggccgttgattctcttcctcagggtgtcctagctgagacgctggtactcggcggcagaggcagcgctgtcgttggcctccctcgtcgccatccgtgccgtcatgtggaagggcgggatgtagatccctttggccattcgctaaccggggatcatctccggcagaagtggtggtggtgggggcagcattggagttgtcggctaggaataggattcagctccttcctattaggggttcacccgcgagtaggggtgggcaaagaagaccgaaccgaaatgaccgagaccgagaccgaaaccgaactaaccgagaccgaaaaattcgaatcagcactttctacaaaccgaatttag

SEQ ID NO: 98318 - DNA, 208 bp, Oryza sativa
  Clone ID: PAT_MRT4530_96235C.1
tatggaggagtacattgacttggtcgcagttgccacgattaacaacgttcaggcttggagattcgtgcttgtccgcaagcacaaaaacgacagcggtagatttggcgtttactgtgccagttggggccaccgagaaagggtggttgcgttctgggtttccctggatgatgcgacccgtatccaagtcctcgtgccgtacgccggctaa

SEQ ID NO: 98319 - DNA, 5769 bp, Oryza sativa
  unsure (1)..(5769): unsure at all n locations
  Clone ID: PAT_MRT4530_96236C.1
atggcaagcggaagcggcgagggcaagggccgccgccaccaggacaatatcccaagcgtcgtcctgctcgagctctggggccacgtcgccgacgatgaccaccggcctgacgccaccaccgccacttccacgacgagcaccggcctgccaatctcggtgaccttgtgcgccgccaccccgccaagcctctcgcacctctccgtcgactgccctggtctggtggatctggatcccaatcccttagataagtttgtggcgcccacggtgatcagcacggatgccgacctcgtcctccttcgtgtccctgtcgatcgctttgccagatttgatcactgtttcagcgactacttcgtctacaaggtgcactctcactctgaaagcgcaaagctgcaccgtctcccgagcccacgtggccgtggctttgcagacgacaacattgccatactgagctgcggcaacgacgacgacgactcctacgctgtggccgctcttcaacccttgcatcatgtccacttcaggcttcacctgtgtcgctctacccccgatggaaagccagggagttggacctcccatcagttgacagtggaggagccgctgaggggaacggtgtgccccgtccctgactcagcactgaggaggatcttccatgccaccaccaaggtgattacgcttggaggtgctaaaggtacagttggctgggttgatctctggcgaggcatccttctctgtgatgtgctcgacgagattgagagccccaagctccgcgatttgccgctgcccttgccctctacgggcaactggcctttgttcctcaatcgctgcccctactattgtcgtgacatcgtcgtcaaccagagcagagacactatcaagtacgtcgagatggaattcaccatcttgaactcatctcaagatccacgctcctcgtatcacgaatgggtggccagccaagaatttcgaagttcgcatctagacatcttggtcgatgatggtagcttgaagatcaacacatggaacatgcctatcccgattttttcacaactatttgcatcgaatttggaagaaaaaggtataccactccccaccacaaggggagcagccaagatggtattcactcttaacatgagggcacgtgttctcgaagaactggagaaacttcatagcatgagtcaccttggttttatgcgttgcttcctttccactgggatctccaaacatcttaagcctacagttgggaagcaaaatggagttgggagctgtcacgcccagaaattcccgaatagaattccaagcagaatgtgcattaaaatccccgtccaggaccagccggggatgcaacggtacgagcctatagaacagctcccgcagcacctccagttccgcccgcagttcctgcagctccagttccagctcccgcgttcactctctccttcgctccagcatcagccgccaggggtccagccagtggcaccggagatggtctacaccaggactggtagccgcgcaacaggcgagggcagcaacggcgaagaacgcgctgatggtgtgcaccccaacagtgattctggcaatggtccgccaccacttcccgagaatccgacgcttgcccaagttatggcacatcagactcagatgatggcagccatgatgcagcagatgcagcagcagcaccagcagatgcaccagaggatgatgcagcacgccgaacagcagcatcaacagtttggtccccctccccctcagtccaagttgccagagtttctacgcgtcaggccacccaccttctccagcaccaccaaccctatggaggcgaacgactggctccatgcaatagagaagaagctgaatctcctgcagtgtaatgatcaggagaaggtcgcttttgccacacaccagcttcagggtcccgcgtcagcttggactgtgacagagtacctccatgagttcaatcgcctcgcgcgatatgcaccagaggatgtccgcaccgacgccgagaagcaggagaagttcatggcgggtctggatgacgagctgaccaaccaactgatatctggggactacgccgactttgagaggctggttgacaaggcaatccgtcaggaggaccaacgcaacaagatggacaggaagaggaaggccgctcagttcagggcacatcagggaagtcaccagaggccgcgcttcactcccggacagcagggtggacctaccaccatgatcgtccgccagcaccgcccgttcaaccctagcaacttccaccagggcaccagtggcagtcagaaccaccatggaggtcagcccaaccgcggtgcagctccacgcccatcagtggcaccggcacagtcaggccagcccgcgcaagccaagaaggagacgggagcaaaaccagggtcctgcttcaactgtgacgagcttggccacttcgctgacaaatgcccgaagcccaggcgtgccgggccaaggtttatccaggctcgtgtcaaccacgcatctgcagaggaggcacaagcagcaccggaggtcgtactgggtacgttccctgttaactcaatccctgcaacagtactttttgattctagtgcaacgcattctttcatctcaaagaaatttgtcgggatgcatgggttaataagagaggaacttagcacaccgatgcgggttcataccccagggaatagctccacttcggttcaattcagcccttctataacaatagaaattcaaaggtcaccatttctagccaacctcattcttctcgaatccaaagacctaaatgtcattcttgggatggattggctgaccaagtttaagggagtcatcgattgtgcgagtcgcacagtcaccttgaccaacgagaagggagaaaccgtgattgagacggaaatcccagtggacaccgtagagaagaacttgagaaaattggaagatatacccatagtctgcgagtatccagaagtgttccccgaagacctcactaccatgccacccaagagagagattgaattccggattgacttggcaccgggaactgctccaatctataagagaccgtacagaatggcggccaacgaattagcagaggtcaagaagcaagttgatgagcagctgcagaaagggtacatacgaccaagcacttcaccttggggcgctccggtcatttttgtggagaaaaaggataagacgaagaggatgtgcgtcgattatcgcgcacttaacgaggtcacaatcaagaataaatatcctttaccgcgaatcgacgatttatttgatcaactgaatggagctaaagtgttttctaagatagacctgcgatcaggctaccaccagttgagaatccgggaagaggatattccgaagacggccttcaccactcggtacgggctatatgagtgcacggttatgtccttcggacttaccaacgcacccgcattcttcatgaatctgatgaacaaagtgttcatggaatttctggacaagtttgttgtggtgttcatcgacgacatacttatctactcaaaatccgaggaagaacatgagcaacatctccgtctggtacttgaaaagttgaaggagcaccagctatacgccaagttcagcaagtgtgacttctggttgacggaagtcaaatttctgggccatgtcattacagctcagggtgtggcagttgatccatcgaacgtggagtcagttaccaaatggaccccacctaagaccgtgtcgcagattcgaagttttctaggactggcaggttattaccgccgattcatcgaaaatttctccagaatcgcccgacccatgactcagttgcttaagaaagatgagaagtttaaatggacagctgagtgcgataagagctttgaggagctcaagaagaaattagtatccgcaccggttttgatcctgcccgaccagatgaaagacttccaagtctattgcgatgcatcccgtcacggacttggatgtgtcctaatgcaagagggtagagtggttgcatatgcctcgcggcagttgcgtccacacgaaggaaattatccaactcatgacttggaattggcagcagtggttcatgctttgaagatctggaggcactatctgattggcaaccgctgcgaagtatatacggaccataagagtctgaaatacatcttcacccaaccggatctaaaccttcgacaacgaagatggttggaactaatcaaagactatgacatgagtattcactaccacccgggtaaagccaatgtggtggcagacgctttaagccggaaaagttactgcactgccctatgcatcgagggcatgtgtgaggaattgcggcaggagtttgaacatctcaacatgggaattgttgaacacgggttcgtagccgctctggaggcacggcccactctcgtggatcaagtcagagcagctcaagtaaatgattctgaaatagcagaactgaaaaagaacatgagagtcggaaaggctcgggatttccacgaagatgagcatggcaccatctggataggagaaagattgtgtgtacctgacgacaaagaactgaaggatctgatactcaccgaggctcatcagacccagtactccattcacccaggcagcaccaaaatgtaccaagacctcaaggaaaaattttggtgggtcagcatgaggagagaaatagctgaattcgtcgcactctgcgatgtttgccaacgagtgaaagcagagcaccaaagaccagcaggtttactccaacctcttcaaatcccggaatggaaatgggaggagattggaatggactttataacaggactgccccggacatcatcgggtcacgattcaatctgggtagtcgtggatcgactcaccaaggaagaattggggacccgtttaaacttcagcacggcctatcacccgcaaactgatggtcagaccgagcgagtcaatcaaatcttggaggatatgttgagagcttgcgctcttgattttggtggagcttgggacaaaagcttgccatatgcggaattctcgtacaacaacagctaccaggccagtctacagatggcaccgtttgaagctttatacggccgaaagtgccgcacacctctcttctgggatcagacaggcgaacgtcaactgttcggaacagaagtattagcggaagcagaagagaaagtcagaatcatcagggaaaggttgaggattgctcagtctcgacagaagagctatgcggataaccgtcgaagggagctcacttttgaggcaggagattacgtgtatcttcgtgtcactccgctccggggagtacatcgttttcagacgaaaggcaagttggcaccacgcttcgtgggaccatacaaaattttggaacgaaggggagaagttgcctatcagctagaacttccatccaacatgatcggcatccatgacgtgttccacgtgtcccaactaaagaagtgcttaagggtacctgaagaacaggctgattcggagcacattgatatccaggaggacctaacatacgtggagaagccggccgaggcccagccagccgcccgcctccctccctcccggggtcgccgacaggtggggcccacctgtcggacccgtctcccacctcccgcctctcccgctcgcgccgccgcgcccgtaacggccgtcacgcccacgcctccgctttttccgggcaacgtcggcaacgtccgggcgtgccccgcgctttccgngtccattcccctctttttcccgctggcgcccgcgcccgagatggccggnattnnaatttag

SEQ ID NO: 98320 - DNA, 5347 bp, Oryza sativa
  Clone ID: PAT_MRT4530_96237C.1
ttgtcttctctagatggccggtcacccacccaaccaccgcggagaaggcatgatcgactttgtggcagagttggcacgcatgacactggtggtgggctaccccaacgcgccggagtacacgactattccaccgctcagtggcgagcttcctcaccgtgtcagcttggaggtccatggctacgtggggacttgcctcgctaacatggcagttgaggcgtcaggaggcacagcagatcacgcctgtcaggaggcagcctacttgatgatggccagactgcgggagcgccacaactacatcttccatgacacggcgtaccgcttccacccccgtcgagccaacggtgatgatgtcagttccttccgtccgacagccggcgagaacgacaccacctttggtcacatgtgtgctgtgatgaggggactggataggatgcactcggacctgcacaaggcgaccaaggccttgaacgatgggaagctcatgaggatcgtcgctctgaaggacgagatagcgcgcctgaagagggagaacgctcagctaaagggtcttccagcgccaggaggagtccggatccgcactacgccccgcaagactatgacggcacccgtgcgcatccagcttgcgcccaggaacccgcctccagcagcagctcccgcagcacctccagttccgcccgcagttcctgcagctccagctccagctcccgcgtccgctctctccttcgctccagcatcagccgccagaggtccagccagtggcaccggaggttgcttgtttgggatggtctacaccaggactggcacccgcacgataggcgagggcagcaacggcgaagaacgtgctgatggtgtgcaccccagcagtgattccggcaatggtctgccaccacttcccgagaatccgacccttgcccaagttatggcacatcagactcagatgatggcagccatgatgcagcagatgcagcagcagcaccagcagatgcaccagaggatgatgcagcacgccgaacagcagcaccagcagtttggtccccctccccctcagtccaagttgcctgagttcctacgtgtcaggccacccaccttctccagcaccaccaaccctatggaggcaaatgactggctccatgcaatagagaagaagctgaatctcctgcagtgcaatgatcaggagaaggtcgcttttgccacacaccagcttcaagggcctgcgtcggcttggtgggacaatcacatggccacccgcccaccgggtactgaagtcacatgggcagagttctgccgtagcttcaggaaggcacaggtgccagatggggtcgtggcacaaaagaagagggaatttcgtgcactccatcagggcaacaggactgtgacggagtacctccatgagtttaatcgcctcgcacgatatgcaccagaggatgtccgcaccgacgccgagaagcaggaaaagttcatggcaggtctggatgacgagctgaccaaccaactgatatctggggactacgccgactttgagaggctagttgacaaggcaattcgtcaggaggaccaacgcaacaagatggacaggaagaggaaggccgcacagttcagggcacctcagggaagtcgccagaggccgcgcttcactcccgggcagcagggtggacctaccaccatgatcgtccgccagtaccgcccgttcaatcctagcaactttcctcagggcgccagtggcagtcagaaccaccatggaggtcagtccaaccgcggtgcagctccacgtccaccaatggcaccggcacagtcaggcccgcccgcgcaagccaagaaggagactggagcaaaaacagggtcctgcttcaactgtggcgagcttggccacttcgctgacaaatgcccgaagcccaggcgtgccgggccaaggtttatccaggctcgtgtcaaccacgcatctgcggaggaggcacaagcagcaccagaggttgtactgggtacgtttcctgttaactcaatccctgcaacagtactttttgattctggtgcaacgcattctttcatttcaaagaaattcgtggggaggtatgggttaaggaaagaagagcttagcacaccaatgagagttcataccccgggaaatagttcaacctcagtcagttttagcccttcagtgctaatagaaatccaaagatcaccatttctagccaacctcattcttcttgaatccaaagacctagacgtcattcttgggatggattggctgaccaagttcaagggagtcatcgattgtgcgaatcgcacagtcaccctgaccaacgagaagggagaaaccgtggcgtacaaatcactagtctcaccaaagcaaggggtctctttgaatcagattgaagcagaaatcccagtggacaccgtggagaagaacttgaggaaaatggaatatatacccatagtctgcgagtatccggaagtgttccccgaagacctcactaccatgccacccaagagagagattgaattccggattgacttggcaccgggaaccgccccaatttacaagagaccgtacaggatggcagccaacgaactagcagaggtcaagaagcaagttgatgagcagctgcagaaagggtacattcgaccaagtacttcaccttggggtgctccggtcatttttgtggagaaaaaggataagacgaagaggatgtgcgttgattatcgcgcactcaatgaggtcacaatcaagaacaaatatcccttgccgcggatcgacgatttatttgatcaactgaaaggagctaaagtgttttctaagatagacctgcgatcaggctaccaccagttgagaattcgggaagaggatattccgaagacggccttcaccactcggtacgggctatatgagtgcacggttatgtccttcggacctactaacgcacctgcattcttcatgaatctgatgaacaaagtgttcatggaatttctggacaagtttgttgtggtattcatcgacgacatacttatctactcaaaatccgaggaagaacatgagcaacatctccgtctggtactcgagaagttgaaggagcaccagctatacgccaagttcagcaagtgtgacttctggttgacggaagtcaaatttctgggccatgtcattacagcccagggtgtggcagttgatccgtcaaacgtagagtcagtcaccaagtggatcccaccgaagaccgtgtcgcagattcgaagttttctaggactggcaggttattaccgccgattcatcgaaaacttctccagaatcgcccgacccatgactcagttgcttaagaaagatgagaagtttaagtggacagctgagtgcgataagagttttgaggagctcaagaagaaattagtatccgcaccggttttgattttgcccgaccagatgaaagacttccaagtctattgcgatgcatcccgtcacggacttggatgtgtcctaatgcaagagggcagagtggttgcgtatgcctcacggcagttgcgtccacacgaagggaattatccaactcatgacctagaattggcagcagtggttcatgctttgaagatctggaggcactatctaattggcaaccgctgcgaagtatatacggaccataagagtctgaaatacatcttcacccaaccggacctaaatctccgacaacgaagatggttggaactaatcaaagactatgacatgagtattcactaccacccgggtaaagccaatgtggtggcagacgcattaagccggaaaagttactgcactgccctatgcatcgagggcatgtgtgaggaattgcggcaggagtttgagcatctcaacgtgggaattgttgaacacgggttcgtagccgctctggaggcacggcctacgctcgtggatcaagtcagagtagctcaagtaaatgattctgaaatagcagagctgaaaaagaatatgagagtcgggaaagcccgggatttccacgaagatgaacacggcacaatctggttgggagaaagattatgtgtacctgacgacaaggaactgaaggatctgatactcactgaggctcatcagacccagtactccattcatccaggcagcactaaaatgtatcaagacctcaaagaaaagttttggtgggtcagcatgaggagagaaatagctgaattcgtcgcactctgtgatgtttgccaacgagtgaaggcagagcaccaaagaccagcaggtttactccaacctcttcaaatcccggaatggaaatgggaggagattggaatttactttataacgggactgccccggacatcgtcgggtcacgattcgatctgggtagtcgtggatcgactcactaaggttgctcacttcataccagtacataccacatatacgggcaaaaggttggcggagctttacctttcgagaatcatgtgcctacatggagtacccaaaaagattgtatctgaccgagggagtcagttcacctcaaaattctggcagaagctgcaggaagaaatggggacccgtttaaatttcagcacggcctatcacccgcaaactgatggtcagaccgagcgagtcaatcaaatcttggaagatatgttgagagcttgcgctcttgattttggtggagcttgggacaaaagcttgccatatgcggaattctcgtacaacaacaactaccaggccagtctacagatggcaccgtttgaagctttatacggccggaagtgccgcacacctctcttctgggatcagacaggcgagcgtcaactgttcggaacagaggtattagcggaagcagaagagaaagtcaggatcatcagggaaaggttgagaattgcccagtctcgacagaagagctacgcggataaccgtcgaagggagctcacttttgaggtaggagattacgtgtatcttcgtgtcactccgctccggggagtacaccggtttcagacgaaaggcaagttggcaccacgcttcgtgggaccatacaaaatcttggaacgaaggggagaagttgcttatcagctagaacttccatccaacatgatcggcatccatgacgtgttccacgtgtcccaactaaagaagtgcttaagggtacctgaagaacaggctgattcggaacacattgatatccaggaggacctaacatatgtggagaagccggttcgtatacttgataccagcgaaaggagaaccagaaacaaggtcacccggttttgccgagttcagtggagtcatcattcggaagaggaagcaacctgggaaagggaagatgagttgaaagccgcccatccgcacctcttcaccagctcctccgaatctcggggccgagattccgtttaa

SEQ ID NO: 98321 - DNA, 742 bp, Oryza sativa
  Clone ID: PAT_MRT4530_96238C.1
ctactccgccgtcagcctctcgcccgccaacgccgatgctccgcaaccacgctcgcctgccaccgcagacgtcgccgctccgcctgcctccagtcgcacactgttgccgctccccatctgcgtcgtcgcgcaccccgcgtcctccgcccctctgctccgcccaagcccaaagccgccgcttgcccgccgcttgccaccgccacagccacgctcgcccactgacgccgccctccgcctgctgcagccgcgcaccgtcacccgctgcctctcgcactctgcgaccgcgcgtgtccgccgctttccatcgcctgcagccgccgacaccgcccctccgcctgctccggccgcacgccgccgctcgccctctacgatcgccgacgccgcccctgtcgcccccgcgccctgggaggcagcctccctccttgtgcccgctcgccgtccgatcggcttcattgaacggtaggatgatgagggtggagattttgcaaaaagaccctttacattgttagtaatttgttgtaggccttgattgttcttgctgccatcctcaagagcaatggatctagcgagtggatctgcctggaacttgttcgttcttgagtgcattctgggagcactgcatctagcaagtggatctttgcttgtatccatttttgctttgacgtcactctgctggtatttggtgaaaaaaaaagacaggtatactttcttccctttcccccacctctaatggtttgtgcct

SEQ ID NO: 98322 - DNA, 4269 bp, Oryza sativa
  Clone ID: PAT_MRT4530_96239C.1
atggtctacaccaggaatggcacccgcacaacaggcgagggcagcaacggcgaagagcgcactgatggtgtgcaccccaacagtgattccgacaatagtccgccaccacttcccgagaatccgacgctggcccaagtgatggcacatcagactcagatgatggcagccatgatgcaacagatgcagcagcagcaccaacagatgcaccagaggatgcaacagcacgccgaacagcatcaccagcagtttggtccccctccccctcaatccaaactgccagaatttctacgtgtcaggccacccactttctccagcaccaccaaccccatggaggcaaatgactgggtccatgccatagagaagaagctgaatctcctgcagtgcaatgatcaggagaaggtcgctttcgccacacaccagctccaaggtcccgcgtcagctcggtgggacaaccacatggccacacgtccgccaggcacggaagtcacttgggcaaagttctgtcgcagcttcaggaaggcgcagaagcaggagaaattcctagcaggtctggatgatgagctaaccaaccagttgatatctggagactacgccgactttgaaaggctggttgacaaggcaatccgtcaggaggatcagcgcaacaaaatggacaggaagagaaaggcggcacagtttcggtccagccaaggaaaccatcagcgaccgcgcttcactcccggacagcagggtggacctaccaccatgatcgtccgccagcaccgcccgttcaactcaagcaactttcaccagggcgccagtggtagtcagaaccaccatggaggtcagccccaccgcggtgtagctccacgcccactagtggcaccagcacagtcagctccgcccgcgcaagccaagaaggagaccagaacaaagccagggtcctgcttcaactgtggtgagcttggtcacttcgccgacaaatgcccaaagcctaggcgtgccgggccaaggttcgtccaggctcgtgtcaaccacgcgtctgcagaggaggcgcaagcagcaccagaggtcgtactgggtacgtttcctgttaactcaatccctgcaacagtactttttgattctggtgcaacgcattcgttcatttcaaagaagtttgtggggatgtatgggttaaggaaagaagagcttagcacaccaatgagggttcataccccggggaatagttcaacctcagtcagttttagcccttcagtgctaatagaaattcaaagattaccatttctagccaacctcattcttcttgaatccaaatacctagatgtcattcttgggatggattggctgactaagttcaagggagtcatcgattgtgcgaatcgcacagtcaccttgaccaacgagaagggagaaacggtagtgtacaaatcactagccccgccaaagcaaggggtctccttgaaccagatcgagatggaagtcccagtggtcaccgaggagaagaatttgaagaaattggaagacatacccatagtctccgagtatccagaagtgttccctgaagacctcactaccataccacccaagagggagattgaattccggattgacttggcaccgggaaccgctcccatttacaagagaccgtacagaatggcggccaacgaattagccgaggtcaagaagcaggttgatgagcagctgcagaaagggtacatccgaccaagtacttcaccttggggtgctccggtcatttttgtggagaaaaaggataagacgaagagaatgtgcgttgattatcgcgcactcaacgaggtcaccatcaagaacaaataccctttgccgcgaatcgatgatttgtttgatcaactgaaaggagctaaattgagaatccgggaagaggatattccgaagacggccttcaccactcggtacgggctatatgagtgcacggttatgtctttcggacttaccaacgcacccgcattcttcatgaatctgatgaacaaagtgttcatggaatttctggacaagtttgttgtggtgttcatcgacgacattcttatctattcaaagtccgaggaggaacatgaacaacatctccgtctagtactcgagaagttgaaggagcaccagctatacgccaagttcaacaagtgtgacttctggttgacggaagtaaaatttctgggtcatgtcattacagctcagggtgtggcagtcgacccatcgaacgtggagtcagttaccaaatggaccccacctaagaccgtgtcgcagattcggagttttcttggacttgcgggttattaccgccgattcatcgaaaatttctccagaatcgcccgacccatgactcagttgcttaagaaagatgagaagtttaaatggacagctgagtgcgataagagtttcgaggagctcaagaagaaattagtatccgcaccagttttgattctgcccgacccgacgaaagacttccaagtctattgtgatgcatcccgtcacggacttggatgtgtcctaatgcaagagggcagagtggttgcgtatgcctcgcggcagttgcgtccacacgaaggaaattatccaacgcatgacttggaattggcagcagtggttcatgctttgaagatctggaggcactatctgattggcaaccgctgcgaaatatatacggaccataagagtctgaaatacatcttcacccaaccggacctaaatctccggcaacgaagatggttggaactaatcaaagactatgacatgagtattcactaccacccgggtaaagccaatgtggtggcagacgctttaagccggaaaagttactgcactgccctatgcatcgagggcatgtgtgaggaattgcggcaggagtttgggcatctcaacgtgggaattgttgaacacaggttcgtagccgctctggaggcacggcctacgctcgtggatcaagttagagccgctcaagtaaatgatccggaaatagcagagctgaaaaagaacatgagagtcggaaaggctcgggatttccttgaggatgagcatggcacgatctggatggtagaaagattgtgtgtacctgacgacaaggaattgaaggatctgatactcaccgaggctcatcagacccagtactccattcacccaggcagcactaaaatgtatcaagacctcaaagaaaagttttggtgggtcagcatgaggagagaaatagctgaattcgtcgcactctgcgatgtttgccaacgagtgaaggcagagcaccaaagaccagcaggtggctcactttataccagtgcataccacctatacggaaagagattggcagaattgtacctcgcaaggatcatgtgtttgcatggggtacccaagaagatagtatccgaccgaggtagtcagttcacctcaaaattttggcagaagctacaggaagaattggggacccgtttaaatttcagcacggcctatcacccgcaaactgatggtcagaccgagcgagtcaatttaatcttggaagatatgttgagagcttgcgctcttgattttggtggagcttgggacaaaagcttgccatatgcggaattctcgtacaacaacagctaccaggccagtctacagatggcaccgtttgaagctttatacggtcggaagctttatacagccatatgcgctttattctgggatcagacaggcgaacgtcaactgttcggaacagaggtattagcggaagtagaagagaaagtcagaatcatcagggaaaggttgagaattgctcagtctcgacagaagagctacgcggataaccgtcgaagggagctcacttttgaggaaggagattacgtgtatcttcgtgtcactccgctccggggagtacaccatttccagacaaaaggcaagttggcaccacgcttcgtgggaccatacaaaattttggaacgaaggggagaagttgcttatcagctagaacttccatccaacatgatcggcatccatgacgtgttccatgtgtcccaattaaagaagtgcttaagggtacctgaagaacaggttgattcggagcacattgatatccaagaggacctaacctatgtggagaagccggttcgtatacttgataccagcgaaagaagaaccagaaataaggtcaccaggttttgccgagttcagtggaatcatcattcagaagaggaagcaacctgggaaagggaagatgagttgaaagccgcccatccgcacctcttcaccagctcctccgaatctcggggccgagattccgtttaa

SEQ ID NO: 98323 - DNA, 1152 bp, Oryza sativa
  Clone ID: PAT_MRT4530_9623C.1
atgaatagagtacccactagttggggttttgtttattctagagtgaacaagccgggagagaggagcgcgcggaccgggtccacgggagtggggcccacgcggcagcctctcggtccacggtggaccgggtgcacccggctcacaccggccggcgccgtgggtcccacgcgtcagccgcacccgagggcgcgggcggctgacggccgggccccacatggcagccgcggggcgcacccgaaggcggccacgccggcatagccgacgggaggcggcgcacccgcgccccgatggtcgccgccggtgaccaccggcgcggcggagcggcgcccgagagaggggagggaagggggaagcgaaacggcggtccacggctcaccccgggtcgacggtggcgacgggaacgacgaccggagcggaggaaggcggcggcgcggctcgggtcgacgaggacggcggcgttccggcggtcggcgggcgaaacggaggggtggacgaggtcggcgaggttgcggcgaacccgaagaaggcgacgccgaaacgggaggaggtccggggcgacgacggcggtggaccggagctcggcggcgacggcggagagagagagcgacgtcgcgagctcaaatccggcgaagaggaagggcggcgagaggcggaaccggacggaagaggcacggggagcgtttatatagtgttgggagggggagagaacggccggaggggaagaaaaccggcgcggcgatctcgggctccatcaatggcgccagcgaggtttgcgggagcggtttccaaccgaatccgagggagagagggagagaaaaatggggggaaagagagagggaatcacggggagtgatttccccctctttattgcgcgcggggacggcgggaggcggcgggattcgcggcggcggcggcgctagggcacgggcgaggcggcgggagcggcgggaggatagggatgacaggtgggccccacccgtcagcgagggtggcgggcgggcccgcccgtcagcggcgcgcgcgcggggagaggccgagtgggccgcggggaggaggagagagagggagggagatgggccgagccggcccaagagggggaagggggggggggaaaaaagactttttagagcttttctttttataaaacctttt

SEQ ID NO: 98324 - DNA, 220 bp, Oryza sativa
  Clone ID: PAT_MRT4530_96240C.1
atgctgtgtgtagagccattctcatgtgtacgcatgccaaactaggtggcaaatatcctattacctcaccttcgcatacacgatgttatgagggtgcatgcgccaacgacggactacgttacggaggtaacctaggggctgtcgtggcccgagatgtcgcaaaccgtgtgtgtcatacagaacatgactacagattgcgtcctatgcttcatcagctata

SEQ ID NO: 98325 - DNA, 4305 bp, Oryza sativa
  Clone ID: PAT_MRT4530_96241C.1
atagccggccacccacccaaccaccacggagaaggcatgattgactttgtggcagagttagcacgtatgacgctggtggtgggctaccccaacgcgccagagtacacaactgttccaccactcagtggcgagcttcctcaccgtgtccgcctagaggtccatggctatgtgggcacctgcctcgctaacatggtggttgaggcgtccggagacacagcagatcacgcttgtcaggaggcagcatacctgatgatggccaaactacgggagcgccacaactacatcttccacgacacggcgtaccgatttcaccctcgtcgagccagcggtgatgatgtcagtactttccgtccgacagccggcgataacgacaccacctttggtcacatgtgtgctgtgatgaggggattggataggatgcactcggatctgcacaaggcgtccaaggccttgaatgatgggaagctcatgaggatcgtcactctgaaggacaagatagcgcgcctgaagagggagaatgctcagttaaagggtcttcccgcgccaggaggagtccggatccgcactacgccccgcaagtcgacaacgacacccgtgtgcatccagcttgcgcccaggaacccacctccatcagcagctcccgcagcacctccagttccgcccacagctccagcagttcctgcagctccagcaccagctccagctctcgttcccgtgtcagctcctgcatccgctctctccttcgcgcctgcattagccgtcagggtccccgccagtggcaatggaggttggttgccagctactcccagtggcagtcgcgacctcagcagcagcagctccagtggctcagagccgggcagcggcgagacttatctgccaggctctaggagtcgctcagagggacctggtcttttcctccagatggtctacaccaggaatggtagccgcacaaccggcgagggcagcaacggcgaagagcgcgctgatggtgtgcatcccaacagtgattctggcaatggtccgccaccacttcctgagaatccgacgctagcccaagtgatggcacatcagacgcagatgatggcagccatgatgcagcagatgcagcaccagcaccagcagatgcaccaaaggatgctgcagcacgccgaacagcagcaccagcagtttggtccccctccctctcagtccaagttgccagagtttctacgcgttagaccacccactttctccagcaccaccaaccccatggaggcgaatgactggctccatgccatagagaagaagctaaatctcctgcagtgcaatgatcaggagaaggtcgctttcgccacacaccagcttcaaggtcctgcgtcagcttggtgggacaatcacatggccacccgcccgccaggcactgaagtcacttgggcggagttctgtcgtagcttcaggaaggcgtaggtgccagacggggtcgtggcacaaaagaagagggaattccaggcactccatcagggcaacaggacagtgaccgagtacctccatgagttccatcgcctcgcgcgatatgcaccggaggatgtccgcactgacgccgagaagcaggaaaagttcatggcaggtctggatgacgagctgaccaaccaactgatatctggggactacgcggattttgaaaggctggtggacaaggcaatccgtcaggaggatcagcaaaacaagatggacgggaagagaaaggcggcacagttccggtccaaccaaggaaaccatcagcgactgcgcttcgctcccgggcagcagggtggacctaccaccatgatcatctgccagtaccgcccgttcaactctagcaacttccaccagggcgccagtggcagtcaaaaccaccatggaggtcagcccaaccgcggtgcagctccacgcccaccagtggcaccggcacagtcaggcccgtccgcgcaagccaagaaggagactggaacaaaaccagggtcctgcttcaactgtggcgagcttggccacttcgctgacaaatgcccgaagcctaggcgtgccgggccaaggattgtccaggctcgtgtcaaccacgcatctgcggaggaggcacaagcagcaccagaggtcgtactgggtacatttcttgttagctcaatccctgcaacagtactttttgattccggtgcaacgcattctttcatttcaaagaaatttgtggggatgcatgggttaaggaaagaagagcttaatacaccaatgagggttcataccctgggaaatagttcaacctcggtcagttttagcccttcagtgctaatagaaatccaaagatcaccatttctagccaacctcattcttcttgaatccaaagacctagatgtcattcttgggatggattggctgaccaagttcaagggagtcattgattgtgcgaatcgcacagtcaccttgaccaacaagaagggagaaaccgtagtgtacaaatcactagtctcaccaaagcaacgggtctccttgaatcagattgaggcggaaatcccagtggtcaccgaggagaagaatccgaggaaattggaagagattcccatagtttgcgagtacccagaagtctttcccgaagacctcactaccatgccacccaagcgagagattgaattccgaattgatttggcaccgggaaccgcgccaatttacaagagaccgtacaggatggcggccaacgaactagcagaggtcaagaagcaggttgatgagcagctgcagaaagggtacattcgaccaagtactttaccttagggtgctccggtcatttttgtggagaagaaggataagacgaagaggaggcgttgattatcgcgcactcaacgaggtcacaatcaagaacaaatatcctttgccgcgaattgatgatttgtttgatcaactgaaaggagctaaagtgttttctaagatagacctgcgatcaggctaccaccagttgagaattcgggaagaggatattccaaagacggccttcaccactcggtacgggctgtatgagtgcacggtcatgtctttcggacttaccaacgcacccgcattcttcatgaatctgataaacaaagtgttcatggaatttctggacaagtttgttgtcgttttcatcgacgacatacttatctattcaaagtctgaagaagaacatgagcaacatctccgtctggtactcgaggagttgaaggagcaccagttatacgccaagttcagcaagtgtgacttttggttgtctgaagtcaaatttctgggtcacgtcattacagctcagggcgtggcagttgatccatcgaacgtggagtcagttaccaaatggaccccacctaagacctgtcgcagattcgaagttttcttgaacttgcaggttattaacgccgattcatcgaaaacttctccaggatcgctcgacccatgactcagttgcttaagaaagatgagaagtttaaatggacagctgagtgcgataagagttttgaggagctcaaaaagaaattagtatccgcaccagttttgattctgcccgaccagatgaaagacttccaagtctactgcgatgcatcccgccacggacttggatgtgtcctaatgcaagagggaagagtggttgcgtatgcctcgcggcagttgtgtccacacgaagggaattatccaactcatgacctagaattggcagcagtggttcatgctttgaagatctggaggcactatctgattggcaaccgctgtgaagtatatacggatcacaagagtctgaaatacatcttcacccaaccggacctaaatctccgacaacaaaaatggttggaattaatcaaagactatgatatgagcattcactaccaccaggggaaagccaatgtggtggcagacgcattaagcaggaagagttactacactgccctatgcatcgagggcatgtgtgaggaattgcggcaggagtttgagcatctcaacgtggcaattgttgaacacgggttcgtagccgttctggaggcacggcctacgctcgtggatcaagtcagagcagctcaagtaaatgatcctgaaatagcagagctgaaaaagaacatgagagtcggaaaagcccgggatttccatgaagatgaacacggcacaatctggttgggagaaagattgtgtgtacccgaagaacaagccaattcggagcacatcgatatccaagaagatctgacgtatgtggagaggccagttcgtatccttgagaccagcgaaaggaggactagaaacaaggtcaccaggttttgccgggttcagtggagccaccat

SEQ ID NO: 98326 - DNA, 686 bp, Oryza sativa
  Clone ID: PAT_MRT4530_96242C.1
ttttttttttttttttttttctggggggtaataataataatgaaataattgctgtgttgcacatgtaaacaaaaatattgggtagagagagagaatacagggagccaactttcaaagtgggggaaaagctgttaccatcccaataccctaaaactttgagaactacttgtcattcttctgtaaagctgttacgtataatgtagattctactaccattcaaaattatgccctacatctttctaaaagcaaagaatagagcaaacaaaaatgagagtatttacagaggggatctttgccgctgctgctgctgctttcttcagttctctattccagctgaggcaggacaaatgcatctcgaagacaacctgaagttgattcgcagctgccaatacgagtatccttgtaacgtatccaaaagaatcaacaacattagcgcggactactttctttgtgtagcttgctatggagtatagacatactactgtacagtagctcaccaaaggagatcactacagctttacatataatcttcaaataaaactagcaagcaatgcatgcagcacaatccaatatagcaaaacgccaagtctcaatgttggttgtctcatgagcaatctatctcctgagacccacattccatcaatcctatctgatataggtcgagtgaactttggaaccctcgtgcg

SEQ ID NO: 98327 - DNA, 3339 bp, Oryza sativa
  Clone ID: PAT_MRT4530_96243C.1
atgatcgtccgccagcaccgccctttcaactcgagcagcttccaccagggcgccagtggcagccagaaccaccagggaggtcagcccaactgcagcgcagctccgcgcccaccaacggcaccagcacagtcagctccatcagccgaagccaagaaggagactggaacaaagccagggtcctgcttcaattgtggcgagcatggccactttgctgacaaatgcccgaagcctaggcgtgctgggccaaggtttgtccaggctcatgtcaaccacgcgtccgccgaagaggcgcaaccagcaccagaggttgtactgggtacgtttcctattaactcagtccctgctacagtactttttgattctggcgcaacgcattctttcatttcaaagaagtttgtagggatacatgggttaagaaaagaagagcttagtacaccaatgagggttcataccccgggaaatagttcaaccttggtcagttatagcccttcagtgctcatagaaatacaccgatcacgatttctagccaacctcatccttcttgaatccaaagatctagatgtcatccttgggatggattggatgaccaagttcaagggagttattgattgtgcgaatcgcacagtcaccttgactaatgagaagggagaaaccgtggtgtacaagtcaccagtctcacggaagcaaggaatctccttaaatcagattgaggtggaaaaccctgtagccatcgaggagaagagttcgcggaaattggaagatatctccatagtctgcgagtatccggaagtgttccccgaagacctcactaccatgccacccaagagagagattgaattccggattgatttggcaccggggaccgctccaatttacaagagaccgtacaggatggtagccaacgagctagcagaggtcaagaagcaggttgatgagcaactgcagaaagggtacattcgaccaagtacttcaccttggggtgctccggtcatttttgtgcagaagaaggacaagacgaagagaatgtgtgtcgattatcgcgcactcaatgaggtcacaatcaagaacaaatatcctttaccgcggattgatgatctgttcgaacagctgaaaggagccaaggtgttttccaaaatagacctgcgatcaggctaccaccagttgaggattcgggaagaggatatctccaagacagccttcactactcggtttgggttgtatgagtgcacggttatgtcttttggacttaccaacgcacctgcgttcttcatgaacctgatgaacaaagtgttcatggaatttctggataagtttgttgtggtattcatcgatgacatacttatttattcaaagtctgaagaagaacatgagcaacatctccgtctggtactcgaagagttgaaggagcaacagttatatgccaagttcagcaagtgtgacttttggttgtcggaagacaaatttctgggtcacgtcattacagctcagggcatagcagttgatccagcaaatgtggagtcagttaccaaatggaccccacctaagaccgtgtcacagattcggagttttcttggacttgcgggttattaccgtcggttcattgaaattttctccaggatcgcccgacccatgactcagttgcttaagaaagatgagaaatttaaatggacggccgagtgtgacaagagttttgaggagctcaagaagaaattggtgtctgctccagttctgattctgcccgatcagacgaaagacttccaagtctactgcgatgcgtcccgccacgggcttggatgtgttctaatgcaagagggcagagtggttgcttttgcctcgcgcaaccgctgcgaagtatatacagatcacaagagtctgaaatatatcttcacccaaccagatttgaatctccgacaacgaagatggttggagctaatcaaagattatgacatgagcattcactaccatccgggtaaagccaatgtggtggcagatgcattaagcaggaagagctactgcaatgccctatgcaccgagggcatgtgtaaagaattgcagcaggagcttgaacgtctcaacatgggaatcgtagaacacgggttcgtagccgccctagaagcacggcctacgctcgtggatcaagtcagagcagctcaagtgaatgatcctgagatagctgaactaaaaaagaatatgagggtcagaaaagcccgggacatccttgaggatgaacatggcatgatctggatgggagaaagattgtgcgtgcccgatgataaagagctgaacgatctgatacttactgaggctcatcagactcaatattccattcatccgggtagtaccaagatgtatcaagatctcaaagaaaaattttggtgggccagcatgaaaagggagatagctgaattcgtcgcgctctgcgatgtttgtcagcgagttaaagcagaacatcagaggcccgcaggattgctacaacctcttcaaatcccggaatggaaatgggaagaaattggaatggatttcataacaggtctgcccaggacatcatctggtcacgattcaatctgggtagtcgtggaccgacttaccaaagttgctcatttcattccagtgcatactacttatacgggcaaaagttctcttacaacaacagctatcaggccagtctacatatggcgccgttcaaagcgttgtacggttggaagtgttaacagaagcattgtacggcctctcttctgggatcaaacgggcgaacgtcaactgttcggaacagaagtgttaacggaagcagaagagaaagtcagaaccgtcagagagaggctaagaattgcccagtctcgacagaagagctacgcagacaaccttcgaagggagctcacttttgaagcaggggattacgtgtaccttcgtgttactccgctccggggagtacaccgttttcaaacgaaaggcaagttggcaccacgcttcgtgggaccatacagaatcttggaacgaagaggagaagttgcttatcagctagaacttccatccaatatgatcggtatccatgacgtgttccacgtgtcccagttaaagaagtgtctgagggtacccgaagaacaagccgattcagagcacatcaatatccaagaagatctgacgtatgtagagaagccagttcgtattcttgagaccagtgaaaggagaaccagaaacaaggtcactaggttctgcagggttcagtggagccaccattcagatgaagaagcaaccttggaaagggaagatgagttgaaggccgcccatccgcacctcttcaccagctcctccgaatctcggggccgagattccgtttaa

SEQ ID NO: 98328 - DNA, 171 bp, Oryza sativa
  Clone ID: PAT_MRT4530_96244C.1
atggaggtaggtcagggccaggaacaaatcaattgcaaacatgcaaaggataacacatcagctttcaaggtgcacggaaataaaaagacaactaaggagcagtgtacaaaaactgcaacacccataccacgctccttggtttatgagagagatgcacagggaaccaagtag

SEQ ID NO: 98329 - DNA, 249 bp, Oryza sativa
  Clone ID: PAT_MRT4530_96245C.1
ggtttgtcccatcttatcttagccctcctccacgtccaactcaggatagaaaccaaaggaaacccgaaacatgacttcccaagcaaggaaaactcgaaacccgacgaaacagactcgggatcggactctgccggttagaccggctacacaccgccggtctgacagacctactggcggcggtctgaccgaccaacgcacggcggtcagaccggccatctcagaggaaaaccggcagacttccaaactttg

SEQ ID NO: 98330 - DNA, 6067 bp, Oryza sativa
  Clone ID: PAT_MRT4530_96246C.1
cactcctcggtttcgccggaacgccatcgccgcgaacctctacatccgcctcgccggagttgttcggccgcctgtccctcctcgccgtgcaccggtcgaccacacctccaccacctccggcatcgcagcggcaaggtcgtcctcggcatcgtttcccctccatccaaacccctccgcggtccatcatcgtcgtctccgatcgttctcgtcgtcgacgtcccgtcggtcgcccggctcgtcgtctcgcggcgccgcctccgtcgtcggcatcgtagcggcgtggtcctcgtcgtcctcgtccccgtgcagccgctgccggctgtcctcgtcgcctcctcgccggtcccggtcgtcgtcgtcgtcgtcgtcgtcatcctctcgtcgttcccggtcgtcgtggcgttcgtccctccgtcaagccgttctcgttcgtcgtcctcgcttcgtcaagatcgctgcagccccgtcctcgtgttcgtcctcggttccgcgtcgtcaagcctcgtgccggccgcgtctcgcccgtgtaccggtgtcggtagtcgttcacgcgcgcgggtggtgaccgtgtagtgtccgtgttagtgtgcccgctcggtagccgcgtggtttccacgtgtgcaacccgtgtggtgtctagtggagtccgtttgtcggccactcgcctcggttgacacacgggatccgcttccgtcgacccgtggaccgtctctgtgtactcggttttctttttatgtattgttattgcttctttataggcttgtagctttgcttgtgtgcttcgcgtagcttctgtcgttccggaggttcccgaagcgtggttcgcggtcgtcgccgaaggttcggaaggccgttctctctctcttcccctttcaaaacccctaaaacctgttttcggtggggtttgggtgcatgccagttgtgggaagtagcaccccggccactataaggattaagctcgggcctctgttgcaaagcactaccgtacttccacatgtctaatgggtaaggcttagtttgtggctcagtctagtcataaacaaaagtacacggattggagatggatgaagtcgggcgtcgatggacattctccagggcaaatgaaggctacacgggctgcggcccggcaattttcccggtcgcgacagacctgcacaaggcgaccaaggccttgaacgatgggaagctcatgaggatcgtcgctctgaaggacgaggtagcgcgcctgaagaaggagaatgctcagttgaagggccttccagcgccaggaggagtccggatccgcactacgccccgtaagaggacgactgcacctgtgcgcatccagcttgcgcccaggaacccacctccaccagcagctcccgcagcagctccagttccgcccgcagttcctgcagctccagctccagctcccgcgttcactctctccttcgctccagcatcagccgccagaggttcagccagtggtaccggaggttgcttgtttgggggtcagtcggcgatggtctacaccaggactggtagccgcgcaacaggcgagggcagcaacggcgaagaacgcgctgatggtgtgcaccccaacggtgattctggcaatggtccgccaccacttcccgagaatccgacgcttgcccaagttatggcacatcagactcagatgatggcagccatgatgcagcagatgcagcagcagcaccagcagatgcatcagaggatgatgcagcacgccgaacagcagcaccagcagtttggtccccctcccccccagtccaagttgcctgagtttctacgtgtcaggccacccaccttctccagcaccaccaaccctatggaggtaaatgactggctccatgcgatagagaagaagctgaatctcctgcagtgcaatgatcaggagaaggtcgctttcgccacacaccaacttcagggtcctgcgtcagcttggtgggacaaccacatggccacccgcccaccgggtactgaagtcacatgggcagagttctgccgtagcttcaggaaggcacaggtgccagacggggtcgtggcacaaaagaagagggaattccgggcgctccatcagggcaacaggactgtgacagagtacctccatgagttcaatcgcctcgcgcgatatgcaccagaggatgtccgcaccgacgccgagaagcaggagaagttcatggcgggtctggatgatgagctgaccaaccaactgatatctggggactacgccgactttgagaggctggttgacaaggcaatccgccaggaggatcagcgcaacaaaatggacaggaaaagaaaggcggcgcagttccggtccaaccaaggtagtcagcaccgaccgcgcttcactcccggacagcagggtggacctaccaccatgatcgtccgccagcaccgcccgttcaactccagcaacttccaccagggcactagtggcagtcagaaccaccagggaggccagcccaaccgcggtgcagctccacgcccaccaatggcaccggcacagtcagcccagcccgcgcaagccaagaaggagacgggagcaaaaccagggtcctgcttcaactgtggcgagcttggccacttcgctgacaaatgcccgaagcccaggcgtgccgggccaaggtttatccaggctcgtgtcaaccacgcgtctgcggaggaggcacaagcagcaccagaggtcgtactgggtacgttccctgttaactcaatccctgcaacagtactttttgattctggtgcaacgcattctttcatttcaaagaaattcgtgggaatgtatgggctaaggaaagaagagcttagcacaccaatgagggttcgtaccccgggaaatagttcaacctcagtcagttttagcccttcagtgctaatagaaatccaaagatcaccatttctagccaacctcattcttctcgaatccaaagacctagatgtcattcttgggatggattggctgaccaagtttaagggggtcatcgattgtgcgagtcgcacagtcaccttgaccaacgagaagggagaaaccgtagtgtacaaatcaccaggctcaccaaagcaaggagtctccttgaatcaaattgaaacggaaatcccagtggacaccgtggggaagaacttgagaaaattggaagatatacccatagtctgcgagtatccggaagtgttccccgaagacctcactaccatgccacccaagagggagattgaattccggattgacttggcaccgggaaccgctccaatttacaagagaccatacaggatggcggccaacgaattagcagaggtcaagaagcaagttgatgaacagctgcagaaagggtacatacgaccaagcacttcaccttggggcgctccggtcatttttgtggagaaaaaggataagacgaagaggatgtgcgtcgactatcgcgcacttaacgaggtcacaatcaagaataaatatcccttaccgcgaatcgacgatttatttgatcaactgaaaggagctaaagtgttctctaagatagacctgcgatcaggctaccaccagctgagaatccgggaagaggatattccgaagacggccttcaccactcggtacgggctatatgagtgcacggttatgtctttcggacttaccaatgcacccgcattcttcatgaatctgatgaacaaagtgttcatggaatttttggacaagtttgttgtggtgttcatcgacgacattcttatctattcaaagtccgaagaggaacatgaacaacacctccgtctggtactcgagaagttgaaggagcaccagctatacgccaagttcagcaagtgtgacttctggttgacggaagtcaaatttctgggccatgtcattacagcccagggtgtggcagttgatccatcgaacgtggagtcagttacaaaatggaccccaccaaagaccgtgtcgcagattcggagttttctaggactggcaggttattaccgccgattcatcgaaaatttctccagaatcgcccgacccatgactcagttgcttaagaaagatgagaagtttaaatggacagctgagtgcgataagagctttgaggagctcaaaaagaaattagtatccgcaccagtattgattctgcccgacccgacgaaagacttccaagtctattgtgatgcatcccgtcacggacttggatgtgtcctaatgcaagagggcagagtggttgcgtatgcctcgcggcagttgcgtccacacgaaggaaattatccaactcatgacttggaattggcagcagtggttcatgctttgaagatctggaggcattatctgattggaaaccgctgcgaagtatatacggaccataagagtctgaaatacatcttcacccaaccggatctaaaccttcgacaacgaagatggttggaactaatcaaagactatgacttgagtgttcactaccacccgggtaaagccaatgtggtggcagacgctttaagccggaaaagttactgcactgccctatgcatcgagggcatgtgtgaggaattgcggcaggaatttgaacatctcaacatgggaattgttgaacacgggtttgtagccgctttggaggcacggcctacgctcgtggatcaagtcagagccgctcaagtaaatgatccggaaatagcagaactgaaaaagaacatgagagtcggaaaggctcgggatttccatgaagatgagcatggcacaatctggatgggagaaagattgtgtgtacctgacgacaaagaactgaaggatctgatactcaccgaggctcatcagacccagtactccattcacccaggcagcaccaaaatgtatcaagacctcaaggaaaaattttggtgggtcagcatgaggagagaaatagctgaattcgtcgcactctgcgatgtttgccaacgagtgaaagcagagcaccaaagaccagcaggtttactccaacctcttcaaatcccggaatggaaatgggaggagattggaatggactttataacaggactgccccggacatcatcgggacatgattcaatctgggtagtcgtggatcgacttaccaaggtggctcactttataccagtacataccacctatacgggaaagagattggcagaattgtacctcgcaaggatcatgtgtttgcatggggtacccaagaagatagtatccgaccgaggtagtcagttcacctcaaagttctggcagaagctgcaggaagaaatggggacccgtttaaatttcagcacggcctatcacccgcaaactgatggtcagacagagcgagtcaatcaaatcttggaagatatgttgagagcttgcgctcttgattttggtggagcttgggacaaaagcttaccatatgcggaattctcgtataacaacagctaccaggccagtctacagatggcaccgtttgaagctctatacggccggaagtgccgcacacctctcttctgggatcagacaggcgaacgtcagctgttcggaacagaagtattagcggaagcagaagagaaagtcagaatcatcagggagagattgaggattgctcagtctcgacagaagagctacgcggataaccgtcgaagggagctaacttttgaggccggagattacgtgtatcttcgtgtcaccccgctccggggagtacaccgctttcagacaaaaggcaagttggcaccacgcttcgtgggaccgtacaaaattttggaacgaaggggagaagttgcctatcagctagaacttccatccactatgatcggcatccatgacgtgttccatgtgtcccaattaaagaagtgtttaagggtacctgaagaacaggctaattcggaacacattgatatccaagaggacctaacatatgtggagaagccggttcgcatacttgacactagcgaaaggagaaccagaaacaaggtcaccaggttttgccgtgttcagtggagtcatcattcagaagaggaagcaacctgggaaagggaagatgagttgaaggccgcccatccgtacctcttcaccagctccaccgaatctcggggccgagattccgtttaa

SEQ ID NO: 98331 - DNA, 672 bp, Oryza sativa
  Clone ID: PAT_MRT4530_96247C.1
tcaggatgccacgtcagcgaccagcctctcccttcctctcctttcctcccttctctctctcccactcttctctctggattgggcaggccgcccggcggtggggaggtcgttgccggggcgaggaggtccgacggccggccgcgacgtggcggcggcggccgggacgaggacgttcttcttcacatggccgtacaagaaacgacgtcccggccagccggcggggaatccgtcgaagagcgcccacgtggaggcgagctcgacgcgcgcgaggtagagctcgacgagcccatcgcggacggcgaggcggtggtcgaggccgagcttggccgcgtgtgcgtgcacggccggcgcggcctcgccgtggtcggcgatcaagcccttgataagggccctgaggcaaagcggcggcagtggcgctccggcgagctcctcgccggtgcccttctgcgagctgcggtagctgtactagattaagcgctggcacgccgcggtcgcggctgccgccgtggacgcggcacaagacgctggtgttgcttgccggccgccggcgctggcacgccgttgtggacgcggcacaagacgctggtgttgctcctccgtgctcccgccgcccgccgcccttcccttctgggtcgccgccccctcatcgccggccggccgtcggacctccat

SEQ ID NO: 98332 - DNA, 5334 bp, Oryza sativa
  Clone ID: PAT_MRT4530_96248C.1
atggccggtcacccacccaaccaccgcggagaaggcatgatcgactttgtggcagagctggcacgcatgacactggtagtgggctaccccaacgcgccggagtacacgaccattccgccgctcagtggcgagcttcctcaccgtgtccgcttggaggtccatggctacgtggggacttgcctcgctaacatggcggtcgaggcatctggaggcacagcagatcacgcctgtcaggaggcagcctacttgatgatggccagaatacgggagcgccacgactacatcttccacgacacggcgtaccgctaccacccccgtcgagcccatggtgatggcgtcagctccttccgtccgacagctggcgagaacgacaccacctttggtcacatgtgtgctgtgatgaggggattggaccggatgcactcggacctgcacaaggcgaccaaggccttgaacgatgggaagctcatgaggatcgtcgctctgaaggacgagatagcgcgcctgaagaaggagaacgctcagctaaagggtcttccagcgccaggaggagtccggatccgcaccacgccccgcaagacgacgactgcacctgtgcgcatccagcttgcgcccaggaacccacctccaccagcagctcccgcagcaccttcagttccgcccgcagttcctgcagctccagctccagctcccgcgttcactctctccttcgctccagcatcagccgccagaggttcagccagtggtaccggaggctgcttgtttgggatggtctacaccaggaatggtagccgtgcaacaggcgagggcagcaacggcgaagaacgcgctgatggtgtgcaccccaacagtgattctggcaatggtccgccaccacttcccgagaatccgacccttgcccaagttatggcacatcagactcagatgatggcagccatgatgcagcagatgcagcagcagcaccagcagatgcaccaaaggatgatgcagcacgccgagcagcagcaccagcagtttggtccccctccccctcagtccaagttgccagagtttctacgcgtcaggccacccaccttctccagcaccaccaaccctatggaggcgaacgactggctccatgccatagagaagaagctgaacctcctgcagtgcaatgatcaggagaaggtcgctttcgccacacaccagcttcagggtcctgcgtcagcttggtgggacaaccacatggccacccgcccaccgggtactgaagtcacatgggcagagttctgccgtagcttcaggaaggcacaggtgccagacggggtcgtggcacaaaagaagagggaattccgggcgctccatcagggcaacaggactgtgacagagtacctccatgagttcaatcgcctcgcgcgatatgcaccagaggatgtccgcaccgacgccgagaagcaggagaagttcatggcgggtctggatgacgagctgaccaaccaactgatatctggggactacgccgactttgagaggctggttgacaaggcaatccgtcaggaggaccaacgcaacaagatggacaggaagaggaaggccgctcagttcagggcacatcagggaagtcaccagaggccgcgcttcactcccggacagcagggtggacctaccaccatgatcgtccgtcagcaccgcccgttcaaccctagcaacttccaccagggcactagtggcagtcagaaccaccatggaagtcagcccaaccgcggtgcagctccacgcccatcagtggcaccggcacagtcaggccagcccgcacaagccaagaaggagacgggagcaaaaccagggtcctgcttcaactgtggcgagcttggccacttcgctgacaaatgcccgaagcccaggcgtgccggaccaaggtttatccaggctcgtgtcaaccacgcatctgcggaggaggcacaagcagcaccagaggtcgtactgggtacgtttcctgttaactcaatccctgcaacagtactttttgattctggtgcaacgcattctttcatctcaaagaaatttgtcgggatgcatgggttaataagagaggaacttagcacaccgatgcgggttcataccccagggaatagctccacttcggttcaattcagcccttctataacaatagaaattcaaagatcaccatttctagccaacctcattcttctcgaatccaaagacctagatgtcattcttgggatggattggctgaccaagtttaagggagtcatcgattgtgcgagtcgcacagtcaccttgaccaacgagaagggagaaacagtggtgtacaaatctctagtctcgccaaagaaaggggtctcgttgaatcagattgagacggaaatcccagtggacaccgtagagaagaacttgagaaaattggaagatatacccatagtctgcgagtatccagaagtgttccccgaagacctcactaccatgccacccaagagagagattgaattccggattgacttggcaccgggaactgctccaatctataagagaccgtacagaatggcggccaacgaattagccgaggtcaagaagcaggttgatgagcagctgcagaaagggtacattcgaccaagcacttcaccttggggcgctccggtcatttttgtggagaaaaaggataagacgaagaggatgtgcgttgattatcgcgcactcaacgaggtcacaatcaagaataaatatcctttgccgcgaatcgacgatttatttgatcaactgaaaggagctaaagtattttctaagatagacctgcgatcaggctaccaccagctgagaatccgggaagaggatattccgaagacggccttcaccactcggtacgggctatatgagtgcacggttatgtctttcggacttaccaacgcacccgcattcttcatgaatctgatgaacaaagtgttcatggaatttctggacaagtttgttgtggtattcatcgacgacatacttatctactcaaaatccaaggaagaacatgagcaacatctccgtctggtactcgaaaagttgaaggagcaccagctatacgccaagttcagcaagtgtgacttctggttgacggaagtaaaatttctgggtcatgtcattacagctcagggtgtggcagtcgacccatcgaacgtggagtcagttaccaaatggaccccacctaagaccgtgtcgcagattcggagttttctaggactggcaggttattaccgccgattcatcgaaaatttctccaggatcgcccgacccatgactcagttgcttaagaaagatgagaagtttaaatggacagctgagtgcgataagagtttcgaggagctcaagaagaaattagtatccgcaccagttttgattctgcccgacccgacgaaagacttccaagtctattgtgatgcatcccgtcacggacttggatgtgtcctaatgcaagagggcagagtggttgcgtatgcctcgcggcagttgcgtccacacgaaggaaattatccaactcatgacttggaattggcagcagtggttcatgctttgaagatctggaggcactatctgattggcaaccgctgcgaagtatatacggaccataagagtctgaaatacatcttcacccaaccggatctaaaccttcggcaacgaagatggttggaactaatcaaagactacgacatgagtattcactaccacccgggtaaagccaatgtggtggcagacgctttaagccggaaaagttactgcactgccctatgcatcgagggcatgtgtgaggaattgcggcaggagtttgaacatctcaacatgggaattgttgaacacgggtttgtagccgctctggaggcacggcccactctcgtggatcaagtcagagcagctcaagtaaatgattctgagatagcagagctgaaaaagaatatgagagtcggaaaagcccgggatttccacgaagatgagcatggcacaatctggatgggagaaagattgtgtgtacctgacgacaaggaattgaaggatctgatactcaccgaggctcatcagacccagtactccattcatccaggcagcactaaaatgtatcaagacctcaaagaaaagttttggtgggtcagcatgaggagagaaatagctgaattcgtcgcactctgcgatgtttgccaacgagtgaaggcagagcaccaaagaccagcaggtttactccaacctcttcaaatcccggaatggaaatgggaggagattggaatggactttataacaggactgccccggacatcatcgggtcacgattcaatctgggtagtcgtggatcgactcactaaggttgctcacttcataccagtgcataccacatatacgggcaaaaggttggcggagctttacctttcgagaatcatgtgcctacatggagtacccaaaaagattgtatctgaccgagggagtcagttcacctcaaaattctggcagaagctgcaggaagaaatggggacccgtttaaatttcagcacggcctatcacccgcaaactgatggtcagaccgagcgagtcaatcaaatcttggaggatatgttgagagcttgcgctcttgattttggtggagcttgggacaaaagcttgccatatgcggaattctcgtacaacaacagctaccaggccagtctacagatggcaccgtttgaagctttatacggccggaagtgccgcacgccgctcttctgggatcagacaggcgaacgtcaactgttcggaacaaaagtattagcggaagcagaagagaaagtcagaatcatcagggaaaggttgaggattgctcagtctcgacagaagagctacgcggataaccgtcgaagggagctcacttttgaggcaggagattacgtgtatcttcgtgtcactccgctccggggagttcaccgttttcagacgaaaggcaagttggcaccacgcttcgtgggaccatacaaaattttggaacgaaggggagaagttgcttatcagttagaacttccatccaatatgatcggcatccatgacgtgttccacgtgtcccaattaaagaagtgtttaagggtacctgaagaacaggctgattcggaacacattgatatccaggaggacctaacatatgtggagaagccggttcgcatacttgataccagcgaaaggaggaccagaaataaggtcactaggttttgccgagttcagtggagtcatcattcagaagaggaagcaacctgggaaagggaagatgagttgaaagccgcccatccgcacctcttcaccagctcctccgaatctcggggccgagattccgtttaa

SEQ ID NO: 98333 - DNA, 324 bp, Oryza sativa
  Clone ID: PAT_MRT4530_96249C.1
atggatctgctccaccacaagcccaaccggagatacaactttaggtcctgggcctacacaactcaaaagactagtctcatgggtgaggaccgccaaccttttaagtcgtgctcccccatcatcaattaccgatgtgggactaaacccaacaatctcccccgtcacacatcgggcccaacaatctcccccgtcacatcaacccatgtgaccccgaagacttgttacctaggcctcgggcctaacaatctcccccgttatgtcaacccatatgacccatggaaattgttccgggttccaaacctgggctctgatactacttgttag

SEQ ID NO: 98334 - DNA, 894 bp, Oryza sativa
  Clone ID: PAT_MRT4530_9624C.1
gcacgagggcctattctattagactgtcatgcatttccttttaggtttaggtttatatttgaaatggattagataattaatcctagctttctgttgaattctcttaaactgttggttgcctattctaaccatcagagattttgctatctgagaataggtgagctagaaacatggtactttatgctgatcctcctcccccaataaaaccccctgaaattaaaatcaaagaactcccggctgcggctactcggcacgccgcaatgatggagcaaaagacaagactgcacgccattgagcgccacaggtcgtgtgaagtgagtcaagcaatcttatctgaggtagaaaatcgtcatcaacatcaaacccttgagcccatcaaaagcccaatatctgggtgttctccttcagtagaatcaactacagacaccaacacagtacacaggcatacggttgcagatgctgcttgggaggccctaaagaaatcaatagttcacttcagaggccagccaattggaactgttgctgcaatagacaagtctcagggagcactcaactatgaccaggttttcatgagggattttgttcctagtgcattggctttcttgatgaaaggagaaccaacaatagtgaagaatttcctgttagaaactgctcgccttcagttaagagagaagatggttgacctctttaagcttggtcagggtgtgatgccagctagtttcaaggtgcaccactgcaactctaagcacaaaactgaaagcctgcttgctgattttggtgaaactgccatcggaagagttgctcctgtggactctggcttatggtggattattcttcttcatgcttataccatatggacaagggacaattctctggctgaaagtcctgaatgcc

SEQ ID NO: 98335 - DNA, 819 bp, Oryza sativa
  Clone ID: PAT_MRT4530_96250C.1
ttttttttttttttttgtttttttttggcgctttttttttttttttttagagaaaattaacacttagcataaaacatcatatctcacagggagtatggtcattgcatgttttgtttattattcacaagtctacaagcacagcaaagatattattccaacggcagctacagttgcattgcaaggcaaattcagatgctgagatagtcacagaaatatagcatttctttctcatcatgcagaccacatttctctctcagacatcaaacatgaggctgaacttggtggcgagaggaatggatataatggcagcacccaacgcagcaccaaatatacggtgcgagatagagaatgtagcactcagctgtggcttcttcagaggaaggtggggtgacagggggcggttagcaacaggagccgacagaggatggcttgtgtgcaggggtcggcatccagatgggagcatctttggccgcacagctcctaggggacgagatgtgtaccccctagcttgctcaagggttgaggagcgtctgaggctgtcgatgctgctgaaagatgagcctgagctaccaagggcaccacggagagcaaatggagcatctctgaagggagcaaatcgggagttgctgtgatacttctccattcctgctacgggtggatgaggagagcgccggcgaggaagagctcctggtttgtggcagggaggcttgatccggcggtggtgcgtggcgggggtagccggccgccgggcaggtgggtcgccgccggaattcgcgtgacggcgagaggtgaatttgggattgaccccggccgggccgg

SEQ ID NO: 98336 - DNA, 333 bp, Oryza sativa
  Clone ID: PAT_MRT4530_96251C.1
atggcgtcgtgtctagtggcgtcggccgccgcatgtcgcgccgcccgagccgcggtggcgcgccatgacgcggcggccgcatctcgcgccgcccgcttagccgaggcggccgcatgccgcgccgcccgtttagctgcggcggctgacgtctccgaccgcctctccatccgctacagcagcgagcccccagacgaagctgtatcgtacaagttgaagcgtgaccatgctgagatggctcgccgcttcgagactttcaagtccaagcatgctgactttggtgatcacaggaagaagaaaaggctccagtggtcaggatttcaccttccaggatga

SEQ ID NO: 98337 - DNA, 507 bp, Oryza sativa
  Clone ID: PAT_MRT4530_96252C.1
atgcctaggcttatttttgtgtatgatttggattttagagaggccctggaaatgtgtgaagtggaatggagaagtatcacagcaactcccgatttgctcccttcagagatgctccatttgctctccgtgttcatttcacacaaccaggaattcctcacatttgttgccaccatactttcaggtgcccttggtagctcaggctcatctttcagcagcatcgacagcctcagacgctcctcaacccttgagcaagctagggggtacacatctcgtcccctaggagctgtgcggccaaagatgctcccatctggatgccgacccctgcacacaagccatcctctgtcggctcctgttgctaaccgccccctgtcaccccaccttcctctgaagaagccacagctgagtgctacattctctatctcgcaccgtatatttggtgctgcgttgggtgctgccattatatccattcctctcgccaccaagttcagcctcatgtttgatgtctga

SEQ ID NO: 98338 - DNA, 1326 bp, Oryza sativa
  Clone ID: PAT_MRT4530_96253C.1
atggcgcacgacggcgccgccgccgccgctacgctcctcgcatcgtccggcgacaacgacgacaagccccgacgccgccgcaacatgtacgccttcggctgcgccaccctcgcctccatgaccaccatcctcatgggctacaatctcgcgctgatgagcggcgggcagctgttcgtccgggaggacatggcgctgagagacgccgagatcgaggtgctgacgggttcgatgaacgtgttcatgctcgtgtctatcctcgccgccggctgggcggctgatgttctcggccgccgcggcacgctcgtgctggcgaacgcgttcctcatggccggcgcactcgccatgtcgctcggcgccacctacgccgcactcatggcggcgcgcttcgtcaccagcgtcggcgtcgggttctccctcgtcgtcgcgcccgtttacaacgccgagatttcgccggcgtccgcccgcggcgtcgtgtccacgctgttcgagatgttcgtcaacgttgggatcctgctcggctactcgccgcgctggctcgccatgcgcggtcgccacgccgacgcgcgcgcggtgctcgtgcgcacctccgactccgtcgaggaggccgagctccgcctcgaggagatcaagcacgccgccgaggcgccaccgcaggaggatggcggcggcgtgtggcgggagctgctcttgcggccgacggcgatggtccgccggatcctcacgtgcgtggtcggcctacagttcttccagcaagcgtcgggcgtcaacgtggtcgtgctctacagcccggtggtgttcaagaaggccggcatggcgtcgaacacctccgtcctgggcgccaccgtcgccgtcggggtcgccaagacgtgctccatcctcgtcgccacgctcttctccgaccgcctcggctgccgcccgctcctgctggccagcacgggcggcatggccgtcaccctgacctcgctcgccctcacgctccgcgtcgcgccgccgtccgcggcgagcgccgcggcgtgcgtggcgtcagtggtggcgttcgtcgcggcgttctcggcggggctcgggccgatgacggcggcgtacaccgcggaggtgttgccgctgcggctgcgcgcgcagggcgcgagcctcggcatcgtcgtgaaccggctgacgtgcggcgtgatgagcatgacgttcatctcggtcgccggcgggatcaccatggtcgggttcttcttcctctacgccggcgtggcggcggcggcgtgcgtgttcgtgcacgcgcggctgccggagacgcgagggcgaagcttggaggacatggacgcgctgttccacaagtga

SEQ ID NO: 98339 - DNA, 555 bp, Oryza sativa
  unsure (1)..(555): unsure at all n locations
  Clone ID: PAT_MRT4530_96254C.1
gatgggtgacagcataaaaggcaaaggaaccatcaggggtgtctctgcagtcaatgcattttatgaactcctgagtcaggatagcttaagcgtaatgcatcctgaagccaacagatctgttgcaccggttgagatgtgcccaatcctgaaggcactgtacaaaattttgatcaagagggaacttccctncngattcgatccttcaggccataagagatgaaacaatgtatgatccacgtgaaagaattgagatggcgcagggccattcactttaccggccatctcttcttggtcaacctaaaggagatgccaaagcttaggcagttcttcctttttttttggtgctagatatcctgtaagctctgtgtgctattatgcttgctgctgctgctgttgttgtaacactagtgagttccagcaagggaccaagatctcagttgattgcttcaagacttgttgagcttgttatgtagtttgatttgttaaacgcctgaaatgtgtacatagacgttgttttgtgtgatccaataataaaatatgcaaaaggtaatgttc

SEQ ID NO: 98340 - DNA, 225 bp, Oryza sativa
  Clone ID: PAT_MRT4530_96255C.1
atggcgttcgacgtggtggacgcggaagggctgccggagactagccccggcgagggagcggagcgattcgagcgccacgagagcttcgccgagtggcggcggcgcatggaggacggcgatgccaaccgttgcccccggttccgccgcaccgcgatgggagcttgctaccagccgccgccgctgttccactcgtcctcccactgccgcgagccgccgccgccctag

SEQ ID NO: 98341 - DNA, 263 bp, Oryza sativa
  Clone ID: PAT_MRT4530_96256C.1
acggcccccatgacgtcagcgggaacgtcacctccggcggcggttggggggttcaccggttcgggcgcgcttgctcgccggcgaacgacggcgcgacaacgcggacggagggcaccaggaccgacggcaaaggggcggacaaggacggcggcgacttggcgaccacgatggcgacctccccgagcgatgacgacgaccggaacgacggcgaagcacggctggagcgacggcgacaactgcggctcgaggttacacggcgctag

SEQ ID NO: 98342 - DNA, 189 bp, Oryza sativa
  Clone ID: PAT_MRT4530_96257C.1
atgtcggagcagagcatggagtactccacggagctcggcaagcgtggatgccacgacggacctcgttacattctcgagcgcacggacaggaagcacgtgtggcttatccttgctgagtacgagagcaggagtaagggaggagcagcggccacgaacatcacgatgtcagagaaagggattccgacgtga

SEQ ID NO: 98343 - DNA, 159 bp, Oryza sativa
  Clone ID: PAT_MRT4530_96258C.1
atggcggcaaaagccggcaacacggcgacggcaaagccccacgtcttcatctcacgtcaaacggctggtatccacggcggcgctctcaatggccggcgcattcccggcgtcgtctgtctgggtcaagactcgctacgaaacaagcgcccgggaatgtaa

SEQ ID NO: 98344 - DNA, 662 bp, Oryza sativa
  Clone ID: PAT_MRT4530_96259C.1
aatgacaaggtactccacatataattcagggaataaaacagcaaaaggaaggtttcgaatgaaatgaatgtgcattacagcatacaattttctgttcaatacaacaatactgaaacaggattacaaagacttcacggaggtacatttgattcacaaagcaataaaatccccaacattagagtctagttcatcgtccaattactaaagaactaattcaattattcccaaagaaccagatggcaggctggtgcattgaggaaccattttattcaagcttcggacaaaaataaatagcaaacttcaacagaacgcgctggtaaagcactgaggggcaaacatttaacagcagctgaagcactggggaatcgaaaccccaaagggaacaaatcctggccgctcaggtactaatcaccaacaacagatccaggaaacttcaagctacataccaaaggctctcaagcaaactataacacaccgggatgaactgatgcctctttctgagttttgcacctgttgcaaaaggctcgagatgcatagttgtgattgttgcagttgctgcacatccagtctccttcgcgccattttgctccttttccaataagaccaggcattgctgagacctgcccagagggtaacgctattgagtttccattgtcaaactt

SEQ ID NO: 98345 - DNA, 965 bp, Oryza sativa
  Clone ID: PAT_MRT4530_9625C.1
atgtctcccctcgcccttcggcttttctttgcgaaacagtttttcaaaattctcctccctgtccctccaattcttatagttgttaaaccgtggaggataaactgtcagcttcgtgtctgttcggaagtcaagtcaagcatcaagcttcgtgcagcaaagagcgagaaggggtatggtttgcatcattggtggggatgcgaccatactagtcagagtcagtggatcagttcaagacaacaagctaccagctgagtcagagcacctcgctctagttagccaagattggaagatggatatgccagacattgatatagcaaccgcagagtccgatgcaacagatgcaacaacagtgtctccaacaacatgtacaagcctatatgcaagctgggatcaggatcagagcgaaagtcagtttgtttccaagagcaagcacctgaaacctcagacagtacgccaccaagtcttcagcagaccagcacagctaagtcaccaccaatcccagaggcaacaaatgctacctacggtggttatggttttcaagagcggtttttgcaaagtgtccaactatccatggaagatgtacgacagggcacctctcagagggttgttccacattgaaggttcaaccagtgccgcaatcagggtagcacttgaagaagcaagttgcaaggtatcagaagaattaagccgatccccgggcaaccgattgaattctaaggttaccaaaattgccaacctcaacagttcagtccaagataagtaagtttcaggagcatccgcagttctggcctgggtcagttcaagcagaaccagtcggtccagttttggcaaagcaaaggagcagaaaggttgaatccagccagttcaatcgtgcagatcagtcagaccgcccaccagcaccagctttctttctagccatcccagaatctcgggacaagattcctgtaaggggggtagatttgtaa

SEQ ID NO: 98346 - DNA, 269 bp, Oryza sativa
  unsure (1)..(269): unsure at all n locations
  Clone ID: PAT_MRT4530_96260C.1
tctntgaagaagaatatgactactgctaaaattaaagaaactgttacggaggctaatgtattggaggtctaccctatgtactatggtgcacccattaccattaccacccttgccggcatcttttcatagagttttaacaagctaactgttcggaagttaaaaataagctcatttaattttaaaacataaacaagcataatcttatcaaaaaaaacgattctctctttaaattttccacccctaccccccccgggcttccaatttccttc

SEQ ID NO: 98347 - DNA, 860 bp, Oryza sativa
  Clone ID: PAT_MRT4530_96261C.1
atgacgtcaccgacggcggcggcggctcggcggagcggacggctcgggcggcgcacgctcaccggcgaacggcggcgctacggcacgaacggaggacaccaacgggaagcggacggcacggcgaacacaccgacgaccaaaacgacagcggagaagcaacggacggcgacggcgacgagaaggaagcggcggctaccttcgggttgtcgacggcgacgaagctccggcgggttccgacggctgcgaaggggcggacgaggacggcggcgacttggcgatgacgacggcggtcttcccgagcggcggcgacagctggagcgacggcggagcacggctgaagcggcggcggcgacggcgaagctagggcacacggcgctagagctcttccgacgacgagaggcgaaggcgagggctgcgacgggtagaggagacaccggggatccttttaaaggggctcggaggcgacggcggaggcccacggcgacggcaacggcgaaggaaaccttcggcttggagagagggaaaaccgatccgaatcgaactcgtctccgacgctttccaaagcgatttaaccaaagattccaaaggagaaaaggtagaggagatcccggagatcatttcccctctattgattcggccggagaaggaaaggaatggccggattggaaaggaaacggcggcggcggctcggcggcgcgaaactagggtttcggcccgaggaggacgacgactccgacaggcgggacccacctgtcagcgacagcgagggcgcgcgcgcgcggctgactgggccggctgggccgaggagagagaagagaggttttgggccgactttcggcccaaagccaaaagaagacttt

SEQ ID NO: 98348 - DNA, 318 bp, Oryza sativa
  unsure (1)..(318): unsure at all n locations
  Clone ID: PAT_MRT4530_96262C.1
gccatgtgtccgatccctttttattgggagagggatgctgctgtcactagctcactatagtggtacttgcaagtgcctgccgatgggtgccatccacacgaatacgaggacgacgaacgcgggagctccggtggggagggacaacctaggggggacagaggagatctattnagggggggggggggagaaaaaaatcaangntatcatgaactatntnnannangatttggtttccaccnacttcnntggtaacancagggcnagcatcttnaaggccagggttggtttggcctnaacgaaaaatttattgaggctggg

SEQ ID NO: 98349 - DNA, 859 bp, Oryza sativa
  Clone ID: PAT_MRT4530_96263C.1
atgacgtcaccgacgacggcggcggctcggcgaagaagacggctcgggcggcggacactcgccggcgaacggcggcaccacggcaccaacggagggcaccagcacgtagaggacaacgcggcgaacacaccggtgaccaaaacggcggcggaaaaggaacggacggcgacggcgacgagaaggaagcggcggctaccttcgggttgacgacggcgacgatgctccggcgggttccgacggctgcgaaggggcggacgaggacggcggcgacttggcgatgacgacggcggtcttcccgagcggcggcgacagctggagcgacggcggagcacggctgaagcggcggcggcgacggcgaagctagggcacacggcgctagagctactccggcgacgagaggcgaaggcgagggctgcgacgggtagaggagacaccgggggtccttttaaaggggctcggaggcggcggcgaaggcccacggcgacggcaacggcgaaggaaaccttcggcttggaaagagggaacccgatccgaatcgaactcgattccaaagctttccaaagcgatttagccgatgattccaaagagaaaaaaggtagaggagatcccggagattgtttcccctcaaccaattcgaccggagaaggaaagaaacggccggatttggaaagcggcggcgacggcagctcggcggcgcgaaactagggtttcggcccgaggaagacgacgactgacgggtgggccccacctgtcagcgacagcgcgctcgcgcgggcggctgcggactgggccggactgggccgaggagagagaaaacggttttaggccgactttcggcccaaagccaaaagaagacttt

SEQ ID NO: 98350 - DNA, 278 bp, Oryza sativa
  Clone ID: PAT_MRT4530_96264C.1
atgctggagagagagagggagtgggagtgggagaggggagtacgggaggcaccgagccggccggcgaccgatgaggaggcagcgagcggtgctagaggagcagcgagcgtgggcaggcatctctgtggaggcggcagatcgtcagcaacattgcgccggtggctgacggagcttggcaataggcggagtaggaggccgagaggcaatggttgcgtagctataaaggatgaggctttggctaggaggcagatccacagatctaaggatggcattgcaga

SEQ ID NO: 98351 - DNA, 442 bp, Oryza sativa
  Clone ID: PAT_MRT4530_96265C.1
cggcgagaagagaagactccgggggtccttttaaaggggtcggaggcggcggcgaaggcccacggcgacggcaacggcgaaggaaactcgcggcttggagagaggaaagccgatccgattcgaactcgaatcaaactcattccaaaccgattgagccaaagattccaaaggagaaaaggtagaggagatcccggagattgtttcccctctaacaaatcggccggagaaggaaaggaacggccggattggaaggaaacagcggcggcggctcggcggcgccgcgctagggtttcggcccgaggaagacgacggctccgacaggcgggacccacctgtcagcgacagcgagggcgcgcgcgcgcggctgactgggccggctgggccgaggagagagaagagaggttttgggccgactttcggcccaaagccaaaagaagacttt

SEQ ID NO: 98352 - DNA, 858 bp, Oryza sativa
  Clone ID: PAT_MRT4530_96266C.1
atgacatcaccgacgacggcggcggctcggcgaagaaaacggctcgggcggcggacactcgccggcgaacggcggcaccacggcaccaacggagggcaccagcacgtagaggacaacgcggcgaacacaccggtgaccaaaacggcggcggaaaaggaacggacgacgacggcgacgagaaggaagcggcggctaccttcgggttgacgacggcgacgatgctccggcggtctccgacggcagcgaaggggcggacgaggacggcggcgacttggcaagcacgacggcggtcttcccgagcgacggcgacggctgaaacgacggcggcgcacggctggagcggcggcggcgacggcaaagctagggcacacggcgctagagctcttccggcgacgagaggcgaaggcgagggctgcgacgggtagaggagacaccgggggtccttttaaaggggctcggaggcggcggcgaaggcccacggcgacggcaacggcgaaggaaaccttcggcttggagagagggaaaaccgatccgaaacgaactcgtctccgacgctttccaaagcgatttaaccaaagattccaaaggagaaaaggtagaggagatcccggagattgtttcccctctaacaaatcggccggagaaggaaaggaacggccggatttggaaagcggcggcgacggcagctcggcggcgcgaaactagggtttcggcccgaggaagacgacgactgacgggtgggccccacctgtcagcgacagcgcgctcgcgcgggcggctgcggactgggccggactgggctgaggagagagaagggattttgggccgactttcggcccaaagccaaaagagactttt

SEQ ID NO: 98353 - DNA, 1229 bp, Oryza sativa
  Clone ID: PAT_MRT4530_96267C.1
acgctgcagctttggaagatccgctcttcgtggaggttgaagccgactctggttataaacaaaagtacacggatggagatggacgaagtcgggggtcgatggacatctttaggacaaatgaaggctacacgggctgcggcccggtagtcgagatgtcatggcacagggctggtgtcttgctgctaggggctcaattctgcctgcctgtccgggggttccagccgtaggtgggttgggtcagtactcttgtctatggctaggatgggttggaaactatgtcatgtcttccgtccatatgccgtggtggtatgtggcacgtggttgcacgtgaggaagacgtgtcttgtggcacttgtgggtgtgtcttgttgagtacggtggttgtactcagtcttgctcaatttttcccaaacccagaagaggagcccctggatgatgaaggctttggtgtctagctcgtgcctgccgtcaagcgcctgtggtcgtcgccttagtcttccgttgtttttcattgtctttgagtgtgctgggccgtcgcctagcgcaagcgccgccgtctccttccaaatccggccgttcctttccgtttctggtgaaattgattgaggggaaacgatctccgggatctcctctaccttttctcctttggaatctttggttaaatcgctttggaaagctttggaatcgagttcgattcggatcggttttccctctctccaagccgaaggtttccttcgccgttgccgtcgccgtgggccttcgccgccgcctccgagccctttaaaaggacccccggtgtctcctctacccgtcgccaccttcgccttcgcctctcgtcgtcggaaaagccctagcgccgtgtgccctagcttcgccgtcgccgccgccgcttcagccgtgctccgccgtcgctccagctgtcgccgtcactcgggaagaccgccgtcgtcgtcgccaagtcgtcgccgtcctcgtccgccccttcgcagccgtcggaacccgccggagcttcgtcgccgtcgacaacccgaaggtagccgccgcttccttctcgtcgccgtcgccgtccgttgcttctccaccgttgttttggtcaccggtgtgttcgccgcgttgtcctctacgtgctggtgccctccgttggtgccgtggtgccgccgttcgccgacgagtgtccgccgcccgagccgtcttcttcgccgagccgccgccgtcgtcggtgatgtcat

SEQ ID NO: 98354 - DNA, 901 bp, Oryza sativa
  Clone ID: PAT_MRT4530_96268C.1
tcaatctgtgatgttctgcctttgcccgatgagcttctggtcctcccctggggcggcacgggaggcgatgacccggccgcccctctcctccccctcctcccctttcacctcgccgcgcctgagcagccgccgacaaagccgtgcagccgcaagtacggtggctgcggggcctctcgccgaccacgcgctcgggtgggcaggggagccgccgacggcggcggcggcggcaaccaccagatccgggccactccggccggatctggagggatggcggctggcggtggggagggcgacagcgtaggcaggggcgcgctccgggcagcggtggatgaaggcggcggggatggcggcttccgcgggcgcgaaggcagcggcggtggactctgcgaccgaatctgtgtcggccgccagcgaatctagagttaggcgcggggaggaggtggtaggcggcggtgatggtggagggcggtggagagttctgtcgtggagctcgcgggaggcgacagtggatgccggtgcagtggtcccacatgtcggcagaggtggggtcccggcccggcctcggtccgtccgacaactatggcgctcaagtgtcatttcccctcctgagggcattgtcgtgccatctctcccatcaaggacaaaggtattgacagtgagttcaaaagtcgttaatgatgggcagaaggccaagaggacggtgatagtggagcttagggttagtgttgagggaataggtggacgagaggttgtgagcatatcgttcagggattgggatgagaggaataggtggacagtggcagccttggggattgggatgagaggaaggtgttgcattgcagtgagcgacggaggcattagtgaaatactaggtgagatgcaaatgagaggggggacatag

SEQ ID NO: 98355 - DNA, 871 bp, Oryza sativa
  Clone ID: PAT_MRT4530_96269C.1
atgacgtcaccgacggcggcggcagctcggcaaagaagacggctcgggcggcggactctcgccggcgaacggcggcactaggacgcaaacggaggacaccaacgggtagcggacggcacggcgaactcaccggcgaccaaagcgacggcggaggaccaacggacggcgacagcgacgaggttgaaacggcggcggtcttcggcttgacgacggcgacgatgcttcggcggtctccgacggcagcgaaggggcggacgaggacggcggcgacttggcgatgacgacggcggtcttcccgagtggcggcgacggctggaacgacggcggcgcacggctgaagcggcggcggcgacggcgaagctagggcacacggtgctagggctactccggcgacgagaggcgaaggcgagggtggcggcggaaagagaagaacacggggatccttttaaaggggctcggaggcgacggcggaggcccacggcgacggcaacggcgaaggaaacttgcggcttggagaggaagaaaaccaaaccgaatcgaactcgattcaaagctttccaaagcgattcaaccgacgattccaaaggagaaaaggtagaggagatcccggagattgtttcccctcaaccaattcgaccggagaaggaaagagacggccggatttggaagggaaacggcggcggcggcgctagggtttgcgggcgacggcagccgaaggaggacgaaggatctgacaggtgggacccacctgtcagcgtccgaacgcgcgcgcgcgcgggcggctgcggactgggccggactgggccgaaggaaagagagagagaagaggggttttgggccgactttcggcccaaagccaaaagaagacttt

SEQ ID NO: 98356 - DNA, 679 bp, Oryza sativa
  Clone ID: PAT_MRT4530_9626C.1
atggagaccttgaagggcgggcgacttcattccacaggcatccttgacgacagcgacgaaaccaacttcttcgagacatctccaactgagaagaacttcaactctgaggtgtacaactatacccacaagacacagccccacgacacgttcccgtgcgccgacatgccaccacgacataccggaaagaggccgtgacaggacccttcgcataaccctctctaaccgatcgcaccacaccttagggttcgcccccgtctccagcaggcaacgggcagcccccctttcgtgccgcggtgaatccagaagccgatcaaccggacaccccggccgacccaactccatcacgcccaccctcgcctggcaaagggccggcaccgacaggcgggccccactcgtcagcggcacaaggggcaagcacacggtggactcaatccatcgcggccgaggcggcaccgtggacccggaccacggaagtggtccacgggaccgacgccctggattggcccaaagcctatccaacggccatgggtggcgcggctggggcaaggcacggctcaaagccggctggacgaacgacggcgcgcggcggcgcggccacccgcggcgacggccggtgacagctcacgcgggcgaaagcggcgcacgcgagaagagcaccggcgcggcgcggcaaggggga

SEQ ID NO: 98357 - DNA, 868 bp, Oryza sativa
  Clone ID: PAT_MRT4530_96270C.1
aaagtcttcttttggctttgggccgaaagtcggcccaaaaccgccttctctctcttctcggcccagccggcccagtccgcagccgcccgcgcgcgcgcgcgccctcgcagccgctgacaggtgggtcccacctgtcaggcccgtcgtcttcctcgggccgaaaccctagcgcgccgccgccgagccgccgccgctgtttccttccaatccggccgcctctttccttctccggccaaattggttgaggggaaacaatctccgggatctcctctacctttttctctttggaatcatcggctaaatcgctttggaaagcggtggaatcaagttcgattcggatcgggttccctctttccaagccgcgagtttccttcgccgttgccgtcgccgtgggccttcgccgccgcctccgagcccctttaaaaggatccccgtgctcttctcttctcgccgccaccctcgccttcgcctctcgtcgccggagtagccctagcgccgtgtgccctagctttgccttcgccgccgccgcttcagccgtgctccgccgtcgctccagctgtcgccgccgctcgggaagaccgccgtcgtgctcgccaagtcgccgccgtcctcgtccgccccttcgctgccgtcggagaccgccggagcatcgtcgccgtcgtcaacccgaaggtagccgccgctccttcctcgtcgccgtcgccgtccgttgcttctccgccgtcgttttggtcgtcggtgagttcgccgtgccgtccgctacccgttggtgccctttgttagcgtcctcgcgccgccgttcgccggcgagcgtgcgccgcccgagccgacccagctgccgagccgccgccgccgtcggtgacgtcat

SEQ ID NO: 98358 - DNA, 126 bp, Oryza sativa
  Clone ID: PAT_MRT4530_96271C.1
atgccgcaacttaagaaactaaaacgagaaaactggggaaacgatggatgcatgtggatgcggaaaaaggcaagtatgcctggattgatccctaccgagctccacctctatagcctgttagaatag

SEQ ID NO: 98359 - DNA, 901 bp, Oryza sativa
  Clone ID: PAT_MRT4530_96272C.1
gggagaggggcttgatgacgccagcgatgacgtcaccgacggcggcggcggagcgacggcggacggggacggctcgggcggcgcatgctcgccggcgaacggcggcacgaggacgcaagcgaaggacaccgggacgaagcgggcggcacggcgaactcaccgatgaccaaaacaacggcggagaggcaacggacggcgccggcgacgaggaggaaacggcggggctcttcgggttgacgacggcgaagatgctccggtggtctccgacggcggcgaaggggcggacgaggacggcgacgcgacggcgaacacgacggcggtcttcccgagcgacggcgacggctggagcgacggcggagcttggctggagcggcggcggcgacgactaaactagggcgcacggcgctaggacgattccggcgacgagaggcgaaggcgagggtggcggcgggtagagaagggcacggggatccttttaaaggggctcggaggcgacggcggaggcccacggcgacggcaacggcgaaggaaactcgcggcttggagagagagaacccgatccgaatcgaactcgattccaagctttccaaagcgatttggccgaagattccaaagaggaaaaaggtagaggagatcccggagagtatttcccctcaaccaattcggccggagaaggaaaggagcggccggattgaaaggaaacagcggcggcggctcggcggcggcgcgctagggtttcggcccgaggaggacgacgggcctgacaggtgggacccacctgtcagcggctgcgagggcgcgcgcgcgcgcgggcggctgcggactgggccgacttgggccgggggaagagagagagaagggttttgggccgactttcggcccaaagccaaaagaagacttt

SEQ ID NO: 98360 - DNA, 212 bp, Oryza sativa
  unsure (1)..(212): unsure at all n locations
  Clone ID: PAT_MRT4530_96273C.1
tccttatagagcaggccgcctcttttttnttttttgttttagatagaaagacacatcaggagcaaagaggtgaggtcatcttatcattattagtgcatcatgtgccacctacctactatgtctttccgaatctctaagtacactagcatatctgttagtggaaaatgcatattcacaagttttggagcttcaaggcactggcactttttttt

SEQ ID NO: 98361 - DNA, 8992 bp, Oryza sativa
  Clone ID: PAT_MRT4530_96274C.1
atggtctacaccaggactggcaaccgcacgacaggcgagggcagcaacggcgaagaacgcgctgatggtgtgcaccccaacagtgattctggcaatggtccgccaccacttcccgagaacccgaccctggcccaagttatggcgcatcagactcagatgatggcagccatgatgcagcagatgcagcagcagcaccagcagatgcaccagaggatgatgcagtacgctgaacagcagcaccagcagtttggtccccctcccccgcaatccaagttgcctgagttcctgcgagtcaggccacccaccttctccagcaccaccaaccccatggaggcaaacgactggctccatgcaatagagaagaagctgaatctcctgcagtgcaatgatcaggagaaggtcgctttcgccacacaccagcttcagggtcctgcgtccgcttggtgggacaaccacatggccacccgcccaccgggtactgaagtcacatgggcagagttctgccgtagcttcaggaaggcacaggtgccagatggggtcgtggcacaaaagaagagggaatttcgtgcactccatcagggcaacaggacggtgacagagtacctccacgagttcaatcgcctcgcgcgatatgcaccggaggatgtccgcactgacgccgagaaacaagaaaagtttatggcaggcctggatgacgagctgaccaaccaactgatatccggggactacgctgactttgaaaggctggttgacaaggcaatccgtcaggaggatcagcgcaacaaaatggacaggaaaagaaaggcggcgcagttccggtccaaccaaggtagtcagcaccgaccgcgcttcactcctggacagcagggtggacctaccaccatgatcgtccgtcagcaccgcccgttccactctggcaacttccaccagggcgctagcggcagtcagaaccaccagggaggccagcccaaccgcggtgcagctccacgcccaccaatggcaccagcacagtcagcccagcccgcgcaagccaagaaggagacgggagcaaaaccagggtcctgcttcaactgtggcgagcttggccacttcgctgacaaatgcccgaagcccaggcgtgccggaccaaggtttatccaggctcgtgtcaaccacgcatctgtggaggaggcacaagcagcaccagaggtcgtactggtcaccctgaccaatgagaaaggagaaaccgtggtgtacaaatctctagtctcgccaaagaaaggagcctcgttgaatcagattgagacggaaatcccagtggacaccgaagagaagaacttgagaaaattggaggacatacccatagtctgcgagtatccagaggtgttccccgaagacctcaccaccatgccacccaagagggagattgaattccggattgatttggcaccaggaaccgctccaatctataagagaccgtacagaatggcggccaacgaattagcagaggtcaagaagcaagttgacgaacagctgcagaaagggtacattcgacccagcacttcaccttggggcgctccggtcatttttgtggagaaaaaggataagacaaagaggatgtgcgtcgattatcgcgcacttaacgaggtcacaatcaagaataaatatcctttgccgcgaatcgacgatttatttgatcaactgaaaggagctaaagtgttctctaagatagacctgcgatcaggctaccaccagttgagaatccgggaagaggatattccgaagacggccttcaccactcggtacgggctatatgagtgcacggttatgtccttcggacttactaacgcacccgcattcttcatgaatctgatgaacaaagtgttcatggaatttttggacaagtttgttgtggtattcatcgacaacattcttatctattcaaagtccgaagaggaacatgaacaacatctccgtctggtactcgagaagttgaaggagcaccagctatacgccaagttcagcaagtgtgacttctggttgacggaagtcaaatttctgggtcatgtcattacagctcagggtgtagcagttgatccatcgaacgtggagtcagttaccaagtggaccccaccgaagacagtgtcgcagattcgaagttttctaggactggctggttattaccgtcgtttcatcggaaacttctcaagaatcgcccgacccatgactcagttgcttaagaaagacgagaagtttaaatggacagctgagtgcgacaagagctttgaggagctcaaaaggaaattagtatccgcaccggttttgatcctgcccgaccagacgaaagacttccaagtctattgcgatgcatcccgtcacggacttggatgcgtcctaatgcaagagggcagagtggttgcatatgcctcgcggcagttgcgtccacacgaaggaaattatccaactcatgacttggaattggcagcagtggtccatgctttgaagatctggaggcactatctgatcggcaaccgctgcgaagtatatacggaccataaaagtctgaaatacatcttcacccaaccagacctaaaccttcgacaacgaagatggttggaactaatcaaagactatgacatgagtattcactaccacccgggtaaagccaatgtggtggcagacgctttaagccggaaaagttactgcactgctctatgcatcgagggcatgtgtgaggaattgcgacaggagcttgaacatctcaacatgggaattgttgaacacgggttcgtagccgctctggaggcacggcctacgctcgtggatcaagttagagccgctcaagtaaatgatccggaaatagcagaactgaaaaagaacatgagagtcggaaaagctcgggatttccacgaggatgagcatggcacaatctggatgggagaaagattgtgtgtaccggacgacaaggaattgaaggatctgatactcaccgaagctcatcagacccagtactccattcacccaggcagcaccaaaatgtaccaagaccttaaagaaaaattttggtgggtcagcatgagaagggaaatagctgaattcgtcgcactctgcgatgtttgccaacgagtgaaagcagagcaccaaagaccagcaggtttactccaacctctccaaatcccggaatggaaatgggaggagattggaatggactttataacgggactgccccggacatcatcgggacatgattcaatctgggtagtcgtggatcgactcaccaaggaagaattggggacccgtttaaacttcagcacggcctatcacccgcaaactgatggtcagaccgagcgtgtcaatcaaatcttggaggatatgttgagagcttgcgctcttgattttggtggagcttgggacaaaagcttaccatatgcggaattctcgtacaacaacagctaccaggccagtctacagatggcaccgtttgaagctctatacggccggaagtgccgcacaccgcttttctgggatcagacaggcgaacgtcaactgttcggaacagaagtattagcggaagcagaagagaaagtcagaatcatcagggaaaggttgaggattgctcagtctcgacagaagagctacgcggataaccgccgaagggagctcacttttgaggcaggagattacgtgtatcttcgtgtcaccccgctccggggagtacaccgctttcagacaaaaggcaagttggcaccacgcttcgtgggaccatacaaaattttggaacgaagaggagaagttgcctatcaactagaacttccgtccaacatgatcggcatccatgacgtgttccacgtatcccaattaaagaagtgtttaagggtacctgaagaacaggctgattcggaacacattgatatccaggaggacctaacatatgtggagaagccggccgaggcccagcccgacagccggccgcccgcccgcctcctctcggggtcgccgacagattccgatctctccgacgctccggtgtacttcgagatagtcgccgaggcaagggtgggcgtgatggagcggggcgggccctgcgacggcctctgtcgcttccggattcacctaggcacgagaggggactgcccgtcgcccgctggggacgggggtgaaacctgaggtgtggtgtgcttggttagagggggtcatgcgaagggtcctgtcacggcctctttccgacgtggatctgtatgtcaacattgtcgtttgtgtaccccggccggtcctggacgggggttttaatgcatattccctttgtcttctctagatggccgagcacccacccaaccaccgcggagaaggcatggatgacttcgtggcagagttggcacgcatgacactggtggtgggctaccccaacgcgccggagtacacgactgttccaccgctcagtggcgagcttcctcaccgtgtccgcttggaggtccatggttacgtggggacttgcctcgctaacatggtggtcgaggcgtctggagccacagcagatcacgcatgtcaggaggcagcatatctgatgatggccagactgcgggagcgccacaactacatcttccacaacacggtgtaccgtttccaccctcgtcgagccaacgacagtgatgtcagttccttccgtccgacagccggcgagaacgacaccaccttcagtcacgcgtccaaggccttgaatgatgggaagctcatgaggatcgtcgctctgaaggacgagatagcgcgcctgaagagggagaatgctcagttgaagggtcttcccgcgccaggaggagtccagatccgcaccacgcctcgcaagtcgacaacggcacccgtgcgcatccagcttgcgcccaggaacccacctccgtcagcagctcccgcagcacctccagttccgcccgcagctccagcagttcctacagctccagcgccagccccagctcctgttcccgtgtcagctccagcatccgctctctccttcgcacctgcatcagccgtcaggggccccgccagtggcaatgggggttggttgcctgctactcccagtggcagtcgcgaccgcagcagcagcagctccagtggcatagagccgggcagcggcgagacttatctgccaggctccaggagtcgctcagaggacctgatggtctacaccaggactggcacccgcacgacaggcgagggcagcaacggcgaagaacgcgctgatggtgtgcaccccaacagtgattccggcaatggtccgccaccacttcccgagaatccgacgctagcccaagttatggcacatcagactcagatgatggcagccatgatgcagcagatgcagcagcagcaccagcagatgcaccagaggatgctgcagcacgctgaacagcagcaccggcagtttggtccccctccccctcagtccaagttgccagagtttctacgtgtcaggccacccaccttctccagcaccaccaaccccatggaggcgaatgactggctccatgccatagagaagaagctgaatctcctgcagtgcaatgatcaggagaaggtcgctttcgccacacaccagcttcaaggtcctgcgtcagcttggtgggacaatcacatggccacccgcccgccaggcactgaagtcacttgggcggagttctgtcgtagcttcaggaaggcacaggtgccagacggggtcgtggcacaaaagaagagggaattccgggcgctccatcagggcaataggacagtgacagagtacctccatgagttcaatcgcctcgcgcgatatgcaccggaggatgtccgcactgacgccgagaagcaggaaaagttcatggcaggtctggatgacgagctgaccaaccaactgatatctggggactacgctgattttgaaagactggttgacaaggcaatccgtcaggaggatcagcgcaacaaaatggacaggaagagaaaggcggcacagttccggtccaaccaaggaaaccatcagcgaccgcgtttcactcccggacagcagggtggacctaccaccatgatcgtccgccagcaccgcccgttcaactccagcaacttccaccagggcgctagtggcagtcagaaccaccatggaggtcagcctaaccgcggtgcagctccacgcccaccagtggcaccagcacaatcaggcccgtccgcacaagctaaggagaccgaagccaaacctgggtcctgtttcaactgtggtgagcttggccacttcgccgacaaatgcccgaagcccaggcgtgccgggccaaggaaagaagagcttagtacaccaatgagggttcataccccaggaaatagttcaacctcagtcaattttagcccttcagtgctaatagaaatccaaagatcaccatttctagccaacctcattcttctcgaatccaaagacctagatgtcattcttgggatggattggctgaccaagtttaagggagtcatcgattgtgcgaatcgcacagtcaccttgaccaacgagaagggagaaaccgtggtgtacaaatcactagtctcaccaaagcaaggggtctccttgaatcagatcgagatggaaatcccagtggtcaccgaggagaagaattcgaggaagttggaagagattcctatagtctgcgagtacccagaagtgtttcccgaagatctcactaccatgccacccaagcgaaagattgaattccggattgatttggcaccgggaaccgcgccaatttacaagagaccgtacaggatggcggccaacgaattagcagaggtcaagaagcaggttgatgagcaactgcagaaagggtacattcgaccgagtacttcaccttggggtgctccggtcatttttgtggagaaaaaggataagacgaaaaggatgtgcgttgattatcgcgcactcaacgaggtcacaatcaagaataaatatcatttaccgcggatcgatgatttgtttgatcaactgaagggagctaagttaaggatccgggaagaggatattccaaagacggctttcaccactcgatacgggctgtatgagtgcacggttatgtctttcggacttaccaacgcacccgcattcttcatgaatctgatgaacaaagtgttcatggaatttctcgacaagtttgttgtggttttcatcgacgacattcttatctattcaaagtctgaagaggaacatgagcagcatcttcgtctggtactcgagaagttgaaggagcaccaattatacgccaagttcagcaagtgtgacttctggttgacagaagtcaaatttctgggtcatgttattacagctcagggtgtggcagttgatccatcgaacgtggagtcagttaccaaatggaccccaccgaagaccgtgtcgcagattcgaagttttcttggacttgctggttattaccgccgattcatcgaaaacttctccaggatcgcccgacccatgactcagttgcttaagaaagatgagaagtttaaatggacagctgagtgcgataagagctttgaggagctcaagaagaaattagtatccgcaccagaaggcagagtggttgcgtatgcctcgcgacagttgcgtccacacgaagggaattatccaacccatgatttggaattggcagcagtggttcatgctttgaagatctgggggcactatctgattggcaaccgctgtgaagtatatacggatcacaagagtctgaaatacatcttcacccaaccggatctaaatctccgacaacgaagatggttggaattaatcaaagactatgatatgagcattcactaccacccggggaaagccaatgtggtggcagacgcattaagcaggaaaagttactgcactgctctatgcatcgagggcatgtgtgaggaattgcggcaggagtttgagcatctcaacgtgggaattgttgaacatgggttcgtagccgctctagaagcacggcctacgctcgtcgatcaagttagagccgctcaaataaatgatccggaaatagcagagctgaaaaagaacatgagagtcggaaaggctcgggatttccttgaggatgagcatggcacaatctggatgggagaaagattgtgtgtacctgacgacaaggaactgaaggatctgatactcaccgaggctcatcagacacagtattccattcacccaggcagcactaaaatgtaccaagacctcaaagaaaagttttggtgggtcagtatgagaagagaaatagctgaattcgtcgcactctgcgatgtttgccagcgagtgaaggcagagcatcaaaggccagcaggtttactccaacctcttcaaattccagaatggaaattgcataccacctatacgggaaagagattggcagagttgtacctggcaaggatcatgtgtttgcatggggtacctaagaagatagtatctgaccgagggagtcagttcacctcaaaattttggcagaaactgcagaaagaattggggacccgtttaaatttcagtaccgcctaccatccgcagacagatggtcagaccgagcgagtcaatcaaatcttggaagatatgttgagagcttgcgctcttgacttcggtggagcttgggacaacagcttgccatatgcggaattctcatacaacaacagttaccaagccagtctacagatggcaccgtttgaagctttatacggccggaagtgccgcacacctctcttctgggatcagacaggcgagcgtcaattgttcgggacagaggtattaacggaagcagaagagaaagtcagaaccatcagggaaaggttgagaattgcccagtctcgacagaagagctacgcggataaccgccgaaggaagctcacttttgaagcaggggattatgtgtatcttcgggttaccccgctccggggagtgcaccgttttcaaaccaaaggcaagttagcaccacgtttcgtgggaccctacaaaatcttggaacgaagggggaagttgcttattagctag

SEQ ID NO: 98362 - DNA, 1001 bp, Oryza sativa
  Clone ID: PAT_MRT4530_96275C.1
atggggatcgccggagccggagccggaggcggcagcggtgggcaagggcaaactgacgaggaggcctctgtcaggattactccactcacgctgtcacgcaagcacgacagaggcgtcgaaatggcgagggtaacctgcttcttatccaactccgacgaactcctcttcttgtctggtgccggcgacaacccaatctccgacgaattagggtcctggggtgagatggggtgggagggggaggggaagaagggggagttcgccgggcttagagggatggtcgtgggaggcggcggcccggcgggcgggagcatctatctcaccttctatggcttgaggagggaggtgaggggggagggggagtgggaggaggccggcccgggggggtgggcctcgtcggcgccgttcacaccttccggccagctggcgaggccggacagcggcacgctggggcggcgcgccctagcgccgtgtgccctagcgccgccgtcgccgccgtcgctccagccgtgcgccgccgccgttccagtcgtcgccgtcgctcgggaaggtcgtcatcgtggtcgccaagtcgccgccgtcctcgtccgccgcttcgccaccgtcggagaccgccggagcatcgtcgccgtcgtcaagccgaagaccgccgccgtttcaacctcgtcgccgtcgccgtccgttggtcttccgccgtcgctttggtcgccggaaggtgcgctgcagtggattgtgttatgcaaggggtattgtcacaactcctttccgaggtaccgtggtggtattgaggcacatgaggaagagttctacagtgaagctgatggtgtggaggattaggtgtagccctggtcaagctgcctgtggagtggagccgtctgcgccgtttatcttattttccgctgcttagatctttattgattgagaggaactatatacctctgtaatgacattttatacgcttaataattagagtaataattgtacttctaaaaaaaaaaaaaaaa

SEQ ID NO: 98363 - DNA, 3129 bp, Oryza sativa
  unsure (1)..(3129): unsure at all n locations
  Clone ID: PAT_MRT4530_96276C.1
gaggnncgcncncnacgtcccgtgatctccaggtcaaagaaaaactggcaggagaagagaagaggagaggaggaaaagggaaataaataaaaaggagaggagaggagaagggaagagaagcgaagcgaggccttcttcgccgtgggaataattttgcgctcgggggatcttgatctgaggaggagggggttgttggtgttggggagagggagcgatcggagccagggcgcggatcgcaggcggtgagatttgtgttccgggacaagccatgagcagcgcaaccaccggttgttaaccaagcaacccccctgtaaattgaaagcaaccgaagcgaagcgcaaagaaatggtttttcagaagaggtcatcgctggagatggagtcgggaggcggaagccacgtcgcggagatgccgcgcgtccccaagtccgcgaggggcaagagatcaattcggaagaaggagagccagggtcaggtgatgtgcgcgttcgacctgctcgcgactgtggccggaaagctgcttgatgagggggagggttctctggggaacgcgagctcaggcaccccggccgtggacgcgtcgcccaaggatgtccgcgtgaagcaggagcagtgcgatgaggaggcgaagcatttcaagaatgaggtgatggatcaggatagctgcaatgagagtgcattggtctcccacattgcgtttcagcggccggtgaatcaccatgggcggaagggggaagatccggaggggagtcatgctgtgattgaggaccccaaggccaagtccgaggcactggacaaggaatcctcaatgataagctgcaccaaggctgaattgggttgtaattttgcagcgatcgctgataggtggtcgcctgaatccgtggagtcaggggccttcactggggatgcagctgcaatagcgatgccggctaccacatcaggcttccacaagaatgctccagatatgtataatctgctcgatccaatggatgtggatgtaaagccgcctcctttggtcagctctgacagcaccggcgaaatgccgttgtatggcaataaaattcgccgatcgacctctttcccgagggtccccaagggaggggcggggtttactgtagatagagatgaagatgatgatgataaatcttccgggtgcactcatccgagcaccgctactaacaggggtttcaggcccaattgtacagctggtcatagtagggtaaagaagttgctcgcctgtaagcacaggaaagttgctccagccaggatgcacaaaggagatctttcctatagtggtgagcattgtgagatcccattcaccttttccttttttgaggagcactgcattgatggcactcatattcaaacctgcttactctattcttacttgagttcgttgatcctgctagatgttgaccggaagccttctttccgcaacaagaaaatgtattatacacgacaaaggacacaaaggagcacattcaagcggaggaagatgtttgatcgtcattcagcccaagtttctgaagaatatgcaaaggcaaacacaaagtttgctgcaagagactcgcacgcggtttctttggaagcaaacaaggggaccaattcaacagcattccagaaatcacaagagtcaagtgactgccacgtaaaacttaggatcaagtctttcaaggtgcctgaacttctaattgagatcccagaaactgcgactgttggttcactgaagaaaactgttctggaggcagtaaatgccatacttggaggtggtctgcgtgtcggtgtgctccatcatgggaagaaagtcagagatgataataaaaccttaatgcaggctgggatttctcatgatgaggtactggacaacctgggtttttctcttgaacccaattgtgcaccgcatccgtcacaactctcacctcccgaagataatgaattcatggaaactgttgatactactgaacccctagctaggattgcacctgctgactcatcttccaagcatggtgaagttgatgcttcacaggagcttgcattggcacccttatcagcaaactaccaagggagtgatcatgactttgtgcactctcctgggggcatgtcttcacctgataaggcatccacaaactcgcgagctattgttccagttactcctgcagattccaatgctggggctatagttccagcaaacaaagcaaagaggtcacctgaacaagggcaacgccgaatcaggcgtccgttctctgttgccgaagtggaagcccttgtgcttgcagttgaaaagcttggaaccggaagatggcgagatgtcaaacttcgggcctttgataatgcaaagcaccggacttacgttgatcttaaggacaaatggaagacgctcgtgcacacggcgagcatctcgccccagcagcggcgtggcgagccggtgccacaggagctgctcgacagggtcctggcggctcaggcctattggtctcagcagcaagccaagctccagcctaagacgcccccgctggctgaggctctcctgctcacctaataacctgatctcagctaatggtctcttaggaaaccattccagcttttgtataaagtcagtcagtccattcaaaggaggttaaggaagatattagaaaaaaagatatatataaaaaggtacaagaaatattgaccgatttgttgtaatatctactcaccaattattctttcaagccagggttctctctccttgtgaatttaaccaaaggtatggggtatttctttggcaactttgtacatgatggtgatggaggaagaagatgatccatgaactgagatctgcagtgactactaactcacaatttttttacaattgtggtttaaaagagaagagattaaagcttcagattcttttgtcaattcaattcattcttttgttaggatgagaatggtgaaaagataaggagggatggatcattgcttccccttttttttttcctttttttgttatcctaggtgtactatgttttcttcaccaatcttgtagttatcttggtcccctcaaagttgtacttgatcattataacaaatattaaaaagaaattgtttattctccttcttaccccccttaaaaaaaaaaaaaaaaaaaaaa

SEQ ID NO: 98364 - DNA, 5334 bp, Oryza sativa
  Clone ID: PAT_MRT4530_96277C.1
atggccggtcacccacccaaccaccgcggagaaggcatgatcgatttcgtggcagagttagcacgtatgacactggtggtgggctaccccaacgcgccggagtacacgacgattccgccgctcagtggcgagcttcctcaccgtgtccgcttggaggtccatggctacgtggggacttgcctcgctaacatggcggtcgaggcatctggaggcacagcagatcacgcctgtcaggaggcagcctacttgatgatggccagactacgggagcgccacgactacatcttccacgacacggcgtaccgctaccacccccgtcgagcccatggtgatggcgtcagctccttccgtccgacagctggcgagaacgacaccacctttggtcacatgtgtgctgtgatgaggggattggacaggatgcactcggacctgcacaaggcgaccaaggccttgaacgatgggaagctcatgaggatcgtcgccctgaaggacgagatagcgcgcctgaagaaggagaacgctcagctaaagggtcttccagcgccaggaggagtccggatccgcaccacgccccgcaagacgacgactgcacctgtgcgcatccagcttgcgcccaggaacccacctccagcagcagctcccgcagcaccttcagttccgcccgcagttcctgcagctccagttccagctcccgcgttcactctctccttcgctccagcatcagccgccagaggttcagccagtggtaccggaggctgcttgtttgggatggtctacaccaggactggcaaccgcacgacaggcgagggcagcaacggcgaagaacgcgtggatggtgtgcaccccaacagtgattctggcaatggtccgccaccacttcccgagaatccgacgcttgcccaagttatggcacatcagactcagatgatggcagccatgatgcagcagatgcagcagcagcaccagcagatgcaccaaaggatgatgcagcacgccgaacagcagcaccagcagtttggtccccctccccctcagtccaagttgccagagtttctacgcgtcaggccacccaccttctccagcaccaccaaccccatggaggcgaacgactggctccatgccatagagaagaagctgaatctcctgcagtgcaatgatcaggagaaggtcgctttcgccacacaccagcttcagggtcccgcgtcagcttggtgggacaaccacatggccacccgcccaccgggtactgaagtcacatgggcagagttctgccgtagcttcaggaaggcacaggtgccagatggggtcgtggcacaaaagaagagggaattccgggcgctccatcagggcaacaggactgtgacagagtacctccacgagttcaatcgcctcgcgcgatatgcaccagaggatgtccgcaccgacgccgagaagcaggagaagttcatggcgggtttggatgatgagctgaccaaccaactgatatctggggactacgctgactttgagaggctggtcgacaaggcaatccgccaggaggatcaacgcaacaagatcgacaggaagaggaaggccgctcagttcagggcacctcagggaagtcaccagaggccgcgcttcactcccgggcagcagggtggacctaccaccatgatcgtccgtcagcaccgcccgttcaaccctagcaacttccaccagggcactagtggcagtcagaaccaccatggaggtcagcccaaccgcggtgcagctccacgcccatcagtggcaccggcacagtcaggccagcccgcgcaagccaagaaggagactggagcaaaaccagggtcctgcttcaactgtggcgagcttggtcacttcgctgacaaatgcccaaagcccaggcgtgccgggccaaggtttatccaggctcgtgtcaaccacgcgtctgcagaggaggcacaaacagcaccggaggtcgtactgggtacgtttcctgttaactcaatccctgcaacagtacttttcgattctggtgcaacgcattctttcatttcaaagaaatttgtggggaggtatgggttaaggaaagaagagcttagcacaccaatgagggttcataccccgggaaatagttcaacctcagtcagttttagcccctcagtgctaatagaaatccaaagatcaccatttctagccaacctcattcttcttgaatccaaagacctagatgtcattcttgggatggattggctgaccaagtttaagggagtcatcgattgtgcgaatcgcacagtcaccttgaccaacgagaagggagaaacagtggtgtacaaatctctagtctcaccaaagaaaggggtctcgttgaatcagattgagacggaaatcccagtggataccgtagagaagaacttgagaaaattggaagatatacccatagtctgcgagtatccagaagtgttccccgaagacctcactaccatgccacccaagagagagattgaattccggattgacttggcaccgggaaccgctccaatctataagagaccatacagaatggcggccaacgaattagcagaggtcaagaagcaagttgatgagcagctgcagaaagggtacatacgaccaagcacttcaccttggggcgctccggtcatttttgtggagaaaaaggataagacgaagaggatgtgcgttgattatcgcgcactcaacgaggtcacaatcaagaataaatatcctttgccgcgaatcgacgatttatttgatcaactgaaaggagctaaagtattttctaagatagacctgcgatcaggctaccaccagctgagaatccgggaagaggatattccgaagacggccttcaccactcggtacgggctatatgagtgcacggttatgtctttcggacttaccaacgcacccgcattcttcatgaatctgatgaacaaagtgttcatggaatttctggacaagtttgttgtggtattcatcgacgacatacttatctactcaaaatccgaggaagaacatgagcaacatctccgtctggtactcgaaaagttgaaggagcaccagctatacgccaagttcagcaagtgtgacttctggttgacagaagtcaaatttctgggtcatgtcattacagctcagggtgtggcagtcgacccatcgaacgtggagtcagttaccaaatggaccccacctaagaccgtgtcgcagattcggagttttcttggacttgcgggttattaccgccgattcatcgaaaatttctccaggatcgcccgacccatgactcagttgcttaagaaggatgagaagtttaaatggacagctgagtgcgataagagctttgaggagctcaagaagaaattagtatccgcaccggttttgatcctgcccgaccagatgaaagacttccaagtctattgtgatgcatcccgtcacggacttggatgtgtcctaatgcaagagggcagagtggttgcatatgcctcgcggcagttgcgtccacacgaaggaaattatccaactcatgacttggaattggcagcagtggttcatgctttgaagatctggaggcactatctgattggcaaccgctgcgaagtatatacggaccataagagtctgaaatacatcttcacccaaccggacctaaatctccgacaacgaagatggttggaactaatcaaagactatgacatgagtattcactaccacccgggtaaagccaatgtggtggcagacgctttaagccggaaaagttactgcactgccctatgcatcgagggcatgtgtgaggaattgcggcaggagtttgaacatctcaacatgggaattgttgaacacgggtttgtagccgctctggaggcacggcccactctcgtggatcaagtcagagcagctcaagtaaatgattctgagatagcagagctgaaaaagaatatgagagtcggaaaagcccgggatttccacgaagatgagcatggcacaatctggatgggagaaagattgtgtgtacctgacgacaaggaactgaaggatctgatactcaccgaggctcatcagacccagtactccattcatccaggcagcactaaaatgtatcaagacctcaaagaaaaattttggtgggtcagcatgaggagagaaatagctgaattcgtcgcactctgcgatgtttgccaacgagtgaaggcagagcaccaaagaccagcaggtttactccaacctcttcaaatcccggaatggaaatgggaggagattggaatggactttataacaggactgccccggacatcatcgggtcacgattcaatctgggtagtcgtggatcgactcactaaggttgctcacttcataccagtacataccacctatacgggaaagagattggcagaattgtacctctcgagaatcatgtgtttgcatggggtacccaggaagatagtatccgaccgaggtagtcagttcacctcaaagttttggcagaaactgcaggaagaattggggacccgtttaaacttcagcacggcctatcacccgcaaactgatggtcagaccgagcgagtcaatcaaatcttggaagatatgttgagagcttgcgctcttgattttggtggagcttgggacaaaagcttgccatatgcggaattctcgtacaacaacagctaccaggccagtctacagatggcaccgtttgaagctttatacggccggaagtgccgcacacctctcttctgggatcagacaggcgaacgtcaactgttcggaacagaagtattagcggaagcagaagagaaagtcagaatcatcagggaaaggttgaggattgctcagtctcgacagaagagctacgtggataaccgtcgaagggagctcacttttgaggcaggagattacgtgtatcttcgtgtcactccgctccggggagtacaccgttttcagacgaaaggcaagttggcaccacgcttcgtgggaccatacaaaatcttggaacgaaggggagaagttgcttatcagctagaacttccatccaatatgatcggcatccatgacgtgttccacgtgtcccaattaaagaagtgtttaagggtacctgaagaacaggctgattcggaacacattgatatccaggaggacctaacttatgtggagaagccggttcgcatacttgataccagcgaaaggagaaccagaaacaaggttacccggttttgccgagttcagtggagtcatcattcggaagaggaagcaacctgggaaagggaagatgagttgaaagccgcccatccgcacctcttcaccagctcctccgaatctcggggccgagattccgtttaa

SEQ ID NO: 98365 - DNA, 745 bp, Oryza sativa
  Clone ID: PAT_MRT4530_96278C.1
catgcggtaccagccatcagagcatttcatggatgctaaggtggtgtcacatatgtcccatgatttgagagcttcctcttactacgtttcaaaggcgaaatctgatgtagcagacagagctgccttacaatccaacatgatgcagggaattggcccttttaatggcattgctgcagttggaggtaactacaataaagtcagtactgttcagtatggggtctcgaggatgtattagggtgcaatggccacttcaaaaatgctccgctgagctgattaataacatgaaagaatccaagtacccaagtgccttatcagccaaagattcagacaaagaatacaggaccaacaatctgatcgaggaagcgtcgaggcggtgaaaatgaaattacagaatgtggaaaagacaaacatcttgctagccattgatctagcctgccaagaaaggcatgccatattgccgtgccgtcagttatttgctgctaagaagaaaagaaatgggagaaaagggaaaaagatgagcgagtgatctactttgaatgaaagagaacttatgggaataaaaatagcgagcttatgtatatacaataacttgattctatatattactgccagagacagccatttcttttgttccacatgtggacatgtggtggtgtgtgttttctttttgtatcactgggcgtctgagcacaaatgcttgcgagacaattcccttgtagaacaggagtacattttggtgtaacat

SEQ ID NO: 98366 - DNA, 859 bp, Oryza sativa
  Clone ID: PAT_MRT4530_96279C.1
atgacgtcaccgacgacggcggcggctcggcgaagaagacggctcgggcggcggacactcgccggcgaacggcggcaccacggcaccaacggagggcaccagcacgtagaggacaacgcggcgaacacaccggtgaccaaaacggcggcggaaaaggaacggacgacgacggcgacgagaaggaagcggcggctaccttcgggttgtcgacggcgacgacgctccggcgggttccgacggctgcgaaggggcggacgaggacggcggcgacctgacgatgacgacggcggtcttcccgagcgacgacgacggctggagcgacggcggagcacggctgaagctgctgcggcgacggcgaaactagggcgcacggcgctaaagctcttccgacgacgagaggcgaaggcgagggctgcgacgggtagaggagacaccgggggtccttttaaaggggctcggaggcggcggcgaaggcccacggcgacggcaacggcgaaggaaaccttcggcttggagagagggaaaaccgatccgaatcgaactcgattccaaagctttccaaagcgatttaaccaaagattccaaaggagaaaaggtagaggagatcccgaggatcatttcccctctattgattcggccggagaaggaaaggagcggccggatttggaaaggaaacggcggcggcgcgaaactagggtttcgggcggcggcggccgaaggtagacgacgactgacgggtgggccccacctgtcagcgacagcgcgctcgcgcgggcggctgcggactgggccggactgggccgaggagagagagaacggttttgggccgactttcggcccaaagccaaaagaagacttt

SEQ ID NO: 98367 - DNA, 903 bp, Oryza sativa
  Clone ID: PAT_MRT4530_9627C.1
atggccggcgtggcgtgcgtgttggtggtgggcgtgctgtggctgagcgccgggcagtcggcggcgtgcgacgggcacccatgcccgacgccggcggggaagtgcccgataaacacggtgaagctgggggtgtgcgccgacgtgctggacgggctcatccacgcgtccacgccgcccaaggagccctgctgcccgctcatcgccggccttgccgacctggacgccgccgtctgcgtctgcctcgccatcaacgccaaccttctcggcctcaacctcgacgtccccgtcgacctctccctcctcctcaactactgcggctgcaagctccctgctggcttcaacacgcgtggcggttgctggaggggaggcggcgggcaacgggctgcggcggcgccctcccctccgccggatccggcgggaggggaggcgcggcaggcggtggcgcaagaggggaggcggcgggcgaagggttgcggcagcggctggcgcatctctctcccacagctggtggctgcctggcggaggcagcggcggcgacggccgcgccctcccctccgccagatccggtgggaggggaggcggcgagctcccgcggccggcgcgctgcctaaggcagcggcggcggcggctgtgccctcccctccgccagatctggcgggaggggagacggcgagctcccgcggcgggcagctgcctgggacagcggcggcggcggctgcgccctcccctccactagatcctgcggaaggggaggcggtggggaggcggcgagctcccgcggccggcggctgcctggaggaggcagctgcggcgcaccacagcggcggcggccgtgccatagcggcagatctcaaggggaagaaggccggaggcaacccaagggagaaggacgaaggttcttga

SEQ ID NO: 98368 - DNA, 7450 bp, Oryza sativa
  Clone ID: PAT_MRT4530_96280C.1
atggtctacaccaggactggcacccgcacgacaggcgagggcagcaacggcgaagaacgcgctgatggtgtgcaccccagcagtgattccggcaatggtccgccaccacttcccgagaatccgacccttgcccaagttatggcacatcagactcagatgatggcagccatgatgcagcagatgcagcaacagcaccagcagatgcaccagaggatgatgcagcacgccgaacagcagcaccagcagtttggtccccctccccctcagtccaagttgcctgagttcctacgtgtcaggccacccaccttctccagcaccaccaaccctatggaggcaaatgactggctccatgcaatagagaagaagctgaatctcctgcagtgcaatgatcaggagaaggtcgcttttgccacacaccagcttcaaggtcctgcgtcggcttggtgggataatcacatggccacccgcccaccgggtactgaagtcacatgggcagagttctgccgtagcttcaggaaggcacaggtgccagatggggtcgtggcacaaaagaagagggagtttcgtgcactccatcagggcaacaggactgtgacggagtacctccatgagtttaatcgcctcgcgcgatatgcaccagaggacgtccgcaccgacgccgagaagcaggagaagttcatggcgggtctggatgacgagctgaccaaccaactgatatctggggactacgctgactttgagaggctggttgacaaggcaatccgtcaggaggatcaacgcaacaagatggacaggaagaggaaggccgcacagttcagggcacctcagggaagtcaccagaggccgcgcttcactcccggacagcagggtggacctaccaccatgatcgttcgtcagcaccgcccgttcaatcctagcaactttcctcagggcgccagtggcagtcagaaccaccatggtggtcagtccaaccgcggtgcagctccacgcccaccaatggcaccggcacagtcaagcccgcccgcgcaagccaagaaggagactggagcaaaaccagggtcctgtttcaactgtggcgagcttggccacttcgctgacaaatgcccgaagcccaggcgtgccgggccaaggtttatccaggctcgtgtcaaccacgcatctgcggaggaggcacaagcagcaccagaggttgtactgggtacgtttcctgttaactcaatccctgcaacagtactttttgattctggtgcaacgcattctttcatttcaaagaaattcgtggggatgtatgggttaaggaaagaagagcttagcacaccaatgagagttcataccccgggaaatagttcaacctcagtcagttttagcccttcagtgctaatagaaatccaaagatcaccatttctagccaacctcattcttcttgaatccaaagacctagacgtcattcttgggatggattggctgaccaagtttaagggagtcatcgattgtgcgaatcgtactgtcaccttgaccaacgagaagggggaaacggtagtgtacaaatcaccagactcgccaaagcaaggagtctccttgaatcagattgaagcggaaatcccagtggacaccgtggagaagaatttgaagaaattggaagacatacccatagcctccgaatacccagaagtgtttcctgaagacctaactaccatgccacccaagagagagattgaattccggattgacttggcaccgggaaccgctccaatttacaagagaccgtacagaatggcggtcaacgaactagcagaggtcaagaagcaggttgatgagcagctgcagaaagggtacattcgaccaagtacttcaccttggggtgctccggtcatttttgtggagaaaagggataagacgaagaggatgtgcgttgattatcgcgcactcaacgaggtcacaatcaagaacaaatatcccttgccgcgaatcgacgatttatttgatcaactgaaaggagctaaagtgttttctaagatagacatgcgatcaggctaccaccagttgcgaattcgggaagaggatattccgaagacggccttcaccactcggtacgggctatatgagtgcacggttatgtccttcggacttaccaacgcacctgcattctttatgaatctgatgaacaaagtgttcatggaatttctggacaagtttgttgtggtattcatcgacgacatacttatctactcaaaatccgaggaagaacatgagcaacatctccgtctggtactcgagaagttgaaggagcaccagctatacgccaagttcagcaagtgtgacttctggttgacggaagtcaaatttctgggccatgtcattacagcccagggtgtggcagttgatccgtcgaacgtagagtcagtcaccaagtggaccccaccgaagaccgtgtcgcagattcgaagttttctaggactggcaggttattaccgccggttcatcgaaaacttctccagaatcgcccgacctatgactcagttgcttaagaaagatgagaagtttaaatggacagctgagtgcgataagagttttgaggagctcaagaagaaattagtatccgcaccggttttgattttgcccgaccagatgaaagacttccaagtctattgcgatgcatcccgtcacggacttggatgtgtcctaatgcaagaaggcagagtggttgccagtggttcatactttgaagatctggaggcacggccaacgctcgtggatcaagtcagagcagctcaagtaaatgattctgaaatagcagagctgaaaaagaatatgagagtcgggaaagcccgggatttccacgaagatgaacacggcacaatctggttgggagaaagattgtgtgtacctgacgacaaggaactgaaggatctgatactcactgaggctcatcagacccagtactccattcatccaggcagcactaaaatgtatcaagatctcaaagaaaagtttttgtgggtcagcatgaggagagaaatagctgaattcgtcgcactctgcgatgtttgccaacgagtgaaggcagagcaccaaagaccagcagcttgggacaaaagcttgccatatgcggaattctcgtacaacaacagctaccaggccagtctacagatggcaccgtttgaagctttatacggccggaagtgccgcacacctctcttctgggatcagacaggcgagcgtcaactgtttggaacagaggtattagcggaagcagaagagaaagtcaggatcatcagggaaaggttgagaattgcccagtctcgacagaagagctacgcggataaccgtcgaagggagctcacttttgaggcaggagattacgtgtatcttcgtgtcactccgctccggggagtacaccggtttcagacgaaaggcaagttggtaccacgcttcgtgggaccatacaaaatcctggaacgcaggggggaagttgcttatcagttagaacttccatccaacatgatcggcatccatgacgtgttccacgtgtcccaactaaagaagtgcttaagggtacctgaagaacaggctgattcggaacacattgatatccaggaggacctaacatatgtggagaagccggccgaggcccagccaggccgccccgccgcctcctctctcggggtcgccgacaggtggggcccacctgtcgggtccttcccccacctcccgccgatctcgctcgcgccgtcgcgcccgcaaccgccgccgcgccctcgtctccgcctcctccgggccacgtcgaccacacccgcgcgccgcgccgtcgccgccgtcgggttcgcgtggccgagatccaccccgtccacccctcctccgtcgagggcaccccgaagctcgtccgcccgccgacgtcgtcctcccgtggcttgccgtcgccgttcgccatcgtcctcctccgcgccggccaccctcgccgcctccgcatcgcctttgcgccgtcgccttcgccgcccgttgccgtcgccggcaacgcgttcgcgcgcgcacgccgtcgccatcaccgcggccggtaggccggccttgagccaagccgagccgggtcgtcgccgcccgtccgatcgaccccgagggcgatctaggccggcgtaccgatttcaccctcgtcgatttcaaagaagtttgtcgggatgcatgggttaaggaaagaagagcttagcacaccaatgagggttcataccccggaaaatagttcaacctcagtcagttttagcccttcagtgctaatagaaatccaaagatcaccatttctagccaacctcattcttctcgaatccaaagacctagatgtcattcttgggatggattggctaaccaagttcaagggaatcattgattgtgcgaatcgcacagtcaccttgaccaacaagaagggagaaacagtagtgtacaaatcaccagactcaccaaagcaaggggtctccttgaatcagattgaagcggaaatcccagtggacaccgtggagaagaacttgagggaattggaagatatacccatagtctgcgagtatccagaagtgttccccgaagacctcactaccatgccacccaagagagagattgaattccggattgacttggcaccgggaaccgctccaatttacaagagaccatatagaatggcggctaatgaattagccgaggtcaagaagcaggttgatgagcagctgcagaaagggtacattcgaccaagtacttcaccttggggtgctccggtcatttttgtggagaaaaaggataagacgaagaggatgtgcgttgattatcgcgcactcaacgaggtcacaatcaagaacaaatatcctttgccgcgaatcgatgatttgtttgatcaactgaaaggagctaaagtgttttctaagatagacctgcgatcaggctaccaccagttgagaattcgggaggaggatattccaaagacggccttcaccactcggtacggattatatgagtgcacggttatgtcgttcggacttaccaacgcacccgcattcttcatgaatctgatgaacaaagtgttcatggaatttctggacaagtttgttgtggtattcatcgacgacatacttatctattcaaagtccaaagaagaacatgagcaacatctccgcctggtactcgagaagttgaaggagcaccagctatacgccaagttcagcaagtgtgacttctggttgacggaagtcaaatttttgggccatgtcattacagctcagggtgtggcagttgacccatcaaacgtagagtcagttaccaaatggaccccaccgaagaccgtgtcgcagattcgaagttttctaggactggcaggttattaccgccgattcatcgaaaacttctccagaatcgcccgacccatgactcagttgcttaagaaagatgagaagtttaaatggacagttgagtgcgataagagttttgaggagctcaagaagaaattagtatccgcaccagttttaattctgcccgaccagatgaaagacttccaagtctattgcgatgcatcccgtcacggacttggatgtgtcctaatgcaagagggcagagtggttgcgtatgcctcgcggctgttgcgtccacacgaagggaattatccaactcatgacctggaattggcagcagtggttcatgctttgaagatctggaggcactatctgattggcaaccgctgcaaagtatatacggaccataagagtctgaaatacatcttcacccaaccggacctaaatctccgacaacgaagatggttggaactaatcaaagactatgacatgagcattcactaccacccgggtaaagccaatgtggtggcagacgcgttaagcaggaaaagttactgcactgccctatgcatcgagggcatgtgtgaagaattgcggcaggagtttgagcatctcaacgtgggaattgttgaacacggttttgtagccgctctggaggcatggcctacgctcgtggatcaagtcagagcagctcaagtaaatgattctgaaatagcagagctgaaaaagaacatgagagtcggaaaagcccgggatttccacgaagatgagcatggcacaatctggttgggagaaagattgtgtgtacctgacgacaaggaactgaaggatctgatactcaccgaggctcatcagacccagtactccattcatccaggcagcactaaaatgtatcaagacctcaaagaaaagttttggtgggtcagcatgaggagagaaatagctgaattcgtcgcactctgcgatgtttgccaacgagtgaaggcagagcaccaaagaccagcaggtttactccaacctcttcaaatcccggaatggaaatgggaggagattggaatggactttataacaggactgccccggacatcatcgggtcatgattcaatctgggtagtcgtggatcgactcactaaggttgctcacttcataccagtacataccacgtatacgggcaaaaggttggcagagctctacctctcgagaatcatgtgtctacatggagtacccaaaaagattgtatctgatcgagggagtcagttcacctcaaaattctggcagaagctgcaggaagaattggggacccgtttaaatttcagtacggcctatcacccgcaaactgatggtcaaaccgagcgagtcaatcaaatcttggaagatatgttgagagcttgcgctcttgattttggtggagcttgggacaaaaacttgccatatgcggaattctcgtacaacaacagctaccaggccagtctacagatggcaccgtttgaagctttatacggccggaagtgccgcacacctctcttctgggatcagacaggtgagcgtcaactgttcgggacagaggtattagcggaagcagaagagaaagtcagaatcatcagggaagggttgaggattgcccagtctcgacagaagagctacgcggataaccgccgaagggaactcacttttgaggcagggattacgtgtatcttcgtgtcactccgctccggggagtacaccgttttcagacgaaaggcaagttggcaccacgcttcgtgggaccctacaaaatcctggaacaaaggggagaagttgcttatcagttagaacttccatccaatatgatcggcatccatgacgtgttccacgtgtcccaattaaagaagtgcttaagggtacatgaagaacaggctgattcggaacacattgatatccaggaggatctaacctatgtggagaagccggttcatatacttgataccagcgaaagaagaactagaaacaaggtcaccaggttttgccgagttcagtggagtcaccattcagaagaggaagcaacctgggaaagggaagatgagttgaaagccgcccatccgcacctcttcgccagctcctccgaatctcggggccgagattccgtt

SEQ ID NO: 98369 - DNA, 144 bp, Oryza sativa
  Clone ID: PAT_MRT4530_96282C.1
gccttcctactgggtcttcgggttcttaacctttcctacaactatagttcaatcaccattcaataatacatcagcagcaagctcaagtcatttgcatcaactacagtatccatattacacaacagcagtctctcgcaatctact

SEQ ID NO: 98370 - DNA, 5484 bp, Oryza sativa
  Clone ID: PAT_MRT4530_96283C.1
atggaaagacctaagagccctctgaatccttttcattgcatatgttctttgcaattggattttgttccgggaaaatggggatctgttcttatggttcaagggaaaaatcttggtcgctcgtttaaaatggccggtcacccacccaaccaccgcggagaaggcatgattgatttcgtggcagagttggcacgcatgaccctggtggtgggctaccccgacgcgccggagtacacgacgattccgccgctcagtggcgagcttcctcaccgtgtccgcttggaggtccatggttacgtggggacttgcctcgctaacatggcggtcgaggcatctggaggcacagcagatcacgcctgtcaggaggcagcctacttgatgatggccagactacgggagcgccacgactacatcttccacgacacggcgtaccgctaccacccccgtcgagcccatggtgatggcgtcagctccttccgtccgacagctggcgagaacgacaccaccttcggtcacatgtgtgctgtgatgaggggattggaccggatgcactcggacctgcacaaggcgaccaaggccttgaatgatgggaagctcatgaggatcgtcgctctgaaggacgagatagcgcgcctgaagaaggagaatgctcagttgaagggtcttccagcaccaggaggagtccggatccgcactacgccccgtaagaggacgactgcacccgtgcgcatccagcttgcgcccaggaacccacctccaccagcagctcccgcagcacctccagttccgcccgcagctccggcagttcccgcagttcctccagctccagctccagctccagctcccgcgttcactctctccttcgctccagcatcagccgccagaggtccagccagtggtaccggaggttgcttgtttgggatggtctacaccaggactggcaaccgcacgacaggcgagggcagcaacggcgaagaacgcgtggatggtgtgcaccccaacagtgattctggcaatggtccgccaccacttcccgagaatccgacgcttgcccaagttatggcacaccagactcagatgatggcagccatgatgcagcagatgcaacagcagcaccagcagatgcaccagaggatgatgcagcacgccgaacagcagcaccagcagtttggtccccctccccctcagtccaagttgccggagtttctacgtgtcaggccacccaccttctccagcaccaccaaccccatggaggcaaatgactggatccatgcgatagagaagaagctgaatctcctgcagtgcaatgaacaggagaaggtcgctttcgccacacaccagcttcagggtcctgcgtcagcttggtgggacaaccacatggccacccgcccaccgggtactgaagttacatgggcagagttctgccgtagcttcaggaaggcacaggtgccagacggggtcgtggcacaaaagaagagggaattccgggcgctccatcagggcaacaggactgtgacagagtacctccatgagttcaatcgcctcgcgcgatatgcaccagaggatgtccgcaccgacgccgagaagcaggagaagttcatggcgggtctggatgacgagctgaccaaccaactgatatctggggactacgccgactttgagaggctggttgacaaggcaatccgtcaggaggatcagcgcaacaaaatggacaggaaaagaaaggcggcgcagttccggtccaaccaaggtagtcagcaccgaccgcgcctcactcccggacagcagggtggacctaccaccatgattgttcgtcaacaccgcccattcaaccccagcaacttccaccagggcactagtggcagtcagaaccaccatggaagtcagcccaaccgcggtacagctccacgcccaccgatggcaccggcacagtcaggccagcccgcacaagccaagaaggagacgggagcaaaaccagggtcctgcttcaactgtggcgagcttggccacttcgctgacaaatgcccgaagcccaggcgtgccggaccaaggtttatccaggctcgtgtcaaccacgcatctgcggaggaggcacaagcagcaccagaggtcgtactgggtacgtttcctgttaactcaatccctgcaacagtactttttgattctggtgcaacgcattctttcatctccaagaaatttgtcgggatgcatgggttaataagagaggaacttagcacaccgatgcgggttcataccccagggaatagctccacttcggttcaattcagcccttctataacaatagaaattcaaaggtcaccgtttctagccaacctcattcttctcgaatccaaagacctagatgtcattcttgggatggattggctgaccaagtttaagggggtcattgattgtgcgaatcgcacagtcaccctgaccaatgagaaaggagaaaccgtggtgtacaaatctctagtctcgccaaagaaaggagcctcgttgaatcagattgagacggaaatcccaatggacgccgaagagaagaacttgagaaaattggaggacatacccatagtctgcgagtatccagaggtgttccccgaagacctcaccaccatgccacccaagagggagattgaattccggattgatttggcaccaggaaccgctccaatctataagagaccgtacagaatggcggccaacgaattagcggaggtcaagaagcaagttgatgaacagctgcagaaagggtacatacgaccaagcacttcaccttggggcgctccggtcatttttgtggagaaaaaggataagacaaagaggatgtgcgtcgattatcgcgcacttaacgaggtcacaatcaagaataaatatcctttgccgcgaatcgacgatttatttgatcaactgaaaggagctaaagtgttctctaagatagacctgcgatcaggctaccaccagttgagaatccgggaagaggatattccgaagacggccttcaccactcggtacgggctatatgagtgcacggttatgtccttcggacttactaacgcacccgcattctttatgaatctgatgaacaaagtgttcatggaatttctggacaagtttgttgtggtattcatcgacgacattcttatctattcaaagtccgaggaagaacatgaacaacatctccgtctagtactcgagaagttgaaggagcaccagctatacgccaagttcagcaagtgtgacttctggttgacggaagttaaatttctgggccatgtcattacagctcagggtgtagcagttgatccatcgaacgtggagtcagttaccaagtggaccccaccgaagacagtgtcgcagattcgaagttttctaggactggctggttattaccgtcgtttcatcgaaaacttctcaagaatcgcccgacccatgactcagttgcttaagaaagacgagaagtttaaatggacagctgagtgcgacaagagctttgaggagctcaaaaggaaattagtatccgcaccggttttgatcctgcccgaccagacgaaagacttccaagtctattgcgatgcatcccgtcacggacttggatgtgtcctaatgcaagagggcagagtggttgcatatgcctcgcggcagttgcgtccacacgaaggaaattatccaactcatgacttggaattggcagcagtggtccatgctttgaagatctggaggcactatctgatcggcaaccgctgcgaagtatatacggaccataaaagtctgaaatacatcttcacccaaccagacctaaaccttcgacaacgaagatggttggaactaatcaaagactatgacatgagtattcactaccacccgggtaaagccaatgtggtggcagacgcattaagccggaaaagttactgcactgctctatgcatcgagggcatgtgtgaggaattgcgacaggagcttgaacatctcaacatgggaattgttgaacacgggttcgtagccgctctggaggcacggcctacgctcgtggatcaagttagagccgctcaagtaaatgatccggaaatagcagaactgaaaaagaacatgagagtcggaaaggctcgggatttccttgaggatgagcatggcacaatctggatgggagaaagattgtgtgtaccggacgacaaggaattgaaggatctgatactcaccgaagctcatcagacccagtactccattcatccaggcagcactaaaatgtatcaagacctcaaagagaaattttggtgggtcagcatgaggagagaaatagctgaattcgtcgcactctgcgatgtttgccaacgagtgaaagcagagcaccaaagaccagcaggtttactccaacctctccaaatcccggaatggaaatgggaggagattggaatggactttataacaggactgccccggacatcatcgggacatgattcaatctgggtagtcgtggatcgactcaccaaggtggctcactttataccagtacataccacctatacgggaaagagattggcagaattgtacctcgcaaggatcatgtgtttgcatggggtacccaagaagatagtatccgaccgaggtagtcagttcacctcaaagttctggcagaagctgcaggaagaattggggacccgtttaaacttcagcacggcctatcacccgcaaactgatggtcagaccgagcgtgtcaatcaaatcttggaggatatgttgagagcttgcgctcttgattttggtggagcctgggacaaaagcttaccatatgcggaattctcgtacaacaacagctaccaggccagtctacagatggcaccgtttgaagctctatacggccggaagtgccgcacacctcttttctgggatcagacaggcgaacgtcaactgttcggaacagaagtattagcggaagcagaagagaaagtcagaatcatcagggagagattgagggttgctcagtctcgacagaagagctacgcggataaccgtcgaagggagctaacttttgaggtcggagactacgtgtatcttcgtgtcactccgctccggggagtacaccgtttccagacgaaaggcaagttggcaccacgcttcgtgggaccatacaaaattttggaacgaaggggagaagttgcttatcagctagaacttccatccaatatgatcggcatccatgacgtgttccacgtttcccagttaaagaagtgcttaagggtacctgaagagcaggctgattcggaacacatcgatatccaggaggacctgacatatgtggagaagccggttcgcatacttgataccagtgaaaggagaaccagaaacaaggtcacccggttttgccgagttcagtggagtcatcattcggaagaggaagcgacctgggaaagggaagaggagttgaaagccgcccatccgtacctcttcaccagctcctccgaatctcggggccgagattccgtttaa

SEQ ID NO: 98371 - DNA, 377 bp, Oryza sativa
  Clone ID: PAT_MRT4530_96284C.1
ttttggtttttattatttttcatttttattttttttttatcaatattattaatccaagtacatatactaaacactttgttataaaggaaagaacccaacaattcatccccatattcataaacacaaccaacagggggggtatgatggttcttcaggggatatgataaaaaagaccctaaggagccaacaggtcaaacaattgaaaccaaacagaaaaatagagctattggaaaccaacagaagaaggcgcaaagccactagttccttctgcagcccgaaaagctaaggccgataaaaaaaatggggcgcctcaacgtccgcaccaggaaataagagaagtgtaggatccaaaaagatgaagacccctggggcccccc

SEQ ID NO: 98372 - DNA, 360 bp, Oryza sativa
  Clone ID: PAT_MRT4530_96285C.1
atggacaaaggggagaggggagaggctgccacgggcgtcggaggggagagggagagctccggccaccggcgaggccaccaccatgagctcgctgccgcgttggagggggagctcgaggtggctgggtccttgggggcgtctgctgccgcgccaacctcggggtcgtcgccgcccgcttcggggtcctccgccgccgtgcccgcctcggagtcgtcctccgccaccccccccccccacaacccccgaggtcccctgctcatcagcgccacggaggaagcgcgacggcgaggagggagggagagccgcctccccgcttcggccaccttccgccccggcgccgttgccgagaaggacgcggcg

SEQ ID NO: 98373 - DNA, 1515 bp, Oryza sativa
  Clone ID: PAT_MRT4530_96286C.1
atggagcgtgagtttcatcattattttaaagatgcaagtttgatggagcaaagaccgattgattattcatcggtcacttgtgatactatttcggttacacctattgctaagaccggaattgttagtcatcccctccctattagtcctactgatttagacaaagagaaagtagtgattcggcctagtcaagccgaatccacaaaagggaaaagtgttattattggggatcctcgacccaagactaggatcaataatgcgaaggccaaagatcataaagttgcaaataatgagtcatctagtttccaaaagaccaaaaagccgaagctcacttttgagatgcttatggctaagtacaagaaaggattagcctgtcaacgagataatcgaactagtgattcgaaaagaccaagatcatctcgtaggaagagatttggtcaaacgccaaaacaatcggagccatcaactatgccaactccatacaaacctccggttgcgatgccatggtatccatatccaatgtcactatacggttatccttttatgtattatatgccatggatgcctcaatcacctatgccgtttcatcaagaatggaaggaatcacctaggacagtaccaagtcattcatctaactcaagacaagactgtttcccacaaaagaatcaatccggtggatcaaaggtgaaaaatgtgaagaaggtgggggtgaggaaagaagccaaagctccggaggtcgttactatcaaggaggagtctcaagatgttcaagtacctactagagatgcgatgaaaattatacaagcgcagaagactggagccagcaccgtgactgccaacaatggtggtctgaccgggacatctggatggtctgactggcggcttactatcgggtatcggttcgtgctagttgcaatggattacttcactaagtgggccgaagccatgccgctcaagaatattacttacacggaggttaatggacaagccgagtcgagtaataaaacattgttgaaattagtcaaaaagaatattgaagaacaccaaaagaagtggcatgaggtgctttcggaagtattatgggctcataggatatctaaacatggtgctaccaaagtcactccttttgagttggtttatggacaaaaggttgttttgccaattgagagaacaatcaatggaaaatacttgaagaaatacttccttagcgtttggcaagatgcttatggagtcccgtggccggttcacaatgttcaccaaaaaggcagggggcatgtgtttacacccaaatttggcacctatggacgaaatagggaaaaactgccaaagtttggaaagtgcccggtttcctttacagggccggtcagaccgcagggcagttatgacgattgtgagaaggggaaatgtccgaactgccccgcaatcgtcattgggagagcatctggagcgtccacgccaaaccccaggatcaacgatgttggcggtatagaatcggcatttaacaaccgccaacagtag

SEQ ID NO: 98374 - DNA, 214 bp, Oryza sativa
  Clone ID: PAT_MRT4530_96287C.1
ttatataaaaaaaaaagaaccattaaacctacaaggagcagtattaaaacacacaaggggtcccaatccacgcaaaagagttcagattcccttttgggcattgttcctgggcttcgatggttacccacgctcggtcttcctcgagctcgggacctatccgggatgcttcctggtgataggcgccgatttttcccagggttcttcctttcatgcc

SEQ ID NO: 98375 - DNA, 376 bp, Oryza sativa
  unsure (1)..(376): unsure at all n locations
  Clone ID: PAT_MRT4530_96288C.1
gccacgcgtccggggtaaacagcttgggctgatttgggaatcttgatgtttggtgttgtggcagcagaatttgttgctcaatcagactagtatacatgctctggacagagcatatggccatttatgccatggcagtcaagggaggtgccaatatcaatgatgaaacaccttgcaagatttatttcctttgcaaccatgtacattggccccttggcgttcggcagctgctcatgcgaattgtgttngagagcttatcagttcggggtgatgggtgtgatgggcttgtatttgaagtctttattgttgttccctgcttttttgtgggcaggttcccatactgcccactggcctgttgcttcttcgggggggtcatttg

SEQ ID NO: 98376 - DNA, 2925 bp, Oryza sativa
  Clone ID: PAT_MRT4530_96289C.1
atggacaagtccagcgccctcgagtacatcaaccagatgttccccaccgaggcgtcattatcgggcgtcgagccgctgatgcagaagatacagagcgagattcgccgggtggacgccagcatcctcgccgccgtccggcagcagagcaactctggaaccaaggccaaggaagaacttgctgcagcaacaaatgctgttcaggaactgatgcacaagatacacgagataaaaactaaagcagaacaaagtgaatcaatggttcaggaaatctgtcgtgacataaaaaagctggattgcgcgaagagacatataacaactacaataaccgctcttcatcgtcttactatgcttgtttctgctgtcgagcaacttcaggtcatggcctcaaaacgtcagtataaagaagcagctgcacaactggaggcagtaaaccagttgtgcagtcattttgaagcatatagggatgtgccgaagataacagagctcagagagaaattcaagaatatcaagaaaatcctcaaatctcatgtgttttctgattttacaagcttaggaactgggaaggaaactgaggatgcaactctattgcagcagctatctgatgcttgcttggtggttgatgctttggagccctctgtgagggaagaactagttaagaatttttgcagcaaggaacttacctcatataagcagatctttgaaggagcagaacttgccaagttagataagaccgaaaggagatatgcatggattaaacgtcgtctacgatcaaatgaggatacctggaaaatatttccaccttcttggcatgttgactatctattgtgcattcagttctgtaagattacaagggcccagcttattgatatccttaacaatttgaaagaaaagccagacgttgcgactttgttattggcattacagagaacccttgaatttgaggaagaattagcagagaaattcagtggtggggtgacgacaactcggaataaagagtcagcgagtgatgatgaaaatgaggacactgggcgtaataaaattgtttcagacatacggaagaaatacgagaaaaaactggcagtgcccaatgatgaaattggacatttcaacttccatggaattatatcatcttgttttgaaccatacatgagtgtgtacatagaacttgaggagaaatctctagtggatcagttagataaacttatccaggaagaaaaatgggagacagaggaagggagtcaaacatatattctgtcaagcagcatgcaggtgttcttgataataaggagaagcttaaataggtgcagtgcattaacaaagaacgagacattatttaacttgttccaggtatttcaaagagtacttaaagcctatgcatcgaagttatatgccagattaccaaaaggtggaactgggattgttgcagctgctactggtactgatgggcagatcaggacctccgacagggatgagaaaatgatatgctatattgttaacactgcagaatattgtcaccagacaaatgccatattgttaagtgatagtaatatgaatgaatttaataatgccaaactgctcatgcatatgtctggtgagctagctgagaatgttgctaagatgattaacccccactttgctgacaaagtggacatctctgaagttcagatccctaaacagcagcaaaacgaaaaataccaagtgcctcaattcgatcaatcaacgattaaaaatattgagtctgcaaaaggacttgatgtgtgggacagctggccgctgcaaaacgctgacggaacagtagctgaatacaacggctatcacgttgtgtttgctcttgcgggaagcccgaaagacgctgatgacacatcaatctacatgttttatcaaaaggtcggcgacaactcaatcgacagctggaaaaacgcgggccgtgtctttaaagacagcgataagttcgacgccaacgatccgatcctgaaagatcagacgcaagaatggtccggttctgcaacctttacatctgacggaaaaatccgtttattctacactgactattccggtaaacattacggcaaacaaagcctgacaacagcgcaggtaaatgtgtcaaaatctgatgacacactcaaaatcaacggagtggaagatcacaaaacgatttttgacggagacggaaaaacatatcagaacgttcagcagtttatcgatgaaggcaattatacatccggcgacaaccatacgctgagagaccctcactacgttgaagacaaaggccataaataccttgtattcgaagccaacacgggaacagaaaacggataccaaggcgaagaatctttatttaacaaagcgtactacggcggcggcacgaacttcttccgtaaagaaagccagaagcttcagcagagcgctaaaaaacgcgatgctgagttagcgaacggcgccctcggtatcatagagttaaataatgattacacattgaaaaaagtaatgaagccgctgatcacttcaaacacggtaactgatgaaatcgagcgcgcgaatgttttcaaaatgaacggcaaatggtacttgttcactgattcacgcggttcaaaaatgacgatcgatggtattaactcaaacgatatttacatgcttggttatgtatcaaactctttaaccggcccttacaagccgctgaacaaaacagggcttgtgctgcaaatgggtcttgatccaaacgatgtgacattcacttactctcacttcgcagtgccgcaagccaaaggcaacaatgtggttatcacaagctacatgacaaacagaggcttcttcgaggataaaaaggcaacatttgcgccaagcttcttaatgaacatcaaaggcaataaaacatccgttgtcaaaaacagcatcctggagcaaggacagctgacagtcaactaa

SEQ ID NO: 98377 - DNA, 1091 bp, Oryza sativa
  Clone ID: PAT_MRT4530_9628C.1
aaagtcccttttccctccctctccctcttgggccggctcggcccatctccttccccctccctctcctctccccgcggcccatccggcctctccccgcgcgcgcgccgctgacgggcgggcccgcccgccaccctcgctgacgggtggggcccacccgtcattcccttcctcccgctgctcccgccgcctcgcccgcgccctagcgccgccgccgccgcgaatcccgccgcctcccgccgtccccgcgcgcaataaagtgggggaattattccccgggatcccctccccctttccccccatttttccctccctctctccctcggattcgtttggaaacctctcccctaacctcgccggcgccattaatggtggccgggtctcccgcacctattccttccccgccggccgctctctcccccttccaaccctatttaaaccctccccgagctccccaccaccgtttccgccactcgccgccctctctccccgccggaatcgagctcgcgccgtcgctctctctctccgccgtcgccgctgagctccggtccgccgccgtcgttgccccagaccacctcccacctcggcgccgcctccttcggcttcgccgcatcctcgccgacctcgtccacctctccgtttcggtcgccgaccgccggagcaccgtcgaccccgtccacccgagccgcgccgccgccttcctccgttccggtcgccgtttccgtcgtcgccgtcgacccggggtgagccgtggaccgccgcttcgtttccccctttccctcctctctctcggccgccgctccgccgtgcctatggccgctgccgcctcccgccgctgcgccggcgtggccgccttcgggcgcaccgagcggctgccgcatggggcccggccgtcagccgcccgcgccctcgggtgcggctgacgtgtgggacccacggcgccggccggtgtgagcccgggtgcgcccggtccatcgtggaccgtgaggctgccgcgtgggccccactcccgtggacccggtccgcgcgccccctcccctcggcttgttcaccctagaataaacaaaaccccaactagtgggcactctactcat

SEQ ID NO: 98378 - DNA, 859 bp, Oryza sativa
  Clone ID: PAT_MRT4530_96290C.1
ctagcggcgaatcagcccacagggtggatttgcacgcgggtaaccaccggatctgctgcgggaagctaccgccgccgccgctgtatcggcccctgagaagctgccaccaccgttggtgctgccgcatttgcccgcggaagccaccgccgccgttgtcatcgccggatccgcatgcaggaagttgccgacagtgccagaaaccgtgaactgctccaatccaatgggacattgcatatccatgctgcgaaagatgacaagaaggcggcagccggagccgacgcgcggcacgccgaagccgccgctctttgtcgtcagaggcgaccgccggccgccgctgcggtcgaagccggaggcgctaccgttccaggcgcagagctttggccagttacagttcgcccagaaacctgctgcaggcagagcagacagcagcagatcaggacatgagacgaagttcaggcacgaagttgatccaggagtgctggacaggaggcgctgcgcaccgaagctcgtcaggctgccgtgccggagcacctgcagcacttcggcggtggagcccgtcacggcggaggagaggcccctggccccgtcggcgacaaaggcgccgccgcaggaggggagcaggacgccgatggtggcgccgccgatgacgccgatgaggccggtgtggcagcggaggatactgatggggatgcggtgcgagctgccgcggttcagcggcctcatcctgtacgacgagcatggccgcccaatccgtggcaccacgcctggcagaagctacccccagatatatcatagattcagagctcagtggaaaaagaggaatgccaaggctgctacaacactcagggacctcctatag

SEQ ID NO: 98379 - DNA, 1992 bp, Oryza sativa
  Clone ID: PAT_MRT4530_96291C.1
atgccgatcgagctaccgcgggggctgcccttcgccgtggacacgtggacggccgcctccgccgtcaagcgccaccgcttcctgacccacgcccaccgcgaccacatcgccggcatcaccgccaccaacgtcgccgccgtctacgcctcccgcctcaccatcctcatcgcctgccacatcttcccccagctcgatcgcgccgacgccttcgtggaggtggagctgggcgcgccggtgctcgtcccggaccccgacggcgacttcaccgtcaccgccttcgacgccaaccactgccccggcgccgtcatgttcctcttcgagggcgcctccttcggccgcgtccttcacaccggcgactgccgcctcacccccgacttccgcttcctcgccgccgactacgtcttcctcgactgcaccttcgccgcctgctctcttcactttccctccaaggacgactccatccgccaggtcatcaattgcatctggaagcaccccaatgcaccggtggtttatctcgtgtccgacatgcttggccaagaggagatactcatggaggtgtcaaaggtgtttggatccaagatttatgtagacagggacaagaattcagagtgttatcacaccctctccctcgtcgcgccggagatcctcaccgacgactcgtcgtctcgcttccaggtgattggtttccccaggttgtcggagcgagcaacggagatgctcgcgttggcacgggcgaagcaccagcctgagccactcatcatcagggcttcttcgcaatggtacgcgtactatgagccaccagagggatcgaccaagaggaaaccggcactgacagagccaatgcgcgatgaattcggggtgtggcacgtctgcttctcgatgcattcgtcccgcgaagagctggagcaggcgttgcggttcatccagcccaaatgggtcatctccacaacccctccatgtatggcgatcgagctgtcctatgtcaagaagcactgcttcgcgtcccggttacgcaatgatgatcccctctggaagctgctcaggttgtctgatggaaattctgcagtttcaggatcaccactggctgtaccaactgtagagatgatcaagaaatgtgaggaggaagaggtcacttgttctgtcaaggactctttcagttctgatggtatcaggatgcgggatcaagaaccaactctggaagactttgaaatcaacgtggagccacctgtgacactgttcgggatagcgaggtttggattgacagaggaacctgaattgtggaaggatgagcatgagagtgtcgaaatcgacgagcttaaagtgcagatggagaattcagctacagaatgtgagcagtggaaggatggcatatctgtcttaggctctgaagtaattgattcagttgaaattgtggccaaagagcaggactcagcaatagaatctgaacagttgaaagattgcgaacctaaagatggaaccaaagcaactgatgtaactgaagttgaagtgaatgagcacacatcatgtacagaatctgtactttggaaaatggacagaagtgatgagtgtgtgacaactaagagaggtgaatttgaagctgaagaacagaaattcactggcagataccagttttggaaaatatgcaagcccaaggagatggagggtgctaaattgactgtacaaggtaaaaacactgttgaagcacttgatcaggttttggccatcgatcgtctagcctacttgcatgacaacaaccaagaggtaacaaaagagggtattgctccatcagaaactgatcaggagaactctaaagttcctgacaagggaagcagtgactcctcgaatgctattggatcatcaaaaggtctgaatgccaacctgagaaagctgtacaggtcgatgaacgtgccggttcctcgtcccctgccctcattagttgagctcatggcagcctcaaagcgaccaagggtttctcctgctgtgcagctgtag

SEQ ID NO: 98380 - DNA, 749 bp, Oryza sativa
  Clone ID: PAT_MRT4530_96292C.1
aaaacggataatgccgccgctccgccttctcccgctcctcctcctcgccgccgccgccgcagcactcgacccccccgaccccgacgccgtggccggagcagttccacgcggtggtattcaccaacctcacggggagcggcggccggctgcggctgatcgacctctattacgactggccgcgggggcgcaacctcaacctcatccgcggccagctctccggcgacccgacctacgacgtcgagtggaccaatggcacctcctacttcttcaacgccacctcctgccgcaccaagctgttccccgtcggcctcctgccccccgactggctcgccgccggcgccgtctacctcggccgtgagaccgtcgccggcttcgactgccacctctggaccaaggtcgacatcctctggtactacgaggacgtcgtcacccaccgccccgttcgctggaacttcttcaatggtatgcagcagcatgtgatgagcttcgaggtgggtggagttcttgaggactccaaatggcaggcgccggctcgctgcttcagcgatcaacacaccgtcatcgccgatcccggtgcagccaccgtcaccgacgacagggtagaaggtgaggatggcaagctcgatgtgatgaacgccttcttcagcaatatgaaaatgttgtgtgctaatatgacagagaatgtcaagtttggttcaagttctgattgcaaagcaaatccagaaacttttgatctacaaagaatgtga

SEQ ID NO: 98381 - DNA, 960 bp, Oryza sativa
  Clone ID: PAT_MRT4530_96293C.1
atggcgactgagtgcttagggtttcaagagagggcgactccagtgggagagtcctcgtcggtcctcccccgccggcgatcgccggagaagggtctgcctagaggatacacccacgcggatatcctcacggtagctgcccgtggtccagttagttctggcgcaaaaatttcgggtgaatttgcacacgaattccggcccgagagacctagcaatggcggtgggagcccgatggctacagtgcagcccagagtcgcgagaggcccagcgagttccacgatgatgaattgcggaaaaaaagtgggtgagattaatttggaggatattttccccaaatttcgccccactgagccgcaaaagtggatctggatcaagcgaggtgaggttcgccctcttctagggttcccggcgagagacgacgagatccggcgttttggcgacggagctcgtcggatttggaaggtgcccgagaagaggtgtgatcaccgcaccttcgcccaggttgtgatggagcgtcgtcctcccaatcgcctggattggcaagccaacaagcgacgagcgacagagcaaggcggcggcgattggggtgcacgaggcggaggtgactggggggcgtgcggagctcgcgaggaggaggaactgcatcggcaactccttgctcaaaaccctagggcgaatcaaggtgctcaatggaaacctcaagggctccctggtaccgatggagagaggggggcaagagctcctaagatcaagtgcttcaagtgtggtcgtgagggccatcaccaggcggcgcgccctaacccttccctctgctactcgtgccatagctcaggtcatatttcttcccaatgccccttgatgatgagaaagggtgttaaactttgtggttttggcattccgggacaggggttctatagtttgaatgttgagttgtctgatatgagattgctaaagcccctgtga

SEQ ID NO: 98382 - DNA, 390 bp, Oryza sativa
  Clone ID: PAT_MRT4530_96294C.1
ggggcggttgctcagactcttggaccactacaaccgaaacacccgggaggcccgacagcgcttcagcctgcggatactgaggacgatttcgacgacttgcaggagaggcaacaaacaggtacacggcagcactactggagaggtctgcacggatccgggtctctgacacacgtaaccataatcacgagaacagcgccgtttgccaagatcaatgagatgcaaaaacgaagcacacgatgatgattgatacagaaccgctcaaagaggcaggtagagccacttgaacatacacgatcaatggactgactgtctctgtaagcctatactgcagactattgatggtcatcccaaggagtcaaaaatacccaccaaagcatactatgctgtggc

SEQ ID NO: 98383 - DNA, 275 bp, Oryza sativa
  Clone ID: PAT_MRT4530_96295C.1
gcgagggaaggagacacaggtggcacccctggtggccgcggaatgacggttgtgcccctggtggcgaggggtggcgtggggggcaggacggtaaatctgcagtggagggggaggcgactgggcggtgagctgatgagggaggggggcagactggtcgctgacacgtcgtcggcgagcgcattgaccgttcctcccctgccacccgccacgtggcccgtcgcctgtcacgatgtcacatgccccgccctactgtcctctcctgccctgccctaccg

SEQ ID NO: 98384 - DNA, 151 bp, Oryza sativa
  Clone ID: PAT_MRT4530_96296C.1
accaaacaagagagcgttttttatcccccttaattaagctccctcccatctatatcctttgaccccgctgcttccatgaagatctttattctcctttaattctgaacatcaaaatatcaccatttaaattacccctttacccatgcataca

SEQ ID NO: 98385 - DNA, 860 bp, Oryza sativa
  Clone ID: PAT_MRT4530_96297C.1
atgacgtcaccgacggcggcggcggctcggcaaagaagacggctcgggcggcggacactcgccggcgaacggcggcactaggacgcaaacggaggacaccaacgggtagcggacggcacggcgaactcaccgacgaccaaggcgacggcggacgaccaacggacggcgacggcgacgaggaggaagcggcggctaccttcggcttgacgacggcgacgatgctccggcggtctccgacggcagcgaaggggcggacgaggacggcggcgacttggcgatgacgacggcggccttcccgagtgacggcgacggctggaacgacggcggcgcacggctggagcggcggcggcgacagcgaagctagggcgcacggcgctaggacgactccggcgacgagaggcgaaggcgagggtggcggcgagaagagaagagcacggggatccttttaaaggggctcggaggcggtggcgaaggcccacggcgacggcaacggcgaaggaaaccttcgggaagaacgaatccgagacgaactcgaatccaactcattccaaaccgattgagccaaagattccaaaggagaaaaggtagaggagatcccggagatcatttcccctctattgattcggccggagaaggaaaggaacggccggattggaaaggaaacagcggcggcggctcggcggcgcgaaactagggtttcggcccgaggaagacgacgggcctgacaggtgggacccacctgtcagcggctgcgagggcgcgcgcgcgcgcgggcggctgcggactgggccggactgggccgagaagagagagaaggcggttttgggccgactttcggcccaaagccaaaagaagacttt

SEQ ID NO: 98386 - DNA, 840 bp, Oryza sativa
  Clone ID: PAT_MRT4530_96298C.1
atggcgcgccgggtgctggaggtgacgctggtctcggccaagaacctcaagaaggtgacgatgttctccaagatgcgcgtgtacgccgtggcgtccatctccggcggcgacccgcgggtgccgacgcaccggacgcacgccgaccgggagggcggccggagccccatgtggcacgcgccgctccgcttccccatccccgacgccggcgccgacatgcgcgccatcgcgctgcacgtgctgctccgcgccgagcgcgtcttcggcgacagcgacgtcggggaggtgttcgtcccggtcaaggacctcgtcgccgcggcgcccgagggcggcgagcacaggcacctcagctaccacgtgcgccgccccgtcagcggccggaagtgcggcgtgctccacatatcgtaccagatcaccgacgaagccgccgagccggcgtccgccgccggcgcccgcggcgcgtcgtcgacgcggcatgtcagcgggaagggcctccagctcagcgcgatcaccgcgtacccgtcggccgggcgccacagcggcggccgccgcggcgcggcgcagtcgccaacgctggcgtaccaccacggctcgccctacggcggcggcggcggcggcgcgcacgcgcagcaccaccatcaccaccaccaccattacgggtacggctatggcccagcgccgtacggccatggcgcggcgagtcacggcggtggaggagggatggggatgggggcggggctcggcatgggggtcgtcggcggcgcggtcgcagggatggtgctcgccgacatgctcgccgacggcgagatggacacgcccttggacgccggcatgagctgctga

SEQ ID NO: 98387 - DNA, 872 bp, Oryza sativa
  Clone ID: PAT_MRT4530_96299C.1
atgacgtcaccgacggcggcggcggctcgacgaggcagacgactcgagcggcgcacgctcaccggcgaacggcggcgctacggcacgaacggaggacaccaacgggtagcggacggcacggcgaactcaccgacgaccaaagcgacggcggacgaccaacggacggcgacggcgacgaggttgaaacggcggcggtcttcggcttgacgacggcgacgatgctccggcggtctccgacggcagcgaaagagcggacgaggacggcgacgacttggcgacgacgacggcgaccttcccgagcgacggcgacggctggaacgacggcggcgcacggctggagcggcggcggcgaaggcaaagctagggcacacggcgctagggctactccggcgacgagaggcgaaggcgagggtggcggcgagaagagaagagcacggggatccttttaaaggggctcgggggcggcggcgaaggcccacggcgacggcaacggcgaaggaaactcgcggcttggagagaggaaagccgatccgattcgaactcgaatccatcgatttccaaaccgatttagccgaagtttccaaaggagaaaaggtagaggagatcccggagatcatttcccctctatcaattcagccggaaacggaaaggagcggccggattggaaagcggcggcgacggcagctcggcggcgcgaaactagggtttcggcccgaggaggacgacgggcctgacaggtgggacccacctgtcagcggctgcgagggcgcgcgcgcgcgcgggcggctgcggactgggccggactgggccgagaagagagagaaggcggttttgggccgactttcggcccaaagccaaaagagactttttaa

SEQ ID NO: 98388 - DNA, 583 bp, Oryza sativa
  Clone ID: PAT_MRT4530_9629C.1
cctccgtgtgaaaatatagggtgtatttgtttcgttaggacaaggtttgaccgaagattactctattatgatataatttttaggacgcaaagttaaatttattagattcatattcaaaagtacttgcttatgattatacttttgtatcacataaatcatattataatattgcaacaaagttttgtcctaacaaaacaaaatacgccctatattttggaatagagggagtgcaatattattagccttttgcgtcaaaaaaaatattattagcctgccagctctggtgctgcaaaaagaataaacggtgaggtaatagagggttgagttgagttgggcaaagcctgacagtaattcccataaaaaatagagggttgagttagcctttgattaatacttctactccatgcccatatattttacagtgattatgatgtcaacagaaaatgatgaactatgaattgcattggagcatcatgaattctttgtgttgaggcggaatgctatattaggtaccatttttccatgacaaatatgtacacctccacagattagcaagagttgattcttctctttatgaaatccg

SEQ ID NO: 98389 - DNA, 129 bp, Oryza sativa
  Clone ID: PAT_MRT4530_962C.1
atggcgtgcgtccacgagaacgcgagatgtggacttctccagggcctcggcctacgagagacaagattaggtccctcagcggttttgatggcggttttagctgacgtggtgcctacgtggctcacttga

SEQ ID NO: 98390 - DNA, 918 bp, Oryza sativa
  Clone ID: PAT_MRT4530_96300C.1
atggcgacggcgaaggcaggggcatgcgacgccgggcggcggcggctgaaggcggcggggatggcgatggtggcggggatggaaccggccgcgagcgcgaaggtggtggtggtggtcccgtgtgggcttgtggtggcgacggcacggtgcccggcggcggcggcggtgtcccccagatccgcgcctctcggccggatctggagggtggccggtggcagttggcggcggctgtgcggcgacgacggcgacggtgtggcgacggcagcagcggcagttggcgacggcgacaggacggcggcggcggtcgtggcagttggcggctgcggtgtcggctggcgatggcgccgcatgctggtgaagggcgacggcacaacggcagtttgcggatgcgggggctggcgtcggtggcagcggcgacggcggccgtttatggaggcggtggtgacgtcagcggcggggaaggagtcagctgcgaggcaaggatggcgacggcgaggtggctgggcgttaggtagcagcggctgcggtgatggtgaccgtgtctgcggtcactggaggcatggcggcctcaaacggctagctgagcgcgtgggagacgactacatctggccggcgcggtatcgtttggtggaggggtcggagaccggcttggcgcagagaagtgcagccgatgacagcggaggccggctcggcgcgagaggcgcgggcggcggagatggaggtcggcttggcgcgggaggcgcagctgatggagggagaccggattggcgcgaggcgcgtccggtggaggaggctggcttggcgcagagtggcgcggccggtggtagaggaggcgacctaggtgtgaggagttgctgccggtgggtgtggcgcggtcttcggcgcacgaagactggccggcgggggacgctggtgtag

SEQ ID NO: 98391 - DNA, 327 bp, Oryza sativa
  Clone ID: PAT_MRT4530_96301C.1
atgacgccagcggtgacgtcaccgacggcggcggcggctcgacgaggcagacgactcgagcggcgcacgctcaccggcgaacggcggcgctacggcacgaacggaggacaccaacgggtagcggacggcacggcgaactcaccgacgaccaaagcgacggcggacgaccaacggacggcgacggcgacgaggttgaaacggcggcgcgaaagagcggacgaggacggcgacgacttggcgacgacgacggcgaccttcccgagcgacggcgacggctggaacgacggcggcgcacggctggagcggcggcggcgaaggcaaagctag

SEQ ID NO: 98392 - DNA, 952 bp, Oryza sativa
  Clone ID: PAT_MRT4530_96302C.1
ctacacccaccggcagctctccctcacccctaggtcgcctcctccaccgccggccgcgccactctgcgccaagccggcctcctccaccggacgcgcctcgcgccaatccggtctccctccatcggccgcgcctcccgcgccaagccggcctccatctccgtcgctcgcgcctctcgcgccgagccggcctccgctgtcatcggctgcgcttctctgcgccaagccggtctccgacccctccaccaaacgatgccgcgccggccagatgtagtcgcctcccacgccctcagctagccgtttgaggccgccatgcctccagtgaccgcagacacggtcaccaccaccgcagccgctgctgcctaacgcccagcttcctcgccgtcgccatcctcgcctcgccgctgatgtcaccaccgcctccacaaacggccgccgtcgccgctgccaccgactccagcccccgcatccgcaacctgccgctgtgccgtcacccttcaccagcatgcggctggctgccgccccatgccatgtgcgccacgccgccgctgccgtcgccgcaccgccgccgtcgtcgccgcacagccgccgccagttgccgccggccaccctccagatccggccgagaggcgcggatctgggggacactgccgccgccgccgccgaggagcaccgcgccgttgccaccacaagctcacacgggaccaccaccaccatcttcgcgcccgcggccggttccttccccgctaccatcgccatccccgccgccatcgccattcccgttgccttcagccgccgccgcctagcgccgcgcgcccctgccttcgccgtcgccatccccgccgccgtggccgccgtcctccccgccgccagatccggccggagcggcctggatctggcggtcaccgccgtcccgcctggcggctcccctgcctgcccggtgaaaggtcggtga

SEQ ID NO: 98393 - DNA, 283 bp, Oryza sativa
  Clone ID: PAT_MRT4530_96303C.1
atgacggttatggcgattggaaaggtcagtaataccctccaactgccattgggagtgaatctccaccgttccctcaaaaccctgcatccatcggtttcatgggaggttcggctgaacctggggccggcccaaccagcccacattttggctggtggccccctctactgcttcacttcgtagacttgtgaattttggcctgattcatcgtgtcaagtctgcgttcttggcccattcatacacaagtctggttctcgatatcgtccgattgatctatcgtctgagt

SEQ ID NO: 98394 - DNA, 336 bp, Oryza sativa
  Clone ID: PAT_MRT4530_96304C.1
atggcgaagactatggagcaaggatggcacgagaggcgaaggatcgtgcgggtgctctgccaagtcggaggcctcttgggcgaaggatgcagggttgaacaccttgtgccaagctcgacgccgctctcgatgtccagagcgccgccgttggccacttcgccgttcccgtcgactggagcctccgctgaccgagccctctcgccacgagcgtcttcaaggtcccaggagcacagagccttgagtaatcgagccaactcgctgtcatcggggagatcccctcaattttctccaagaccagccgccagccatctccatctattccggtcaccacagtga

SEQ ID NO: 98395 - DNA, 1755 bp, Oryza sativa
  Clone ID: PAT_MRT4530_96305C.1
atgccacccaaactgcggaagaggtcgacgggggcggcggcacgatcccccgccacgaatggagaagaaggccatactggctctaaatcatcggaaacgagtccggctgctagcggaaggtggacacgagctcgagcgagggatctagggttcgatactaccgaccaccctagagtgtcggattctgctggcggcgggggcaggactgaccgcaaagcgccggcaggagcggctccgaagaagagaaagggcgtatcggcgtcgacgtcggcaggtccggttccgaggaagacaacggcggcgggcaggaaaagaagaaacccgccttgtcccagcttaccgccggggcaatgcaccaaactcgaccaacgaggtttaatccctcaccttcttgcccaacctttctttttcccttctagtttttcatttagtgttcgtactccaaaaatgctgatccatgcctaccggccttccttctctttacctcatcgcaaagatatccccactctcagggatgagcctagggatcccctcaccgctgatgccgtgtgcactggcatcgtctttggttgggatggggctaacaagtgcgccaagatcctgacctcttcttctgtcgtctgtgacttcaagggtgaattacatgacccaacactcaagctatctgttcatctgccagataacactatcacagaaggacggttgttgtccttcaatgttcactatgatgttgctcttttagaggtcatgggagacttccagttgcaggtcccttcttttggctcgagtacaacctatggtcaggacgtatttgcattggctagggatgaaaacatgtgcttaatggttaggcatggaaaaatctcatggctggaatgtcccatgttattgaacaaccactatatgtttctgagttgtgatattcctgagggtggttcaggagggccagtgattgaccatgatggtaatatcattgggattgtatttgacaataacccgggtccggtagtaacctctatcactacaatcagaacttgcgttgagatgtggcatcagtttagccgtgttgctcgccccatacttggcatgcaattgaaggcggtggaactactggatgtctctaaactggaggaactctgtcttgacaacaatatcaccagcggtttcattgtgaatctggtgaaagttgattctattgcggagaggcttggtattagacgaggggatgtgattgtttttcaggatagttgttgttctactttacctcagttagaagactaccttctttctcttggctggggatacctgcaggggaaaagtttgacagtagatctcaagaattacataaccctgccactttacaacacatcggcaaaaagggaaaacatcaatggcttgagacaccatatgatttcacctatagaagttcgcatatggcaatcaagcattagggggaacttgccagtgcgggcgcgatggccgctgtcgaggttggaaatggcgtgggtagacaggggcacagggcacggcgttgcaaatagaggtcaggggcgagacggccgaaaagatgtggtgctccaatccaatcattacgccggccaccacgccgtcatcaactccgctccgtcgcagcccggcgtggacgcgccgcctctgccgagcccctcggttgaagttcataatcttgttgactcatttagggaaaacattactttccctgtacaattctctgatgcttctaagtgggttgattga

SEQ ID NO: 98396 - DNA, 255 bp, Oryza sativa
  Clone ID: PAT_MRT4530_96306C.1
atggctgcgcccggcagggcattgctgctactgctggtagtggtggtggtccagttcttgatgacaatataccccaggaatatttttgcgaccaaaaggaaaactcgtcagatagtatgttcactgatccattcggaacagatggatttcttgatcaatagtgaaacattacaaagttcagagcaagcagtagaatttcctcaaagggctcctttagaaaacaaagggtttctcaaggaatttgggggacactga

SEQ ID NO: 98397 - DNA, 417 bp, Oryza sativa
  Clone ID: PAT_MRT4530_96307C.1
atggccagcgaggagcggcgtggtgcatcaaggcggcggtcgacgaggagcagtgggcacatgaaggtggccatcggcgaggcggcacggctagatccggcgtttcctcgcttggatggcgcctcctggcctcgtttcgccatctggtcggagtggaaccgtcatcgaggaggcagggtggagctcgccggcgcatacggagcggaggtggctagccaggtagttggggagcggccggcgaggaggctggttggagctcggcggtgcagatggagggttagctgcagcgacaagactccgtgggcctccggaaccacaccttccgactgcctccgtaacggcgcgtgcacgatcgcacgataccacgatcccacgacgcgcgtgcggcaactggcggatatctctcctgctatataa

SEQ ID NO: 98398 - DNA, 1828 bp, Oryza sativa
  Clone ID: PAT_MRT4530_96308C.1
tttttttttttttttaagaaagttcagcgagcgcatcagttttttttttttttttttttttgaatatgaaaaaaaaaagagttcttgatggagacgtggatttctcaagaatcttgtccggctcacgagacacacatggtcatatatcttcacagtacatcaaattttgtggcgcaaaaagacctaattttctgcttcactaggagcaattttttttttgacagtacaacatgggccttttcaatatagtaagaaaaaggatgcttcatcagattatttactaccctaaagaggtgacccctcactgcatggtagagtacaattttgcagactggatgaaatctttgatgttgaaagtctcatcagcatcagactttgtgatcacacccttttccgttatgattgcggtaatcagatttgccggagtaacatcgaaggcagggttccacaccgatatacctgacgcggcgacttgcttacctaggccaccttcagagttcagcaactcattgggagacctctcttcgatcacaatttgctcaccagatgggagggagagatcaatcgaagttatcggcgcagccacgtagaattgcacaccgtgatgcttcgcagaaatggcgaggttgtatgtgccaatcttgttagcagtatcaccattggcagcgatacgatcagctccaacgattacagcttgaatacacccgctcttcatcagtgcagctgcagcagaatctgctatcagcgttgcgggtactttgtcgtgaactaactcgaaagctgtaagcctggaaccctggttaaatggacgagtttcagtgcaaaaggccttctctagaattcctccagagtgaagagcacgaataacccccaaggcagttccataaccagcagtcgcaagactgccagtattacagtgtgttagaacagaaatatctttagagacctcaagtttctgtttgagaaactcagctccatgagagccaattgccttgttatctgacacatcgtcaactagcatggtctctgctgcatcaatgtaggcctgaaagattgctttggcatctttctcagtttctgctgtccttgaaactaaactccgaagcttggttgcagcatcagataggttcactgcagttgggcggctcgatacaaggtactccaatttctcggaaacaaaaactgctgcctctgcaggcgtaccggtgaaatcctccaacccagaaacctctacagccagagccaaagccgctgctatggcaatcgcaggagcgccacggacaaccatgtctctgattgcgttccatccatcgccggagcacttgacgtcgatgtagtccacctcgagtgggagcttcctctgatcaagcaggcggagcgatccgcggtggtagacgatggactggagagcacccaattcgcccattgctggagcggagcgaaattcggcggaaatcgagagaaaacccggagaatcgggaggagtcgaagagcgggtggaggaggcgccgccgctcgcaatcttgtctgttccctgtgtatcgggactcgagtatatatccgacgaatgtttcgccgctttttcacctaggcccctctgaatgcaggtaattctgttaggcccaccgactagggttcgcaacgaaagaatatctggtgctacggaacagtgccgtgctaccgtgctaccgagcgtgcggcagtcgggaagcggcacaccagcgaagtcacgagcaaaataacgggcgtagagtaccggtcggtgaaggtcgagcacgcggttcgtcctcgcgctccaggtgttcgaccggcgaccgaaggtgttcat

SEQ ID NO: 98399 - DNA, 246 bp, Oryza sativa
  Clone ID: PAT_MRT4530_96309C.1
aaacataatgatgatggaaacagaagaatccctgaaagacatgttagatagagtccatagatactctacatgcaatcactacacacgcattagtacattatatcaggcacgcacgctcgcccaaagatgatagacagaggtagccgtggtccgtgaatgtccaaacgttacactacatattgatcctaggctgaatatagtcaaagatagaaagctagttgaacttacagaaatcgagggacacac

SEQ ID NO: 98400 - DNA, 1176 bp, Oryza sativa
  Clone ID: PAT_MRT4530_9630C.1
atggcgagcggcggcggcatgcgctgtcgccggcgatggcaaccggcggcgcgggaggcggcggcggatggcggcggctcggcgctaggagggagaggaaggtggaaagaggggggaggggcgcctcaccggggttcggccggcgcgggaggaggcgacgacgaacggcgacgccgagggggcgggcgcgcggaccgggtccacgggaagtggggcccacgcgtcagccgctcggtccacggtggaccgggcgcacgcggctggcggcggtcggcgccgtgggtcccgcgcgtcagccgcacccgcgggcgcgggcggctgacggccgggcccacttggcagccgcgagggcgcgccgagggcggcctcgccggcacggccgacgggaggaggacgcgcacccgcgccccgatggtcgccgccggcgaccaacggcgcggcggagcggcacccgagagagaggagggaagggggaaacgaacggagcggtccacggctcaccccaagacggcgaaggcggtggaaacggcggacggagcggaggaagacggcggcgcggctcgggatgacgatgacgacggtgctccggcggtcggcgggcgaagcggagcggcggacggggtcggcggcaacacggcgaagcggacggaggtgtcgccgagtaaggaggaagtccggagcggcggcggcggcggaacggagctcggcggcgatggcggagagggaggagcacggcgcgagcacgatttcgacggcgagagtgagcggcgagcggcggaaacgaaagagcggagctcgggcaacgtttttatagcgtcggaagggagagaaggcggccggggaggaaggaaaccggccgcggagatttcggccgccattgattgcgccggcgatgattacgggcttgattcgaacgaatccgagggagagagagaggggaaagagggggaaacgggggaggggaacgcggggggcacggacgcggcggcgggcgcggcgcggggttggggatgacaggtgggccccacccgtcagcgagagcggcgggcgggcccgcctgtcagcggcgcgcgcacgggggaggccgatgggccgcgggggaggagagagagagagagggagagggagggaatgggccgagccggcccaagagggaaaaaagggggggaaacagac

SEQ ID NO: 98401 - DNA, 212 bp, Oryza sativa
  Clone ID: PAT_MRT4530_96310C.1
aaacaaagaccacagcttttataccaaccgaacccgtttaaaagcacggtaggagacaaagtttatgaacatcgtgtcacatcacaatacacgaaactttcccaaactgcatacatgtaccagactatttaaatcctgacattggcgtcatactcttactgattcaattgagaaatagaagcgttgggtacatgacagcttaaagcgcggat

SEQ ID NO: 98402 - DNA, 1100 bp, Oryza sativa
  Clone ID: PAT_MRT4530_96311C.1
atggcggcggcgtcgtctcggtggcagcggatggccgcggcgtgcttcgtcctcgccgcgcttgcgatgtgggcggcgcccgcggcgtgcggcgcgcgcgcggttcctcgtggggcgggggcgggggtggcggcgcagcaggcgaacgcgtcgtcgtcgtcgtcggcggcggcggacgagttcctggcgccgcacaaccaggcgcgggcggcggtcggggtggcgccgctgcggtggagcggcgacctggcggcggcggcggcgaggacgacgtcgcagcagcagggcgggcaggggcggcggtgcgggttcgcggacatgagcgggagcccctacggcgcgaaccaggggtgggcgagctacccggcgcgccccgcggaggtggtggcgtcgtgggtggcgcaggggagcagcaacagcaagcagcacctaatctcgccggaagaaaaaccaaagccggaggcgacgcgggagccgtcgtgcttcggcgacagctcggtcggcatcgccgtcgccgccgctggtgactctgggcacggcggcacactggatcgcaagctgcaggcggcgaccacggcggtgtacagtgcctcgctgcactccgggaaggagctcctcatccgggtcacgtggacgcggaacgctgccggagccaccggcctcgccgtcgtcgagccgattgactggttggtggggatggcggcgagggacggcgcggcgctgaagccggtgctgagcgggttgtcgatgaagccggtgccgagcggcgagcgactccgagaggcgcgcgccaccgccgagcgcgccctcgccgccgccgaggcggagggcgacgaccccgcggcggtcgacgtcaacctcatcctcgccttcatcgccgcctgagacggggacttaaacgacgcgagacggcctcgcctccgcctccgcgcccaacgccacggcgcccgcccgcgcggggccgcttcgccgacggcggcgacgcagcgtcgccgacgccattcgcgactggccgccgccgccgcctcgcccggtggcctgctcctcagccgccggctggcttgcccagaagagagagagagaggggagaagggaaagga

SEQ ID NO: 98403 - DNA, 460 bp, Oryza sativa
  Clone ID: PAT_MRT4530_96312C.1
gcgacaactaacgataactatggctcacatgtctaccattcttacattgagccttggccttcttctgttatctcacaagtgtccatgggacaagttttatttgtgggaagcccacttcacatcccacgtggattaatgggagaccaacatagtcagaatcaatgtcgatttagagcaccacaccgaccttgaggcaacacaccattttagatctgaaactggacttactgagtactaccacattgaagctagaaatgagttcccttgggcctgcaagagcgtggggcgcttagtcgtcgagagcaacggcttaagtttaccaatgtatgctaatgctcacaaggttgttatacataccacaaagtgggagagcgttcaggatggcactgtctggttgtgcagagacagtgcaagcaattaggcctccctttgagccagaggaggcaacagctggtgaggc

SEQ ID NO: 98404 - DNA, 2448 bp, Oryza sativa
  Clone ID: PAT_MRT4530_96313C.1
gctgcaggaatcggcgcgggcgccgcctgcgcctcgtgttcctccacgtcgctccgccgctccgctcgccttgcttgcgagccacagcgacggctggccacgcgcggcgtgtgcgtgcgtggagcgcgggggggacggaggcacacgctggccaccagctgcagctgcagcgcagctcgctctccttggccaatgaacgctcgttgctgccagtagctcgttgcttctcaggttaaggagctggctgacagaagcatagtaccatggtagagaacggtgtgcagctcacattgacctccactgtcaagaccaatggcaagataagaatcaatggagaagtgctaaacggatcacacctcaaagagaagcacgaagctggcagcaatggcgccctgcacccatcaaacgggcaagcaaagcagccgccgtcgccgccgcagaagcagaagcagaagctgctctgcacgacgtgcggcaaggggcacacgtgccaggcggtgatcgcccggacgcggcagatgcgcgccatgatcgacgcgaggaggccgcaccaggcgcactcggcgttccgccacctcgtcgacgacggccaccgcccgtcgctggtgacgtacaccacgctgctcgcggcgctgacgagccagcgggcgttcgacaccatcccgtggctgctcgccgaggtggaggacgccggcctccgcccggactccatcttcttcaacgcgctcatcaacgccctcgtcgaggcccggcggatgggcgaggcgacgaacaccttcctcaggatgggccactccggctgccgccccacggcgagcacgttcaacacgctgatcaagggctacggcatagccggccgccccgaggagtcgcagcgggtgttcgacatgatggcctccggcggcgccggcggcgaggcggcggtcaggccgaacctgacgacgtacaacatcctcgtcaaggcgtggtgcgacgccgggaggctggaggaggcgtggcgggtggtggcgaggatgcgcgcgtcgggcgccgacccggacgtcgtcacgtacaacaccctcgccagcgcgtacgccaagaacgacgagacgtggcgcgccgaggagctcgtcgtggagatggcgcagcaggcagggctccgcaccagcgagcgcacctggggcatcatcgtcggcggctactgccgcgagggccgcctcggcgaggcgctccgctgcgtccgccagatgaaggactccggcgtgctccccaacgtcatcgtcttcaacaccctgctcaagggcttcctcgacgccaacgacatggccgccgtcgacgacgttcttgggctgatggagcagttcgggatcaagccggacatcgtgacctacagccaccagctgaacgcgctgagctccatggggcacatggccaagtgcatgaaggtgttcgacaaaatgatcgaggccgggatcgagccggacccgcaggtgtacagcatcctcgccaagggctacgtgcgcgcgcagcagccggagaaggcggaggagctcctgcgccagatgggccgcctcggcgtccgccccaacgtcgtcaccttcaccaccgtcatcagcgggtggtgcagcgtcgccgacatgggcaacgccgtgagggtctacgccgccatgcgcgacgccggcgtgcgcccgaacctcaggacgttcgagaccctcatctggggctacagcgagctgaagcagccatggaaggccgaggaggtgctccagatgatgcaggacgccggcgtccgccccaagcagaccacctactgcctcgtcgccgacgcgtggaaggccgtcggcctcgtcgagaacgccaaccgcgcgctcggctcctcctcctcctccggcgacctcctcgacgccgacgacgacgaggagccctacttcccggacaaccatggcgacgacaagctgcagagcttcgagagaaccaatggccatgccaagagtgacgcgtcacgatccatgcaggtgacaagagcttccatgagcttgaagacggcgaggtcgtcgtcgccgtcgccgtcgctgtcgctgctccggcgatcgtgccggcttccggtgagatccacgtggctttgcaggaagcagcttcagatgcagtgtggagtgtatggccagagcatcagctcactgaagatggtgttcctcagttagaggaggccatcttgtgttgttgctcagtaaaaaagaaaaatgtacactggcaagaacctgtcaattacaattcttactatttctcaacacacacttggatgatttctgctgtgccagaactcgcttcagatgtctcaaaaattttggaaggaagactgggaaatatgtttatgtaagatagccaatgtatgttgatcatggacagcttgttttcccaaaaaaaaaaaaaaaaatggtatgtctagttcaatgaaaaaaaaaaaaaaaa

SEQ ID NO: 98405 - DNA, 1564 bp, Oryza sativa
  Clone ID: PAT_MRT4530_96314C.1
atgccgccgcaggcgcagctgtcgttcaagccctcgttgcaccacccactcggcggcggcgatcactacagcaccgctcggcagcggcggggctattggtggctggttaaggacgttgtcgctgtgcaaacttgccacagtgaaatgaatggttttgctttcttggacctgtactcgagtaatctcatggctcatctcattttacatggtactacatcccgtcgactaccagttcttgggcctcccggcaacctccaattctggggcggtggcaacggcgcaggcggcgacaatggaggcagcaccacaggtggcagcggcgccggtgtcgctccgggaggcggcgacgtcagcggcggcgcggctgggctgatctatccggattcaactcgtcatcggggaacatactgtgacacgatgcatttgccagcgatggatgatggatcaatgctgcaaaagagaaattccattcttgctgcccatgtgaaggatccagtgcataagctgggcctccgcgtcgcctggactaggcctcagctgggcccagaaaagagccaaaaggcccgcatcatttcggcttggaaaaagtacacccaaggtccctcggtggttttgaccctgattttagcctacgtgacggttgagtcagcgtggaacccacgtggactccacatgtcagcgtgccacgtcaactctctcttttattgcagcagcaacagcaagcagcagttaatctcgccggaagaaaaaccaaagccggaggcgacgcgggagtcgttgtgcttcggcgacagctcggtcggcatcgccgccgccgccgccagtgactctgggcgcggcggtgctctggatcgcaagctgcaggcggcgaccacggcggtgtacggtgcctcgctgcacttcgggaaggagcttctcatccgggtcacgtggacgcagaacgctgccggagccaccggcctcgccgtcgtcgaggtgcgcccaccatgtgctgcacaagaagcgcgggagcagatccctcaccaccgccgccggcacggccgtgggcatccactgggacaccgccgaggccacgtacgcgtcggattcgtcgtcccctgagcccaccggcgaggcggcaactactacctcgccgtcatcgctgacgccgaggtcgcgctgctcctcggcgaggggtggcttcttctggttggtggggatggcggcgagggacggcacggcgctgaagccggtgctgagcgggttgtcgatgaagccggtgccgagcggtgagcgactccgagaggcgcgcgccaccgccgagcgcgccctcgccgccgccgagcgcggagggcgacgaccccgcggcggtcgacgtcaacctcgtccttgccttcctcgccgcccgagacggggacttaaacgacgtgagacggcctcgcctccgcctccgcgcccaacaccacggcgcccgcccgcgcggggccgcttcgccaatggcggcgacgcagcgtcaccgacgccattcgcgaccggctgccgccgccgcctcgcccggtggcttgctcctcagcccgccaccggc

SEQ ID NO: 98406 - DNA, 246 bp, Oryza sativa
  Clone ID: PAT_MRT4530_96315C.1
gtgaggtccgacaaatttgttcctagttgatgcaaaatttaccgagaatttacaggcaccatgacatccacagtacataggacccaaattcttctcccctcccactatctggcctttttagttcttgttgtttcaccacatacaaatgttcattttaacaccaaacagtataaaaaaaaagaaaggaaaaatcaccacccaattcgttttcagctgacccctgccaactgaaagcaaataaacacc

SEQ ID NO: 98407 - DNA, 430 bp, Oryza sativa
  Clone ID: PAT_MRT4530_96316C.1
atggcgttgccgctgctcaagtcgtccccccacttctctgctcttcactccgcgaacagagcccagctccatggccgctgccgtgcaacgctcggtggattccatgacccgaggtccaactccagccgttgcaaggatcctttctacgacagtgaggcgtacaggggacaagggggtgacggcaccgtgcactggtactatgaccggcaagaggacctggaggcgtctgcaagagaggagctcctgagggaggagctactcgaggagatcgagcagagggtcggagggctcagagaactcgaggaagcagccaaggaggagcagcttacaaactgaagcgtctataccttctacgccttcttcacagtctggggcatctgcttctttgcgtccatgaaggatcctttctacgacagtgaggcgtacaggg

SEQ ID NO: 98408 - DNA, 457 bp, Oryza sativa
  Clone ID: PAT_MRT4530_96317C.1
gcttaaatactgttagccttttacacaaatcatttaaccagttttgtcggctccatcacacgccagacaatgtctctaacctacaactagtgcattgcaacaatcatgaccttgtctaatgtggtcttacaacttacaagttttcaagactcgttataagtgaactagtttcagcagagctttgcatgaggttttgactcgctatacagaactacagacttactgttagagcaaggagaatttactgtttcagactacctagcctctattgtagttgtcgtcacaccattgctggtaagtccatgagatgattctgtgtctaatgtgatcttcccaatgttcactccaggctcatttggctgtggcaacgtggcattctcactggctagcatcataacaactgaagacatcaatggtctgttcttgggttccactttaacgcacaacagagcgacgt

SEQ ID NO: 98409 - DNA, 136 bp, Oryza sativa
  Clone ID: PAT_MRT4530_96318C.1
ctgaaccaattttctccaatctttcgagtgaaataaagattgtcattctgatatatgaatgtacaatttctggatgctgatgttagttgaacactgattgtggagagactatgcttgttcttcctttaacttaatg

SEQ ID NO: 98410 - DNA, 377 bp, Oryza sativa
  Clone ID: PAT_MRT4530_96319C.1
ggtcaagcggtgcagaaaccgcgcttgcgatatttattacaggtgcgtactccctttttaccaataaataatgtatgacaagacattgacaagggagatattacaacatttatccgtccatactgtgctcattcggacaggatgcgattggagcttgtgtcaattgcacacatcacggatgtagtagacggcctggcatgcatatctggcacttatgaacatgttagtggtcagatccctggtacaagtggagcaattgacggcgcattcttattatatgctggagttattaaacgacggcccatgtcaaatggcactggttcaagatgtacagtcttcatgaattcaagaccgttgagctatttatctttgcctac

SEQ ID NO: 98411 - DNA, 2961 bp, Oryza sativa
  Clone ID: PAT_MRT4530_9631C.1
ggaaaatcctcgcttcttctcttccacggggaaggtctcctccaatcctttcccctctccctctcctcctcctcctcctccctgcgccttccacttgcagcgattcctcctccccgcccgctcttctcgaaccttctggaaccttcccccatcccccacaagaagcagcagatgggcatcgtcgtcgtcgtcgtcaaccaatcctaggcgacgagcgctgcggcggcgcgcgccatctgctcccctccgccgtgctccggtgctccccgatctgcgcctcccgctccggttggtcggctgtcggaacacgcagctgcaaaaccctagccgagctgcggcgatctcaacgctggcggcgaggccctcctcttcgtcggcgtcgacggaaaaatatggcgcatgttttatttacttccccttgctgtcactgaacacatttcctaaagtcaaggacaagacatggtgttgcagaagaggttggactatggatcccatggccatcgtgctcccattaagccacgtgtcgcaacattggcgccggttaaacgctccacaagaataaggaaaaagcagatgtatgcacttgatttgcttgcgacagctgcagaaaaattgttggctgatcaagacaatttatctagtggacctaacataaatgaaacaccagaaggttatgttacaagcatgaaaccagttaaagcagaacagtttgatgaagcgtttccgttgagaagcgtggctgtgaaaaaagatgactgcaaaggttgtacagtaggctgtgcaggcatctgtggctttctcagacaagctaatatgtgcttggctgaaaactcgtcgactcaaaatctagctgattcagtactagagtcactaacagcaaagcctgatgtgttggctaaggactcatttgttagcagtaaaaaatcatgtcgattgggttttggtcttggcacaattccggagtatggatctgttggagtatgccaaccttggtccacaagatcagcagaggttaaacaagtgcatcgggcgagaccaacagcaatcagaagtcaagaagatagtgatgctgcagctctatgtgctttggtcgagaccatggatttggacaccaaacctcttgctgaggctagctctggtagtaactcaggagtgcacatctgcggccctgacagggggcataactcccatccctcgtgtttggctaaagtgcagcatgctgcagacagagatgatgacgaaaattcttctgggtgtgtacatccaagcacctcaggaaataaccgtggttatattccacattatataggtgaccgcaggataaggagattgtttgcctccaggttaaggaaggcagctcgcaacaggatatgtggagagatgtcttgtaaaggtaacaagctgagtttgtgtgaaaagaagatgcccactacgcgccgaagagtgcaacaaacaactttgaagaggaaaagacttgctcaactttactccgaaaaatcatctgatgaagtcaagttaaccatcaaatctttcaacatccctgaactactaattgagatccctgaaaatgcaacagttggttcattgaagaaaactgtgtcagatgctgttactactataattgaacgcggtctccgtgtcggtatacttcttcaaggaaaaaatattcaaaatgacaacaagacgcttcgtcaggctgggatttaccgtggtaaaaaactaaatgacataggctttactctggaatgtgaagctgggcaagattctcaccctggtgtaatagtgccagaagaaatggattttgttggtgcatctgttgtggacaagtctgctacggtgaaatgcgaagaacctgctgagaaccagcagcttatgcaagattttccaggctgcagcttgagtgatcctggttctgttgattatcccgtggaatggagcacacaagaaacatcagcaagctcccaagccatcgtcccttttgcagatccaaactcactggcgctggccaatgtgccgctttctaggtcaaagcgaccagattttgggcaaagacggataaggaggcctttcactgttgctgaagtggagttgctggtggaagccgtcgagcaccttggaacaggaaggtggagggacgtcaaattccgcgcatttgaaaatgttcatcataggacctatgttgatctgaaggacaagtggaagaccctggtgcacacggcgagcatagcgccgcagcaaagaaggggagctccagttccacaggaactcctggaccgtgtgctcgccgcacaggcctactggtcggagcagcaggcaaagctccatggcgatccccctgttcctgaaatctgccctacctgatcctgatgatgattgatggagaaggcaagaatggccctcgtgtacaaatcggtgtaaaaattgttcagaagggattggttggttgacgtttgattgaaatttgtcgacagttgaaaactcacaacttggtccttcctactgttggttcgttaacaggaggaggaagaagaagaagaagaagaagaagaagcttatttgtaaatttcagcagagtttactgtctttgcaaaaatgcaagtcgttttggacaagttgagctggtttttgcatttgcttggacgtgatcctggctgggccgttgtgatgatgaggtgaggcccaagcccatgaaacaagatgggctttgtcatcgtgggaagcagaccttggctgttacggctgctgttgtctttatctaccggcctggccttcttatccaactgcaactaacaccaaccggccagctgccgtcaggcctgacgtcagcacaagcatggaagcagacgaactccacgtttagctccatcagaccatcaccattcggcgcggattctcgattagcatgtgcactcgtatcatcacaattagagcaagttcaatagaatagccaaccgttggctc

SEQ ID NO: 98412 - DNA, 4929 bp, Oryza sativa
  Clone ID: PAT_MRT4530_96320C.1
tcaaccaatgtaatttatgaataaaaatgaaccacacaaatctataaggcatgtggcgcccattttcttccaatgctgatgtacattgcgtacaaacccagctgataccgtagacgggtgtctccccatgcttcggccgccccgcaagcgtgtcagcatccatcttagcttctggtcaaacattgctaattttggctcgacgttttgtggaatgctcagctccccctcgaacgcggcattgtccaggtaaaggatctgcaaaagcagtgagcatcccgccttgttcgccaccttatctttatgcttgatgtcgtgctgtgccttcggtgcaacgtcaataaggtggtcgatgacgtatttcgcccaattgtagttcttgatttcttccacattaaggagtgccccccagaagtcgttcgatccagatttgtgcgacatcttcggtgcaagaaacatgccgacaatccacacaacaaatgtggtcctaaaatggtcctgagcccaattgttcatggcgctgggaaatatcctcttaattacttcctcagcacccttcagtgcgttggactcgaagccaggagcactgatataatattgcacaaaagagtctttctccttttttgtgttgtgcggcattggacacacctccatgccctcaaatggaatgccaagcactctgttaacattcctaggactgattttcaactccaagtgtttcgatgaactcctgctggttgcccctcgagcttcccagccggctgtgttctgcaccggcaggtccgtgggtcccctcctcctacctctagtgcgaggacgaggcacgtcgggggtgtacctccagtcctgcgaaggagcccaccggcgtcgtggttgagacgggccgggctgcgagagatccggctgtgacgactctggtgcgtcctctagctgcgagggaccgagctcatccgcctcctcttcttcgtccccctcctcttcttcctcctcatccccttcttcctcctgatctccttcctccgcctctttgtcttgctcgccctcctcgtcacccacctccccttcttcatccccctcttggtgggcatgagcatgttcaaccacatcagtcgacctgcagccgagccttgctgccaacttccgacatcgctgccgtagtctctgtagggcgttgcggagggtgccgccctctccttcggagccaggagccgtgcctagcgccactcccgcatcgttgacggtccgcaagagctctcgagccactctgtcgcgaacaggtcccgtctcgaccgtggtacctagacgggtacgagtatcgtactcgttctgctcctcaacatcctcggggtcatccgctatgtcggctagtgtccaggccggacgtaggacaagacggtagggcctgtggagccacgccaagtacaagtcgaactccgtcccgttgtgctgaccctggtctggtactccattctcctcgaacttctcccattgcgtgatatgatcctgatggtagtaagcccaatcagtcaccttcttgttcttccgacggtcaaccttgtgtaggtcgatactcgtggagaaacggtgcgggattgtttgaagcctcccgaattgctgcatcacgcggtggcacatctggaactccactgcatagaagcagatcagtgggcaccgtagggtcttcaacgcatcctctatatggcacatgggattcagttctagctcgagcgcttcctgtgcctgatatggcatccacaccacatgttctggctgtaggtagtccatctcttttgtgtagtggtagtacgccaaattcctgcggcctactaccgcctcgtcccagtccgcgagcaacggcagccacatccaagaagccatgtctccaccagagtcagggaacagaatactgccgaagatgtatagcacatacgccctgcagtatcgctgtactgtagcctcgtctgcctcagcgggacactgaccgaagttggctcgcaaccaactcaaaggaacccctgatgtcttcgtctgcctctgaccatcaggtgccactggaggctccagaccaaggtactcctcgaccctctccctccagttccccgacgctgtgtcacctgtgaccgcctgaccccggataggaagacccaggatcatggcgacgtcctccagagtgaccgtcagctccccgcacggtaggtggaaggtgtgtgtctctggacgccaccggtccactagggccgtcagagcagcggcgttgtacagaggcaccggtcgctgtgccatggtcacgaacgccaagagcttcgcccgctgtaggtacgggacgtaccagtcgtcgaatagtatgtgcgccgtgtgacctcttactcgaagggtcttcaagcgctctccgctggcaatctgtggggcccggtgcttctcctcgtagaaatcctccaaccccggaaagtgctccatccgtcggttggctgagcctttgtatgctttgtccatgtcgttcttgaaccttcttgtccttcttcttcctcgtgtgttgttctttaacgacaagtcgggcacgaagaactctccatcataacttggccactgcgatggatctaggtaaggttcaaacctaggggagtacgagtcctgcacagccttattggaagcttcataacacattcggggggccacctccacatccaaacctcgcaacttacaaacggttatcatgtgggggcatggcaagtgatggagctgagggaactgacaactacatgtgttatctcgagcaaccacgacgtagtgacgtccaccccattgaaccccagccgccgtgactccgccttgctcgctgacctcatacttcatcgaagggaaatcaaaacatgctgctctttgccccaaggttcgtctttgttgctcctccaacatgtccttaacttttgtgggccacttctttccactcaggatatctacagttgcctctttgtgtctatcgacaaaccaactattgcacttcgaaaatgtgtatgccacaatagctgtaaccggcagtttccgaatgcctctcaatacattattgaaactctcggccatattactagtcatgatgctatggcgacgcccgttggtatcaaatgctcttgcccatttgaccttaagtggcatgtggtcttctagccacttctttggcctctctccgaccacacccatgaggcgttttatctcatctaggaaaaatgctttctcatttatttgacatatgcgctcaagatctttcatctgatcagtcgtagctccagctgtgtagaagttagcacagaagtgcctcatgcaccacctgtggtgaatggttaggtgatgaggcatgatgtggatgatggagttcaaaatgccagggtgtctatcagaaattatacacacttctctattaggaccgatcagcttgtttctcaacatgttgatgaaccactcccagttggatgtattctccttctctaccagagcaaacgccaagggaacaagatgtaacccggcgtcgacccctattgccgtgagcaatgtaccttggtatttaccggttaagaaagtgccatcaattgctagcaccggcctcaagtgcttgaatgcttctatggactggccaaatatccaatatgcacgtccaaatactcgtctctgtactccatccaccatcctggacttctcggggtgagcctcaacacggaaatgcatggtagggttctttgctttgatggcacgcatcagtgtaggcaagcgaacatacgcctcgtcccaatctccccaaatgaccctagtcacccgccacctatctcctccactcttccttgcattaatctgccatttgcaatggcgatcgagacaagccacagtatactttactgacgcgttagattccttcacatggtacggccggtggacacggatagaataactctgtagccatattttcagatcatccatcgatcgaaactccaaccccttccttggttcatcacacattggttcgaaggcaccgtcatattgtggatccccatcagcaattgctagcccggatctggtaagattctcgaattgtgttatttccgggtttctacccaccagtttcgcaaacacagtcctttcatgctctgacatcttacgcactagacgatcatcatcggagtcggaagcggattcatccaattcatcctctgtatcatactccaaccagcctgggttcaatccactgcgtatcatagcctcctcacactcctctcgggtatagaatttcagcctagccaactcccttaggcccatacttacattcttagcattcgcttcttcctcaggcaactccacatcatctcctacctcccgaccatcctcaacatctccttcctctcttaccagcacattctcctccacattaactttctcccttaacggcacattatcctctgcatgtacttcctcccttaacggcacattctcctctgcatgtacttcctcccttaccgggtcattctcctccctgacctccacatccgccatatcatttactccctcgcccccctccacgtcttcctcaatcaatttttccttcctactacacctctccgacagttcgtgacagttaatgggtgattctatgagtagactttcattaaggtctataagttctttcttccctatcctaccatctttcttccatgcaaacacctcaagagatttgaaatgtgaccccaatactatatctatatatgtttgccattcgatctctccattcaagtctaacataaacttatgtgacatgacaccgccgcccacatcgtatctcccttgcataccaaccgactcgtcactccaatccaattcatgcttgatgcgagacattaactcctcaaaggtaggtttcacagaaaacactaattgtctaactgtcat

SEQ ID NO: 98413 - DNA, 306 bp, Oryza sativa
  Clone ID: PAT_MRT4530_96321C.1
aatctgacgagacaactgttaaaaaggcatttaaaaattccgttcatatgaattccgcaagggataattaaacaaaaattgagcggaaaaaccactgaacaaaaattcaggggaaaaatcagtcatgctctattgctactcagttttgggctttccttccaggttgtccctcgaataccagactttctgggccgccggaccttatttaccattgccctaagctcctttgccacccttaaatttgctggccctctaggccttcttaatacgcttattcaccagttttcttccctttgttagagctta

SEQ ID NO: 98414 - DNA, 5514 bp, Oryza sativa
  Clone ID: PAT_MRT4530_96322C.1
atgggatttgacttcgcagtgaaagctgtttacactggtatttggattgctgctatatctctctttatggagttgctgggtttcaatacccaaaagtggattactgctggaggttttgggactgtgttgcttacacttgctggtcgtgagatctttacaaacttcctctcaagtgttatgatcaatgccacacgtccattcgtggtgaatgaatggatcaatacaaagatagatggtgttgaagtctctggtattgttgagcatgttggctggtggtcccctacaatcattagaggtgatgatagagaagctatatacattcctaaccataagttcacagtttctattttgagaaataacactcagaggacccattggcgtattaagacctacctggctttaagccacatggatgctgcgaaaattggtataattgttgcggacatgagaaaagtgttggcaaagaatccacatatagagcaacagaggctgcataggagagtattttttgagaaaattgatccaaaaacccaagctcttatgatttacatatcatgctttgtgaagacatctcattttgaggagtatctcaatgtccaggaagctgttatgttggatcttcttagaatagtcggccatcatagggcaaggcttgccacccagattcgaacagttcagaaatcttatggcaatgcagacatcgataacattcctttcggagaggagatgtatagtcgtgtacgtggccgtccacttctgattgatacctctgcaaggattagcgatgacaagtctaagcctcgtccagcatcgcgtgaagatcataaagtcaagacagtcacttctgcagaggctaagtcagcttcagctgataatgctagtataagcaactccgagaagcaggaacagaaaaaatcagtaccagaagatggtcgcatgaagaatagtaaaaatgatcatgcgacaacaacatcgccatcttctccatggtcagaaaatatggatcctattgcatcaacttccaaaactggtaaaggaaaaactcaaggagctgaggccacagaacgagaaggagatggcgctgtctctgttgctaattcaaagaaagaatcgagacccgtctttgaagacaacattgttctgggtttagctcttgagggatccaagaggacattaccaattgatgacggaatgaaccctcatctatcactttctgaaactgagcaagacacagttgaggctgcttcatcaccgaaggataagaaaggtcaagaaaaagtagttgtcgccatgaagccatctcatctcagccgcccagattggcctgcatcgtgcatcatcgatgtaatcttgtgtcaacttagtgtcacccgaccagagtccagatattggtgcttggttggagttgaacacggccggccggcagacatggccgctggtattgataggtttggaagttttgggattgctatgatggatagattggttcggcttcattatggtggttgtgtggtagatgaaagtaccggtggaagcaaatttgagggaatgattgttagacagttagtgtttcatgcgaagccaacatttgaggagttaatgtctcgcattaagcatgaattggattggagtgatgagtcggttggtatgcaagggagatacgatgtgggcggcggtgtcatgtcgcataagtttatgttagacttgaatggaaagatcgaatggcaaacatatatagatatagtattggggtcacatttcaaagctcttgaggtgtttgcatggaagaaagaaggtaggaaagggaagaaagaacttgtagacttgaacgaaagtccactcatagaatcacccattagttctcacgaactgtcggagaggtgtagtaggaaggaagaattaattgaggaagacgtggaggtgggcgagggagtaaatgatatggcggatgtggaggtcagggaggaagtacatggggaggagaatgtcccggtaagggaggaagtacatgcagaggagaatgtgccgttaagggaggaagttaatgtggaggagaatgtgccggtaagagaggaaggagatattgaggatggtcgggaggtaggagatgatgtggagttgactgaggaagaagcgaatgctaagaatgtaagtatgggcctaagggagttggttaggctggaattctatacccgagaggagtgtgaggaggctatgatacgcagtggattgaactcaggctggttggagtatgatacagatgatgaattggatgagtccgcttccgactccgatgatgatcgtccagtgcgtaagatgtcggagcatgaaaggactgtgtttgagaaattggatcttaccagatctgggctagcaattgctgatggggatccacaatatgacggtgccttcgaaccaatgtgtgatgaaccaaggaaggggttggagtttcgatcgatggatgatctgaaaatatggctgcagagttattctatccgtgtccaccggccgtaccatgtgaaggaatctaatgcgtcagtaaagtatactgtggcttgtctcgatcgccattgcaaatggcagattaatgcaaggaagagtggaggagataggtggcgggtgactagggtgggcgaagaccacacatgctgtagtgcggaagtaaccggcaagcatttgcaacttacttcgaggtttattggaaataggttacaggcatttgtgcgagctgaaccaactttgtctccagcagcgattgtcgaggcagttgagcaaatatggtactatcggcctacgtatggcaaagcatggcgtgctaagcaagttgctatgaaggtcatttggggagattgggacgaggcgtatgttcgcttgcctacactgatgcatgccatcaaagaaaagaaccctaccatgcatttccgtgttgaggctcaccccgagaagtcaaggatggtggagggagtacaaaggtggtgcatgaggcacttctgtgctaacttctacacagctggagctacgacggatcagatgaaagatcttgagcgaatctgtcaaataaatgagaaagcattgttcctagatgagataaaacgcctcttgggtgtggtcggagagaggccaaagaagtggctagaagaccatatggcacttaaggtcaaatgggcaagagcatttgataccaacgggcgtcgccacagcatcatgactagtaatatggccgagagtttcaataatgtcttgagaggcatttggaaactgccggttacagctattgtggcatacacattttcgaagtgcaatagttggtttgttgatagacataaagaggcaactgtagatatcctgagtggaaagaagtggcccacaaaagttaaggacatatttgaggaggaacaaagacgaactttggggcaaagaacagcatgtttcgatttcccttcgatgaagtatgaggttagcgagcaaggcggagttacggcggctggggtgcaatggggtggacgtcactacgtcgtggttgtgagagataacacatgcagttgtcagttccctcagctccatcacttgccatgctcccacatgataaccgtttgtaagttgcgaggtttggatgtggaggtggccccccgaatgtgttatgatgcttccaatagagctgtgcaggacacgtactcccctaggtttgaaccttacctagatccatcgcagtggccaagttatgatggagagttcttcgtttcggacttgtcattgaagaacaacactcggggaagaagaaggacaagaaggttcaagaacgacatggacaaagcgtacaaaggttcaggcaaccgctggtcacaaaagccaaacaatacaaattcagagccggtcatgcaaaatagatgttcgctgtgccacgaactaggccataagaaaactaggatggagcactttccggggttggaggatttctacgaggagaagcactgggctccccagattgtgagcggagagcgcctgaagacccttcgagtcagaggtcacacgacacacatactgttcgacgaccggtacgtcccgtacttatggtgggcgaagctcttggcgttcatgaccatggcgcagcgaccggtgcctctgtacaacaccgctgctctgacggccctcgtggaccggtggcgtccagagacacacaccgctgctctgacggtcactctaaagtacgtcgccatgatcttgggtcttcctatccggggtcaggcggtcacagtggcacctgacggtcagaggcagatgaagacttcaggggttcctttaagttggttgcgtgccaacttcggtcagtgtcccaccgaggcagacgaggccacggtgcagcgatactgtagggcgtacatcctgtacatcttcggcaatattctgttccctgactccagtggagacatggcctcttggatgtggcttccgttactcgcggactgggacgaggctggtaccttcagctgggggtctgctgccctagcctggctgtaccggcaactatgtgatgcctgccgaaggcaaggcggggaagcgaacctagcaggctgtgtttggttgatacaggtttggatgtggacgaggcttcctgttggtcggcccatgtggaggacccatcaggtttggccgcatcaggatgccgaccgacatcccactgtagctcacatgtgggaattggtcccatctccagtactaggccgcaggaatttggcctattaccactacacaaatgagatggactacctacagccagaacttgtggtatggatgccatatgaggcacaagaagtgctcgagctggaactaaatcccatgtgccatatagaggatgcgttgaagaccctttggtgcccactgatctgcttctatgcagtggagttccagatgtgcaaccgcgtgatgcggcagttcgggaggcttcaaacaatcccgcaccgtttctccacaagtatcgacttacacaagttaagttattttcatgtcaacatttctgacatattcgagattgatattttgcatatgtgtggggtggaccgtcggaagaacaagaagaagttcgaggagaatgcagtaccagaccagggtcagcacaacagggcggagttcgacgcgtacttggcgtggctccacaggacctaccgtcttgtcctacgtctggcctggatgctagccgacatagcgaacgaccccgaggatgtggaggagcagaacgagtacgacactcatacccgtgaaggtagcacagtcgagacgggacctgttcgcgacagagtgagactacggcagcaatgtcggaagttggcagcaaggctcggctgcaggtcaactgatgtggtcgaatatgctcatgcccaccaagagggggatgaagaagaggaggcggatgacgaggagggcgagcaagacaaggaggcggaggaagaaggggatgaggaggaagaagaggaggcggatgagctcggtccctcgcagctgcaggacgcaccatag

SEQ ID NO: 98415 - DNA, 689 bp, Oryza sativa
  Clone ID: PAT_MRT4530_96323C.1
cactgcagactgacttggtcccgtgtctacgcaccattgaaatatgggggctagatattcacaacatggagctcacgatgatcgcgctccgtgctagatggctctgggctcagcgggcctcccaatcccgcccctggtaggagcttcaaatcccatgttctaggcaatagcgcgagtttgttgccgcttccatgacttgtgttcttggtgatagcaaatatattctcttctaggaggagagatggctacagggttcgagtcttcgctcttgggcacccaaactctatagtcgcaacccgacgcgtgtccaccggaagctctcggtcgctgatgcgttggtcaacaaccaatggatccgtgaccttcgtggctccttgggcatccattcaatactgtaatacctgcagatttggtcgatattgcggtcaacaattctttccgagggccaacctgattcattcatctagaggtgggagtgggacagcttggggtcgtactccacccgctcggcctaccttgccctcttcttgagaagtatttcgttccagcacctacctatctggcgctctttcaccccacctcggttgctctatttcctgtggttggtcacttattggcgctattggacggttgaccgcttggagaagcgtggcctgccgcacccaacctgttttgtcttctgtgaccaa

SEQ ID NO: 98416 - DNA, 4923 bp, Oryza sativa
  Clone ID: PAT_MRT4530_96324C.1
atggggctggcgctgatatcgtgccaccgtggcggccgggccgatcccccagctgacgtggcagctacctcagtgccagctgcatcggcgctaagatggccaatctcagcgccaactgcattggcactggacctagggacctcagcgccaggtgggctggcgctgaggtgggacttggccgaatcggccatggcccagcccggcaagccttctggatggcttgcgggcttggaactcagcgccaggcataatggcgctggacctagggacctcagcgccagcccacccggcgctgaggtgggacttggccgaatcggccatggcccagcccggcaagccttctggatggcttgcgggctgggaactcaacgctagccataatggcgctggacctagggatgggacttggccgaatcggccatggcccggcccagcaagccttctggatggctgggctgggacctcagcgccagtgcacctggcactgagggtgaaaatctcagcgccattttccctcctcctacctctagtgcgaggatgaggcacatcgggggtgtacctccagtcctgcgaaggagcctgccggcgtcgtggtcgagacgggccgagttgcgagagatctagctgtgatgactctggtgcgtcctccagctgcgagggaccgagctcatccgcctcctcttcttcctcctcatcccattcttcctcctcatccccttcttcctcctcatctccttcttcctccgcctccttgtcttgctcgccctcctcgtcacccacctccccttcttcatccctctcttggtgggcatgagcatgttcgaccacatcggtcgacctgcagccgagccttgttgccaacttctgacaccgctgccgtagtctctgtagggcgttgcggagggtgccgccctctccttcggagccaggagccgtgcctagcgccactcccgcatcgttgacggtccgcaagagctctcgagccactctgtcgcgaacaggtcccgtctcgaccgtggtaccttgacgggtacgagtatcgtactcgctctgcttctcaacatcctcggggtcatccgctatgtcggctagcgtccaggccggacgtaggacaagacggtaggtcctgtggagccacgccaagtacacgtcgaactctgtcctgttgtgctgaccctggtctggtactccattctcctcgaacttctcccattgcgtgatatgatcctgatggtagtaagcccaatcagtcaccttcttgttcttccgacggtccaccttgtgtaggtcgacacttgtggagaaacggtgcgggattgtttgaagcctcccgaactgccacatcacgcggtggcacatctggaactccactgcatagaagcagatcagtgggcaccgtagggtcttcaacgcatcctctatatggcacatgggatttagttctagctcgagcacttcctgtgcctcatatggcatccacaccacatgttctggctgtagatagtccatctcgtttgtgtagtggtagtaggccaaattcctgcggcctactactggagatgggaccgattcccataggtgagctacagtgggacgtcggtcggcatcctggtgcggccaaacctgatgggtcctccacatgggccaaccaacaggaagcctcatccacatccaaacctgcgtcacatacgttagcttccaacaggctagggcagcagacccccagctgaaggtacccgcctcgtcccagtccgcgagcaacggcagccacatccaagaggccatgtctccaccagagtcagggaacagaatactgccgaagatgtacaagacgtacgccctgcagtatcgctgtaccgtggccttgtctgcctcggcgggacactgaccgaagttggctcgcaaccaactcaaaggaacccctgatgtcttcgtctgcctctgaccatcaggtgccactggaggctccacaccaaggtactcctcgaccctctccctccagttccctgacgctgtgtcacttgtgaccgcctgaccccggataggtagacccaggatcatggcgacgtcctccagagtgaccgtcagctccccgcacggtaggtggaaggtgtgtgtctctggacgccaccggtccacgagggccgtcagagcagcggcgttgtatagaggcatcggtcgctgggccatggtcacgaacgccaagagcttcgcccgcatactggtaagcatgttcccaagtactctccgctcacaatctggggagccctgtgcttctcctcgtagaaatcctccaaccccggaaagtgctccatcctgtgtgctaccctcaccacctccccccgtcctacggcgctttttcggtcgatccttagacttgtctcgcttcgggcacctagttttcttatggcctagttcgtggcatagcgagcatctattttgcatgaccggctctgaatttgtattgttcggcttttgtgaccgtcggttggctgagcctttgtacactttgtccatgtcgttcttgaaccttcttgtccttcttcttcctcgtgtgttgttcttcaatgacaagtccgaaacgaagaactctccatcataacttggccactgcgatggatctaggtaaggttcaaacctaggggagtacgtgtcctgcacagccctattggaagcttcataacacattcggggggccacctccacatccaaacctcgcaacttacaaacggttatcatgtgggagcatggcaagtgatggagctgagggaactgacaactacatgtgttatctctcgcaaccacgacgtagtgacgtccaccccattgcaccccagccgccgtgactccgccttgctcgctgacctcatacttcatcgaagggaaatcgaaacatgctgttctttgccccaaagttcgtctttgctgctcctccaacatgtccttaacttttgtgggccacttctttccactcaggatatctacagttgcctctttgtgtctatcaacaaaccaactattgcacttcgaaaatgtgtatgccacaatagctgtaaccggcagttttcgaatgcctctcaagacattattgaaactctcggccatattactggtcattatgctgtggcgacgcccgttggtatcaaatgctcttgcccatttgaccttaagtgccatatggtcttctagccacttctttggcctctctccgaccacacccaatagccgttttatctcatctaggaacaatgctttctcatttatttgacatatgcgctcaagatctttcatctgatcagtcgtagctccagctgtgtagaagttagcacagaagtgcctcatgcaccacctgtggtgaatggttaggtgatgaggcatgttgtggttgatggagttcaaaatgccagggtgtctatcagaaattatacacacttctctattaggaccgatcagcttgtgtctcaacatgttgatgaaccactcccagttggatgtattctccttctctaccagagcaaacgccaagggaacaagatgtaaccatgcgtcgacccctattgccatgagcaatgtaccttggtatttaccggttaagaaagtgccatcaattgctagcaccggcctcaagtgcttgaatgcttctatggactggccaaatatccaatatgcacgtccaaatactcgcctctgtactccctccaccatccttgacttctcggggtgagcctcaacacggaaactcatggtagggttccttgctttgatggcacgcatcagtgtaggcaagcgaacatacgcctcgtcccaatctccccaaatgaccttcatagcaacttgcttagcacgccaagctttgccatatgtaggccgatagtgccagatttgctcaactgcctcgacaatagctacaggagacaaagttggttcagctcgcacaaatgcctgtaacctatttccaataaacctcgaagtaagttgcaaatgcttgccggttacttccgcactacagcatgtgtggtcttcgcccaccctagtcacccgccacctatctcctccactcttccttgcattaatctgccatttgcaacggcgatcgagacaagccacagtatactttactgacgcgttagattccttgacatggtaaggccggtggacacggatagaataactatccttagcattcgcttcttcctcaggcaactccacatcatcacctacctcccgaccatcgtcaacatctcgttcctctcttaccggcacattctcctctacattaactccctctcttaacagcacattgtcctctgcatttgcttcctcccttaacggcacattctcctctacatgtacttcctcccttaccgggacattctcctccccatgtacttcctccctgacctctacatccgctgtatcatttactccctcgcccacctccacctcaattaattcttccttcctactacacctctccgactcaagagctttgaaatgtgaccccaatactatatctatatatgtttgccattcgatctctccattcaagtctaacataaacttatgcaacatgacaccggcgcccacatcgtatctcccttgcataccaactgactcatcactccaatccaattcatgcttaatgcgagacattaactcctcaaatgtaggcttcgcatgaaacactaactgtctaacaatcattccctcaaattggcttccaccggtactttcatctaccacacaaccaccataatgaagccggaccaatctatccatctcagcgccaatgcgcttggcgctgagccgacggcagctaggccattttgcctttgtcgtttccgatgggaaactacacgacctacttgcagttgtcaacttgtcaagtactccatacacgcacttgccggtgttcgacggcat

SEQ ID NO: 98417 - DNA, 492 bp, Oryza sativa
  Clone ID: PAT_MRT4530_96325C.1
atggccaaaaggcccgaggcccgacggcccggcccacggcacgacgttttggcccggtccaagcacggcacggcccgtcaggggtcaggcccgtgccagcccagcccgaccatcgggccgtgcctgggcctctccaccggcacgttgggctggcccggcacggccgggctgacacggcccgacggctggtgggccgtgcctgggcgggaggcgcagcccattggccagcacggcccgatcggcatcatgccggcccgatggctggtgggccgtgcctgggccgggccgtgccgggcgaggcagcatatagaggcgctatttctctcccccaccggccgctgcatgatgctcctctccaccgtgcgcggcggatccgctcatacggcctctgcctggtcaggttggcgagggggcggggaggccgacagcggcgacgacatcatcgacaggaatgagaaggaggaggggaagaggaaggcccccgctcaatag

SEQ ID NO: 98418 - DNA, 2238 bp, Oryza sativa
  Clone ID: PAT_MRT4530_96326C.1
ctagggatgggacttggccgaatcggccatggcccggcccagcaagccttctggatggctgggctgggacctcagcgccagtgcacctggcactgagggtgaaaatctcagcgccattttccctggcgctgagtttgcagtcctgctaaaacttagcaagactgctctctgtccagtcagactcctcctacctctagtgcgaggatgaggcacatcgggggtgtacctccagtcctgcgaaggagcctgccggcgtcgtggtcgagacgggccgagttgcgagagatctagctgtgatgactctggtgcgtcctccagctgcgagggaccgagctcatccgcctcctcttcttcctcctcatcccattcttcctcctcatccccttcttcctcctcatctccttcttcctccgcctccttgtcttgctcgccctcctcgtcacccacctccccttcttcatccctctcttggtgggcatgagcatgttcgaccacatcggtcgacctgcagccgagccttgttgccaacttctgacaccgctgccgtagtctctgtagggcgttgcggagggtgccgccctctccttcggagccaggagccgtgcctagcgccactcccgcatcgttgacggtccgcaagagctctcgagccactctgtcgcgaacaggtcccgtctcgaccgtggtaccttgacgggtacgagtatcgtactcgctctgcttctcaacatcctcggggtcatccgctatgtcggctagcgtccaggccggacgtaggacaagacggtaggtcctgtggagccacgccaagtacacgtcgaactctgtcctgttgtgctgaccctggtctggtactccattctcctcgaacttctcccattgcgtgatatgatcctgatggtagtaagcccaatcagtcaccttcttgttcttccgacggtccaccttgtgtaggtcgacacttgtggagaaacggtgcgggattgtttgaagcctcccgaactgccacatcacgcggtggcacatctggaactccactgcatagaagcagatcagtgggcaccgtagggtcttcaacgcatcctctatatggcacatgggatttagttctagctcgagcacttcctgtgcctcatatggcatccacaccacatgttctggctgtagatagtccatctcgtttgtgtagtggtagtaggccaaattcctgcggcctactactggagatgggaccgattcccataggtgagctacagtgggacgtcggtcggcatcctggtgcggccaaacctgatgggtcctccacatgggccaaccaacaggaagcctcatccacatccaaacctgtatcaaccaaacacagcctgctaggttcgcttccccgccttgccttcggcaggcatcacatagttgccggtacagccaggctagggcagcagacccccagctgaaggtaccagcctcgtcccagtccgcgagtaacggaagccacatccaagaggccatgtctccactggagtcagggaacagaatattgccgaagatgtacaggatgtacgccctacagtatcgctgcaccgtggcctcgtctgcctcggtgggacactgaccgaagttggcacgcaaccaacttaaaggaacccctgaagtcttcatctgcctctgaccgtcaggtgccactggaggctccacaccaaggtactcctcgaccctctccctccagttccctgacgctgtgtcacttgtgaccgcctgaccccggataggtagacccaggatcatggcgacgtcctccagagtgaccgtcagctccccgcacggtaggtggaaggtgtgtgtctctggacgccaccggtccacgagggccgtcagagcagcggcgttgtatagaggcatcggtcgctgggccatggtcacgaacgccaagagcttcgcccgcatactggtaagcatgttcccaagtactctccgctcacaatctggggagccctgtgcttctcctcgtagaaatcctccaaccccggaaagtgctccatcctgtgtgctaccctcaccacctccccccgtcctacggcgctttttcggtcgatccttaaacttgtctcgcttcgggcacctagttttcttatggcctagttcgtggcatagcgagcatctattttgcatgaccggctctgaatttgtattgttcggcttttgtgaccgtcggttggctgagcctttgtacactttgtccat

SEQ ID NO: 98419 - DNA, 384 bp, Oryza sativa
  unsure (1)..(384): unsure at all n locations
  Clone ID: PAT_MRT4530_96327C.1
caacccccatcatcgcgaanatgttccagggcgccggcccggacatgggcggcgcccgctggcatggacgaggacgcgcccggcgggtggccaaccggttgcaggcccccaaagatncgaggaggtccgatttaaagctggtgggtggtccctaccgtngaattcccgggctgggaanggggagttcttgaaacccgttgtngattgngggcctggccgttcgttgtngattccccctgttgtttttttaagcccgttcgaagaagttttcgttgccgaatgaaagctttttgttaaagtgtggtattcgcccgtaatggtttttcccttgaaacctttgcttctgaaaatagtttaagcttttgacctaaaaaaaaaaaaaaa

SEQ ID NO: 98420 - DNA, 1425 bp, Oryza sativa
  Clone ID: PAT_MRT4530_96328C.1
gaacggagaggagaggccttgtgattttacaggcctaatatagcaaatggctgagaagtacatttgaggaggttcgtctcctgaatagtatcagcgacgatcaatacctttgacatagacaggtttgacagattgcatttgcacaagcacaaaaaaaaggtaggcttggtgacaaatatagcataaataatcggtttaaactcagatcacctatcaagattcctctggtcacctttttcttgacctttcttatccttcggtgatgaagcagcctcaactgtgtcttgctcagtttcagaaagtgatagatgagggttcattccgtcatcaattggtaatgtcctcttggatccctcaagagctaaacccagaacaatgttgtcttcaaagacgggtctcgattctttctttgaattagcaacagagacagcgccatctccttctcgttctgtggcctcagctccttgagtttttcctttaccagttttggaagttgatgcaataggatccatattttctgaccatggagaagatggcgatgttgttgtcgcatgatcatttttactattcttcatgcgaccatcttctggtactgattttttctgttcctgcttctcggagttgcttatactagcattatcagctgaagctgacttagcctctgcagaagtgactgtcttgactttatgatcttcacgcgatgctggacgaggcttagacttgtcatcgctaatccttgcagaggtatcaatcagaagtggacggccacgtacacgactatacatctcctctccaaaaggaatgttatcgatgtctgcattgccataagatttctgaactgttcgaatctgggtggcaagccttgccctatgatggccgactattctaagaagatccaacataacagcttcctggacattgagatactcctcaaaatgagatgtcttcacaaagcatgatatgtaaatcataagagcttgggtttttggatcaattttctcaaaaaatactctcctatgcagcctctgttgctctatatgtggattctttgccaacacttttctcatgtccgcaacaattataccaattttcgcagcatccatgtggcttaaagccaggtaggtcttaatacgccaatgggtcctctgagtgttatttctcaaaatagaaactgtgaacttatggttaggaatgtatatagcttctctatcatcacctctaatgattgtaggggaccaccagccaacatgctcaacaataccagagacttcaacaccatctatctttgtattgatccattcattcaccacgaatggacgtgtggcattgatcataacacttgagaggaagtttgtaaagatctcacgaccagcaagtgtaagcaacacagtcccaaacctccagcagtaatccacttttgggtat

SEQ ID NO: 98421 - DNA, 486 bp, Oryza sativa
  Clone ID: PAT_MRT4530_96329C.1
ttgttgtatcggagggctaaaactgtatcatgggctccaggcactggacacgctctcgagtcagattcaatgtaaggggatcctgccatcgcaggggacccacggacctgccggtgcagaacacagccggctgggaagctcgaggggcaaccagcaggagttcatcgaaacacttggagttgaaaatcagtcctaggaatgttaacagagtgcttggcattccatttgagggcatggaggtgtgtccaatgccgcacaacacaaaaaaggagaaagactcttttgtgcaatattatatcagtgctcctggcttcgagtccaacgcactgaagggtgctgaggaagtaattaagaggatatttcccagcgccatgaacaattgggctcaggaccattttaggaccacatttgttgtgtggattgtcggcatgtttcttgcaccgaagatgtcgcacaaatctggatcgaacgacttctggggggcac

SEQ ID NO: 98422 - DNA, 795 bp, Oryza sativa
  Clone ID: PAT_MRT4530_9632C.1
catcagaaagaggttagcagcgcagtcagcccgaacacccccgacattagctcggacatgaccgaggcagaacgcgccgttgccgacatcgaaaccatagacgactggcgcatcccactaatcaaattcatcagcagcgaggagttgcccgaggacgacacagaggccgagaaaataacccgtaaagcaaagatctactggatggtcggcaacgatctatacaagaaagcgccaaacgggggcgactacagattcctattcgtggcgatcgataaattcaccaaatggatcgaagcagtacccacgggggaaatcaaggccgacaacgccatcaaatttatcaaagggatattttgcagatacggactaccacaccgcatcataactgataacggctcccagttcatcagcgctgatttccaggactactatatcgggctgggggtcaaagtatgcttcgcctcggtctctcaccctcaaagcaacggacaaatcgagagggcaaacggcatagtactacaagggatgaaaaccagcatctacgacatactcatgtcacacaacaaaaggtgggttgaagaactcccgtcagtactatgggccgtacgcaccacaccgacaacgtctaataaggaaacacccttcttcctcgtgtacggctctgaggccatgctcccaggcgagctacaacatcagagtacacgagtacagaagtactccgacgagaaccaggaggagcagcgagatatcgatgtaaatcttctcgaggagcatcgggaacgagttgccgtctga

SEQ ID NO: 98423 - DNA, 1212 bp, Oryza sativa
  Clone ID: PAT_MRT4530_96330C.1
tcatcgatgatatgctatgacggtttgcttggagcttttccacgaaatagccccttttgcgagagtgaatatgtagcctgatgtggactttctatcatctacatctctcgcaaaatctgtatctgaatacccttctatctctagggaatcagatcttctgtacgttagtatgaggccttttgtgccttgcacataacgcaaagctttctttaccattctccagtgatctattcctggatttccttgatatctgccaagtatcccagtaacaaaagctaagtcagggcgcgtacatacttcagcatactgcaagcttccgatagccgaagcatgtggaacaactttcatttgatcgatctcaaactggttcctgggacattgaaatttcccaaatctatcgtccttgactatgggagcaggtgtaggcttactcgcatgtatactgtatttctttagtactttttccagatatgccttttgcgataatcctaaaacccattttcttctatctcggtgaatctctattcctagaacagataaggcttcaccaagatctttcatatcaaaattcgaggacaaaaactttttcgtctccaatagtagatcaacatcactactagcgagtaggatgttatccttgggttgtgccatgtagacgttctcatataaatccccattaaggaatgacgtctttacatccatttgatgtagttctagatcataatatgccacaagtgccattacgatcccgaaggaatctttacattttgttttgtagacccatttgcagcctactgttttggctcctttaggaatttcttctaagtcccaaactttgttggtactcattgatcttatttcatcttccatggcttcaagccacttcgatgaatgagcacttctcatggtttcttcaaacgaggtgggatcaccctgtgtttgaacttcttcactagcatagacttggtagtcactaagaatatctgtctttctttctctttgagattttctaagttgtggtacatcttctatttggggctgatgttgctcttcctcttgtgtgacaactagttctgtaggatcctgaatctcaggttcctcttgctcattcgttgttgtcacaggagaactaacatcaggtgttgtcacaacaacattctgtgttgtcggtgttacatcaacaggtatcgagaaaaagggttcttgaatcat

SEQ ID NO: 98424 - DNA, 3344 bp, Oryza sativa
  Clone ID: PAT_MRT4530_96331C.1
catcaaaatgatacaaacgtagaaagtcgcagcagtgcaacatataatatctacggtattgtatagcctcagttattacccttaacgggaataactaaggctcatgcgagagagaagatagatatagcacttgcgatgtctgatatagttttagctctcaccaagtcttgccccatgagctattgctccagtgagggcagaaggtgagagtgaagatgcttttaacaagagaacgttggacaatgctccaatagtacagaagtacaacactgatcgtgcgaagtaggagtcatcaaaatgcaagtgcttgatggtgatcaagagctccattgtggaggcaataaggggagcaatcccactgccatagagtaccttcaatgggtggagaatcagttcactggttctttaaaggcctgtgcgaaatccctaacaagaggttagtaaccatgtagtatacgagcgaaggggttagagagcatattttgaagatgagtggcatcgcttcaaagctcaagaagatggactttagttcttcctgatgagttcctagttcaccttaatttttcctccttgccttcagtttttgaggcttttgttgtgaactacaattcattgcccgaaaactgggactttgagaagctcattgccaagtagtgcaagaaggggcactatcagaaggattgccctgaattcctgaagcatcttataaagaaagggattccgtacgaggaggactcttcaaagagcagaaagacgcaatagtaatgtgaatgttgtatgcaatgaagtgaatgttgcatgcaatagtgtgtcttcctcgtctacgaatgtaagaagtaagcgcaaacgatgcaatgaggaaaccacggcgaaattgtggcactgtcgtttaggccacattttgaaggggagaattgaacgatttattaaagaagaaattttgtatccgttagacattacggattcagaatattgcatagattgtattaaaggaaagacaatcattatgatctaaagattaaagcaataaggtccaaccgtgaagaagagtactactatgctcggcataccccttatggccaaatacctggaccttttgcaaggtttctacaggaaaatggcatatggcatagtagcccagtactccgcaccggacgagcctcaatagatcggagtagcagaaagactatggatggaggtattaaaaccgcctgcccatattcttaatcgagtaccaagtaagtcggtacccaaaacaccgtatgagctattgacaggaaggaaattcatgctaaattatgtacgggtgtggggctatcaagttgaggcaaagttatttaacccaaatattgggaagctagatcacaagacagtcagttgccatttcattggctaccctgagaagtcgaaaggttttcgtttctactgtcctgatagacacactaagtttgtagaaacgagacacgcagtgtttctagagcatgacatagttagggggagcatggtaccccgagaaattagtcttgaagagaagcgggtatgtgtacctactccgatgattcaagaacctttttttctcgatacctgctgctgctgcaccgacagtacagaacgctgcggtgacaacacctgatgttagttctcctgtgataacaataaatgagcacgagtaacctgagattcaggatcctccagaacaagttgtcacacaagaggaagagcaacatcagccccaaatagaagaagtaccacaactcagaagatctcaaagagagagaaggacagctattcctagtgactaccaagtttattctagtgaagaagttcaaacagagggtgatcccacctcgtttgaagaagccatgagaagtgctcattcatcaaaatggcttgaagccatggaagatgaaatgagatcaatgagtaccaacaaagtttgggacttagtagaaattcctaaaggagccaaaacagtaggctgcaaatgggtctacaaaacaaaatgtgactccaaagggaatgtagaaagatataaagcatgacttgtggcaaaagggtttactcaaagagaaggaattgattataatgagaccttttctccggtgtcatgtaaagattccttcaggatcgtaatggcacttgtttcacattatgatctagagctacatcaaatggatgtaaagacagcattccttaacggggatctatatgaaaacgtttatatggcacaactcaagggttttgttgtggaaaggaaagaacaaatagatgccatctgaagaaatccatttatggattaaaataggcctccagacactccagacagaggtacttaaagtttgatgaagtaataagacggtttgggtttaatgagaatgaagaggacaattgcgtttacgcaaagttcacgaaaaagtttttgtcctcgaatttcgatatgaaagatcttggtgaagcctcatttgttctgggaatagagattcaccgagatagaagaaaaggggttttaggattatcgcaaaaggcatatctggaaaaagttctaaagaaatacaatatggatgcgagtaagcctacacctgctcccatagtcaagggcgataggtttgggaaaattcaatctcccaagaaccagtatgagatcgattaaatgaaagcggttccatatgcttcggttgtcgaaagcttacagtatgctcaagtatgtacgcgccctgacttagcttttgttaccgggatacttggcagatatcaaggaaatccaggaatagatcactggagaatggtaaagaaagctttgcgttatgtgcaaggcacaaaaggcctcatgctaacgtacataagaactgattccctagagatagaatggtattcagatgcagattttgcgggagatgtagatgatagaaagtccacatcatgctacatattcactctcgcaaaggggctatttcgtggaaaagcttcaagcaaaccgtcatagcatcattgacgatgtatgctgagtttgtagctagttatgaggccacggggtaggcaaaatggttaaagaagtttgtacccgggttgaaagtggtcgacagcattgaaagaccactcaagatgcattgtgacaatgagccagcagtgttttatgctcacaacaataagtcaagtggtgctgccaaacacattgacattaagttttatgttgtgaaagagaaaatccaggatcagacaattagtctcgagcatataagtacaaaggagatgttagcggatccgcttacaaaagacttaccgcccagtgtgttcagagaacactttgccggcatgggtttacaggaaagcctatgatccttgga

SEQ ID NO: 98425 - DNA, 377 bp, Oryza sativa
  Clone ID: PAT_MRT4530_96332C.1
tttggggcattccaattcttgggagtgaaggttttatctttttttattgtattgtttttattttgtttcaaagcggggcttcaaatgaaccaataattcaaagaaagccgcaagggaaggggcaaaacccccggtgaaaatcaaggggcttcaaaggtaaattcttctaccatctgataaaaaatgaaagcgcattcttccttaaacaagaaagggggctaataaaacaccaaccaaaagttttgaacctacttggaaggttgctaaaaccatccaaaggtccattttcacaggattttttgcaaaaagcatttaagcttctccctcttgggggtttcgtggggagatttccttgcacaaaaattgaccagaccttt

SEQ ID NO: 98426 - DNA, 471 bp, Oryza sativa
  Clone ID: PAT_MRT4530_96333C.1
gtcctcagcaaaaggggcgtagaaacctgcgtttatgggggagatcctcggctagtctggagttgaaaggacgtggacaagacaccatcactaagtcacttaggacggtggagcctgggacacgcgtcgcacatgccccgtgccacttgatttagccaaacaggcagagaagctaccgtggcactatttcgagcagataaggcctcgtcaagcccaccacacaccatgtggtgagcacactggcagaaacccaactgtctcggacggagcccgagagcccggggtaatatgaattgcaagactcgaagggtttcttaaaggctgtgttagagaaccagttggcaacgataagacggctgatgagacaagactaagagtagattgcctaaaaaggcattcattgtacttagctgatctagagaagacaacgaacaccaacacaggactaggagcagtcagccgcctgttggg

SEQ ID NO: 98427 - DNA, 423 bp, Oryza sativa
  Clone ID: PAT_MRT4530_96334C.1
ccacccagggagaaaattttttttaaccccaaaaccaaacccttggtcctttttttaaaaaaaaaaaaaagaacaggttttaaaatttttttcccaactcgacaattttttacccgttcatttaaaacatttttccccccttttaaaactcctccctttttttttccggggaaaaaaaaaaataacttgaggccccccaccgttcccggggggaaaatgtttacagggtgggcgttcttttggggggcccggaaataaagggaaacaagtttttccccaaggggtcccttaggggcttggaaaggtttttaaaggggccctccccggggacctaggcctggataaaaaaccccaacttggaaaacatggccagccccccgttttttatcttcttacccttaagaaaacccccctggtccgggt

SEQ ID NO: 98428 - DNA, 207 bp, Oryza sativa
  Clone ID: PAT_MRT4530_96335C.1
atggatgacgtggtggcaccaaggaagacttgtataaggccgtcacttggaggacgccgggtgggaagtgagcaaacagacgataccgatgggaggtggaaggaggcagccggcgatgagtgggaggttggagcaaggggcaccgggagggaggcaagaggcggcatgcgccagtgcggaccagctgcaatagagggcttgctatga

SEQ ID NO: 98429 - DNA, 549 bp, Oryza sativa
  unsure (1)..(549): unsure at all n locations
  Clone ID: PAT_MRT4530_96336C.1
ccctttcntaaaacccatccaggggagtggggnttccntctcggaaaggcccagtttcgagncgggtcgctctttggtcaagaagcactnttcgcaggatntcaaagcctgggtcggtgntntgggtgacggcaagcacgcggtagcgctgaagaccctaggatcggtatcatccgtgtcaagatgcactcggccgtgtattcggtcgtgaacaaaaacctgctcagcagggccgccgatgtcgcgcaaggtgccatcacgggcaaggccccacctattcagaagttgagagagatcagcgaggaggaggttctgacctggaggaaggccaactaagatggcggctattacgatttgcaaagattctcaccctcggctcggatagggactgatggaggtctggttaaccagagctgggaccatgatcgttcggatgaggaacaaagttcgngctaggcgcggctcggaggctggaaggnagtgaccgcccgtagncagccatttcnatnncaatcanccatgttgtntgccaaaaaaaaaaaaaaaaaa

SEQ ID NO: 98430 - DNA, 1113 bp, Oryza sativa
  Clone ID: PAT_MRT4530_96337C.1
atgtggacctctgacaaccaaaagagaggttacatggctatcacaacacatttcattgatgaatcttgggctcttaggaatataatcatgaggttcatttatgttccaagtccccacactgctgaggttattagcgacgagctctatgaatcattagttcaatggaatctcgatgagaaggtatccactagtacacttgacaattgcactacaaatgatgcaacaattcctattcttgtgagaaagattggaaaaaccaagcttattaatgatggaaaggtgctacacatgcgttgttgtgcttatatcctaaacttaattgttaaggatggattagaacatttgaaagatgcaattgagaacattcgtgatagtgtagcatattggacagccacaccaaaaaggatagaaaagtttgaggacatagctaagtttttgaatgttactatcaccaacaagttagctcttgattgcaaaactagatggaattctactttcaacatgcttagtgttgcattaccctacaagactgttttcactagagctagtcgtgtggataagcaatatgagtgtgaaccaactgaggaagaatggttgtttgctgaagagaagaaaattaggctatggtcaacttgtggtaacagtttggttgaagccatgtcagttgatatggtagagaagtttgataagtactggtctgacattcaaggtttaatgggtattgcaactctctttgatcctcgattcaaatctgaaatgttgtatatgtgctttgagtggttacttggtaaaaccagtgctctttgtgatgtggaggttagcaaagttacaactttgcttgctactttgatggatgagtacaatgtaccagaggaagaagataacatagaaccatcgacattgtcacttggcagtatggaagtcatatcttcctttagtgaacgtgttgccaggaaaaggccagcatcagttaggttccaatctgagctagatcgctacttggatgatgagttgatcccaatatcaacaaaagacttcaagttcaacacaatggagatcctactagcttttggtcttgtctgcaagatattcaagaaggcttgtaggtactag

SEQ ID NO: 98431 - DNA, 195 bp, Oryza sativa
  Clone ID: PAT_MRT4530_96338C.1
atggctggattcagtgaggggatgtcaggaggggatgtcagggggtattgcgtcagccaccgcggtggcggggacgacgacggctacggtgacggcacgattgggcacacttgtgcctggatggcagcagaggcggtgacggagacaaccatcaaggcattgaccgggcggccaagtcttgagaggcagcggtag

SEQ ID NO: 98432 - DNA, 777 bp, Oryza sativa
  Clone ID: PAT_MRT4530_96339C.1
atggccgtctcctctaccctacggcgagctcgatctcacccctcctgggcggccgccgcgcgcggcctcctcgccacctggggcgccggatccggcggccgcgttcgtcatccgcggcatggcgccgcgtccgcgtcgttgttctcatcgttgtccagttctcagacgagcgccgccgacgcacagctcctccgggtcataaacatggagatctcctacgcccagaaagattgcaagaatcgcaactggtcaaaggaattaggtgaaggctttccttttgaaatccaagataaggatggtaccaacatgatgacgcttaagaggagtgaccataaagaacaaattgaagtggaagtgttcttgccaagcgctgtcaatgaagctgaggaaaatggcgagccagaggatcagtgtgaagatggcaaacatagaactcacattggcaatggtgtcccggcccagtactgtatccctttgatagtgagggttcgcaaagaagcagcttcatatttgaaaatcagctgtagctcttaccctaacgaactcatcattgagagcttgtcgtttgaaccgaatgatgaatctggtgattcggccagtcttgaagctaagttgagtaatcttcctgaggaatttcagaaggcagtgtattcctacttgaagagtaggtgcatttcgactgatattaccgacttcttacatgcgtacatgataaacaaagagtgccatgaatacttgtcttggctgagaaaagtgaagggtctgattaaaagttga

SEQ ID NO: 98433 - DNA, 1977 bp, Oryza sativa
  Clone ID: PAT_MRT4530_9633C.1
atggtgttgcagaagaggttggactatggatcccatggccatcgtgctcccattaagccacgtgtcgcaacattggcgccggttaaacgctccacaagaataaggaaaaagcagatgtatgcacttgatttgcttgcgacagctgcagaaaaattgttggctgatcaagacaatttatctagtggacctaacataaatgaaacaccagaaggttatgttacaagcatgaaaccagttaaagcagaacagtttgatgaagcgtttccgttgagaagcgtggctgtgaaaaaagatgactgcaaaggttgtacagtaggctgtgcaggcatctgtggctttctcagacaagctaatatgtgcttggctgaaaactcgtcgactcaaaatctagctgattcagtactagagtcactaacagcaaagcctgatgtgttggctaaggactcatttgttagcagtaaaaaatcatgtcgattgggttttggtcttggcacaattccggagtatggatctgttggagtatgccaaccttggtccacaagatcagcagaggttaaacaagtgcatcgggcgagaccaacagcaatcagaagtcaagaagatagtgatgctgcagctctatgtgctttggtcgagaccatggatttggacaccaaacctcttgctgaggctagctctggtagtaactcaggagtgcacatctgcggccctgacagggggcataactcccatccctcgtgtttggctaaagtgcagcatgctgcagacagagatgatgacgaaaattcttctgggtgtgtacatccaagcacctcaggaaataaccgtggttatattccacattatataggtgaccgcaggataaggagattgtttgcctccaggttaaggaaggcagctcgcaacaggatatgtggagagatgtcttgtaaaggtaacaagctgagtttgtgtgaaaagaagatgcccactacgcgccgaagagtgcaacaaacaactttgaagaggaaaagacttgctcaactttactccgaaaaatcatctgatgaagtcaagttaaccatcaaatctttcaacatccctgaactactaattgagatccctgaaaatgcaacagttggttcattgaagaaaactgtgtcagatgctgttactactataattgaacgcggtctccgtgtcggtatacttcttcaaggaaaaaatattcaaaatgacaacaagacgcttcgtcaggctgggatttgccgtggtaaaaaactaaatgacataggctttactctggaatgtgaagctgggcaagattctcaccctggtgtaatagtgccagaagaaatggattttgttggtgcatctgttgtggacaagtctgctacaagtttcggaaactacacgaccatagatttttgctgtatgtggtcatctaagggttttaatattccatttccaggggtgaaatgcgaagaacctgctgagaaccagcagcttatgcaagattttccaggctgcagcttgagtgatcctggttctgttgattatcccgtggaatggagcacacaagaaacatcagcaagctcccaagccatcgtcccttttgcagatccaaactcactggcgctggccaatgtgccgctttctaggtcaaagcgaccagattttgggcaaagacggataaggaggcctttcactgttgctgaagtggagttgctggtggaagccgtcgagcaccttggaacaggaaggtggagggacgtcaaattccgcgcatttgaaaatgttcatcataggacctatgttgatctgaaggacaagtggaagaccctggtgcacacggcgagcatagcgccgcagcaaagaaggggagctccagttccacaggaactcctggaccgtgtgctcgccgcacaggcctactggtcggagcagcaggcaaagctccatggcgatccccctgttcctgaaatctgccctacctga

SEQ ID NO: 98434 - DNA, 1149 bp, Oryza sativa
  Clone ID: PAT_MRT4530_96340C.1
atgtggacctctgacaaccaaaagagaggttacatggctatcacaacacatttcattgatgaatcttgggctcttaggaatataatcatgaggttcatttatgttccaagtccccacactgctgaggttattagcgacgagctctatgaatcattagttcaatggaatctcgatgagaaggtatccactagtacacttgacaattgcactacaaatgatgcaacaattcctattcttgtgagaaagattggaaaaaccaagcttattaatgatggaaaggtgctacacatgcgttgttgtgcttatatcctaaacttaattgttaaggatggattagaacatttgaaagatgcaattgagaacattcgtgatagtgtagcatattggacagccacaccaaaaaggatagaaaagtttgaggacatagctaagtttttgaatgttactatcaccaacaagttagctcttgattgcaaaactagatggaattctactttcaacatgcttagtgttgcattaccctacaagactgttttcactagagctagtcgtgtggataagcaatatgagtgtgaaccaactgaggaagaatggttgtttgctgaagagaagaaaattaggctatggtcaacttgtggtaacagtttggttgaagccatgtcagttgatatggtagagaagtttgataagtactggtctgacattcaaggtttaatgggtattgcaactctctttgatcctcgattcaaatctgaaatgttgtatatgtgctttgagtggttacttggtaaaaccagtgctctttgtgatgtggaggttagcaaagttacaactttgcttgctactttgatggatgagtacaatgtaccagaggaagaagataacatagaaccatcgacattgtcacttggcagtatggaagtcatatcttcctttagtgaacgtgttgccaggaaaaggccagcatcagttaggttccaatctgagctagatcgctacttggatgatgagttgatcccaatatcaacaaaagacttcaaggttttggattggattggattagaaacaagtacaaagttcaacacaatggagatcctactagcttttggtcttgtctgcaagatattcaagaaggcttgtaggtactag

SEQ ID NO: 98435 - DNA, 576 bp, Oryza sativa
  unsure (1)..(576): unsure at all n locations
  Clone ID: PAT_MRT4530_96341C.1
catatgtcctcacctttctgatgtcaatagccatggccgtcctcttgctcgttgcgttgttctatcggatcaagaagcaggcagctgccatggcggccaagaggaagcaacaacccaagctaccacccgggctagctaccatgccggtggttagcaacatgcaccaaatgctgatgaacaagccggtgttcaggtggatccaccgcctgctcgacgagatggacaccgagatcctgtgcctccgtttcggtcgcgtccacgtgatcgccgtcgcctcgccggagatggcccgggaggtcctgcgcaagaaggacgccatgctcgcctcccggccatcgtcgttcgcgtcgcggacgttcagctttgggtacaagaacaccatcatgtcgccggccggtgaccagtggaggaagatgaggcaggtgctcacgtcggagatcctctcgccggccatggagcggcggatgctcggctcgcgcgtcgaggaggctgaccacctngtcaattacgtctacagccactgtaatgatgggcactgagaacgtccgcacgtaacgagacacttctgtggcaaca

SEQ ID NO: 98436 - DNA, 3105 bp, Oryza sativa
  Clone ID: PAT_MRT4530_96342C.1
atggaggacagggtcaaattcattctcttcctccttggggaggaagctgattcctttgcaaaaagggcagagatgtattacaagaggcgaccagaggtcatcagttcagtggaagaggcgtatcgggcatacagagcacttgctgaacgctacgaccacatatcaggagagctacacaaagcaaaccatactattgcaactgctttccctgaccaggtccagtactcaatgctagaagaggatgatgacaatcttccaaaggcatttacggcggttgatcctcgcaaaatccacaagtcaacagtggaaggactgatgaaaaagaaaaaaggagagaaatcaggactgaaagatggaggcaagaattctggagataaaatcaacaaggagaatgctcaagaagagataagtaggctccagaaggagatattagtgttgcagactcagaaagagttcctcaaaagctcttatgagagtggaatggcaaagtactgggatcttgaaaagcaaattaacgacatgcaggaagaagtttgttacttccaagaggagttcaatgaaagtgcagtgcttgaagataacgaagccagggctttaatgacagcaactgcccttaaatcctgtcaagagaccattatcaaattgcaggaacagcaaaagttatcattcagtgaagcaatggttgagtcagaaagagtcaggtcttccagagataagctgaagaatatcatgaaagtgcatgggaaatccctaccagacttaggaaagttttttgagaaaacagattcagtaaagtttgcaaatgagaatgtgacaaatgatggcagtaatacagtagatgttatgtactctattaatcaggagaaaattgaactgcaagcaacagtagataagatcaaagaatacttccagaaagactctgaagtttctgtggtagagatggcagataaaattgatgcactagtcaataaagttgtggatttggaacttatggtttcatcccagactgcgcaattaaacaggctgtgtcttgaaaatacagaacttgagaagtccttgcacgagctggaggaagagaagccagcactaaacagtggtccaggtgaatcatatagcaagttcaagcaggcagaagaggacctgattagagttcagaatcttgtgagctccttccatgcagaaggaactatagtccattcaaatttcactgaaacaataactaggttccgtgatgtttcagatatgctattgtcgcctcttcttgagcaccaccaagatggttctgctcccatgccgagtgacgaaacaacaccatccattgacatggaaacatcaagcgagcatgataaaacaaactcagaaaatgaagtagacgaattacctgaacattcgaaagaactggaaccagcagatctctgtgatgacaaccactcatctagtggttatcctgagacaaaggcagaaaactgctatcgtggagatggatcagaggatctgtggtatagtgcacttgaagataagtcgagctttgcagctgcatcagtaaatgaggaagaatcaggaaatgcagataatgattcatctcgtgatcacaacaacagaggagaagatcatgctcctgaaatagctagtgacgatgggagcagcaagcaacaatatactgtacaatctcatgagaagcctatattagaacgactgcatcatatttcctctaatgacccaggagatcataatgcgaaaaaagaagagaatgagcaagatttatcaatatcagatgaaagcatctctgaaggcaactcggagcaaaagattaataaagcaggcaattcatgtatcacagcagatacagctcctattagtagaaaagttgatgaggttggcgatcaagaggaaaacatgattaagctacagcagctgcttatgaatgggcttcaagataaggaaaaggtactattaaccgagtacacctctatactccgaaattataagaatgagaagagaaagcttacagaagtggagacaaagaatcaggaacgtttgaatgagatgtcagctatgataagtgagctacgctctgcaaattcaatgaaggatgagaaaattaggtcactgcttgaactcctgaatgctgtacttgacaaagatgtatcaggaaatgggcaccaaatgaacccaacaacgtccttcagttcgataagcaggacattcaggggtcaccgaaggaccccaagcttttcacctggtcatcaaaggaaacaaagtgtttcctccatttccagaataattctcgaatcccctaaggaagatgatgcattgtatgataccgttacagatcaagaaagcctaattttggaggacatcaaattgatcgatgttgtcaagatggagaatgcctcgccgcttgaagagaagttcagacaagacattgatgcacttctggaggagaacttagaattctggatgaagttcagcacatcattccaacagatccaagggtttcagaccaagtacgagcaactacaacctgagattgggaagctaacaaacaaggacaagctcaagacaaataatggccgtgcggatgatccatcagcaaagggtgactcaaatgccatagaaaaacggctaagagaactcaagatagaactacaagtatggttggaacagaatgccatgctcaaaggggagctccagtataggttcgcttccctctgcagcatacaagaggaaattgaagcaaccatggagatgggtgcagaccctgaggaaggagctcatttcacttcatatcaagctgcaaaattccaaggggaggttatgaacatgaaacaggagaacaacaaggttgctgatgaactgcaatctggtctggatcatataaaagggctccaagcagaaattgaaaaggtcattgaaaagatagtcgagagaactagcttatcggaggccaaaggaagcagcacctggaaaaatgcaccctctagaacaagagtgccactccggctattcctctttccagccaagaaaaagaagccgtcactattggcatgtgtaaacccggctcttcagaaacagcatagtgacatggtattcttcactaaatga

SEQ ID NO: 98437 - DNA, 780 bp, Oryza sativa
  Clone ID: PAT_MRT4530_96343C.1
gaaattggtcattctttcctttttttttttttttttcaatcaatccttaaacagagttactattaattaattaatcctttaaatttgatctgcttccagcagctacaagctaagcataaggcagtgacatcaaaagaagctacacaaaacacaacatgaggccgtgtaggctccaagacgctatctacaggtaaaacatcacagccaaaaccaaactactgagaacacctactatgtatcccacactaaggtgggaaaattacctaggatgctgggcaagtaatccatgagctatatagcttgtgcagccaaaagggctgggttaaattgcccacttattcttctggcattcaggctatcaggtgcttcaagataggtagccacccccaggcatgctccctgcacccggcatgcttcctggaccctgcggcgccatcttcccttgcatcatctgctgcaccgtcctaccgtgcccctgcatgtattgctgccccatccctgcgccgaccatctgcggttgctgctgccccatccccgtgccgaccatctgtggttgctgctgccccatccctgtgccgaccatctgcggttgctgctgctgctgaagctgttggggctgctgctgctgctgttgcatctgctgcatctgctgctgctgctgcatttgctgaatctgctgctgctgctgttgttgctgcatttgctgcatctgctgctgctgaagcggatggccttgggattgctgctgctgaaacggaggccttgtgtctgcagttgcat

SEQ ID NO: 98438 - DNA, 2727 bp, Oryza sativa
  Clone ID: PAT_MRT4530_96344C.1
atggccgagaagacccttcgcgaattcgctgccccgtctgctgacaatgtgactgttggcccggctgtcaacatcggagacactattttggaccttaaatgcagcctggtaactatggcgcaggcaagcccattttgcggcaagccgaatgaggacgcaagcactcatctgcagcaattcttggagatctgtagcacttacacggtagaaggtgtcattccggacgccagtttctacaatgaactcactccctcgtccagggatcacctggatgctactactaggggtgccttcttcttaaagacggtccgtgcggccattgatcttattgagaagatggtatccaacatgggctggagcgaagaacgactccagacccatcatcgtggcatgcacaccattaaggagatgcttgccgctaaactggatctcctgatgaagaaactagacgatcaagagagggccaagccgtatgcggaagaacaagtcactcggggaacgattgcccggagtcccgtgaggaagccatgttcatggggaacaatggctaccggcaacaaggaggccacgggtggaaccagccctggccattataccaaggaggcaacaacggcaataacaataacgctgagctgcaacaaaaggatagagactcagctggcgcagctagccgctttagtacctgctaaggagacgggaaggattccgatgcaacccgaaccttccctagaaaatgttaaggcgatcaccacgaggggaggaaaatccactcgggatccgccatattctaacattgcagggaccaggcaagctggcaaggaggcacggtctgctagcacaactgaactcgaggaaaatgaggaggtgcagccggacaagatcccgccgcaggaatactgcgacacgacgctactgccattccctcaacgccagaggaagccttctgtggatgagcaatccgctcggttcatggatgtcacccaaaagatccacatcaacatcccatttgtggatgcaatgcgggtaccaacatacgcccgctacctcaaggacatcctgaacaacaagagggcgttgcctaccacggagatggtcaaccttacggaggagtgtagcaatgctatactccatcggctccgggaaaagaagaaagatccggggtgtcccacaatatcatgcttaattgggatccaacacttcgaccatgccttatgcgatcttggggccagtgtcagcgagatgcgaaaggatgtcttcgacaagctgaactatacggtgttaatcccaacaccaatgaggctccaactggctgattcctctgtttactacccagcgggcatcgccgaggacgtgccagtaaaagtccgggacttcttcttcccggtggatttcgtggtcaagatcaggtacgggccaaacccaccgcaaatccaagaagtcgaagtgcagctaccagagatggacagcctcatagtcttcatgaagaaattcctgcagattgaaacaaccaggaagaggccctatccaaggaagacactggcaaaaactggtgcacgagccaagaagcctttggctccggctcccaggaaaccaccgcccacaccaaggaacaaaaagaaacgacactctcgcttgttcaaggggtacggctctcaatccagccgtcaacaacacgagtcaagtgatcggtcatccgccgatgtgccgatggaggatacgggtgctgaaccgctactcctaaccgacgccgatcttgatcttgttagtggacgggaacctcaagcctacgagacgctgatggaccgagtgttagctcacacccgagcgtacgtttcgggattgctccagaaaacagagtcgattttcagaaggcaacttccggttttgagaaaaacagattttgggaagatatttttggtgcaccgatttatcgatattctcggtcctgtgtacctacacaacatgtttcctttagagaggtacatggctgttctaaagaagtacgtttgtaaccgttctcgtccagaagcaagcatcgccaaagggtatggaacaaaggaggtcattgagttctgtgttgagtttattgaagaccttcgtcgaatcggggagcaccgggtgattgttcactcaaaaaacatcagcatgtccgatgcctggattacacgccatcacatttatactttccccacttggctgcaacaacatctcgtgggtaacgggatgattgaccgacaactagccttctcggcgaggggaccatcttgctcgatctcgacatttcaaggatatgaaatcaatgggtatatatttttcacaagagcccaagacagaaagagcatgaaccagaagagtgttcgtatcgatgccatgagatacgatggtacaactagcacgtattacagtgtcatcgataacatatgggaactagattatggtcccctgaagatccctctgtttcggttccaatgggttaggctgactggtggaggcgtaacgattgatgacaatgggatgacaacggttgaccttaacaaggtaggacactcagatgaaccattcgtcctagccaatgatgtaacgtatgttttctacgtgaaggacatgtctagcaaagcaaagaaggggaaagggctcgacgagccaagacgccgtgtggttctcccaggaaaaaggaaaatcgtcggagtcaaggataagactgaacaaaaattactatcagtttga

SEQ ID NO: 98439 - DNA, 504 bp, Oryza sativa
  Clone ID: PAT_MRT4530_96345C.1
ccaacatcagaatggaaaacagcagcataggctgcgatactcttccaataacacatgtgaagatggtactttctttgtatgcaacattggcagtgtttatttttctttcaggtcattgaacacttcaatggatgtatacagtacattgatatttcggtacatacagtggtacagaacatatatcatcacagctttgatggtggcttcgaactccggccctgtataaatttctgcatacttgcgaattgctcttttgtcataccattgtaatagtcatgagctctttccttttcaagagctcgagcatgttccaagtccagctggagcccgtcatttataacagatttatacaacacaaccaagttgcgattgttccttgcaatggcctcacagacctctattgccttactcagcacctgggtatcatccacaatgtggttaacaagaccccacttctccgccatttcagctgtgataggcatgcaagttaacgaccctcgtgcc

SEQ ID NO: 98440 - DNA, 237 bp, Oryza sativa
  Clone ID: PAT_MRT4530_96346C.1
atgtcgacgagggaggtgccgacgatgccggtggagccgacgacgagcgcgacgctctggaacggccggctggcatcgccggcgtgctcgccgtggcgcttcctgacgccgccaatcgcaccagcccaccaccagctcatgtcgttcatcggtatatatcgcgcgcggtggctcaaaagttcaaagctccgccggctcggccgaaagagcctctgccgtggcgtgtacaaaggatag

SEQ ID NO: 98441 - DNA, 1551 bp, Oryza sativa
  Clone ID: PAT_MRT4530_96347C.1
atgcgcgcgccatctctcgtgccgcgtcctcgccttctcgcctccaccacgttgcgcgcgttccacgccgccgcgcaccagcggcatcaagatcccatcatccccggcatctactcctacgcctccctcctccggcgcagcgccgccacctccgacccccgcctcgccgtctccctccacgcggcgctcctcaagcggggcttcctcctcgcttcctcccacatcttcctatgcaaccacctcctcatcgcctgcttcaagtcccgcctccaccgccacggcctccgcctgctcgacgaaatgccccgtcggaacgccgtctcgtggaccaccgccatcgcggggctcacgcaagggggccaaccccgcgaggcgctcgcgctgttcaagcggttgcgccgcgccgggctcccgccgaacgagttcacgctcgtgagcgcgctcaatgcgagctcgttcgtcggtggcgccggcgttggccgcgcgcggcagctgttcgcgctcgccgtccggcttgggttcgactccaacgtcttcctcacgaacgcgttcctcgcggcgatggtccgccacgggcagctcgccgacgcggtgcggctgttcgacaatgccaatgcctgggacatcgtgtcgtggaacacgctgctcaccgcgttcgcgcaccgttcatccctgcgcctgtgcatgctctggcgaaggatggccatcgaaggtgtcagcgcagacggcttctccttcagcaccgtgctgtctgggttgtccggaagcgcgaacgtggcggcgaccggcttacaagttcacgcgcagcttgtcaagagcggcttcgtcgacgatgtctgcgtgggcaactccttgctggagatgtacatgaagaacaaacagctggaatccggcatcagagcattcaccgagatgcgccatagagatgtcgtgtcctggacagagctggctgcaggtctcctacattgtggagagcctgctgagtccctcagagttgtcagtgacatgatcctggatggaatcaggcctaacaactacaccattgtagctgctgccaatgcttgcgcgaaccttgccaatctgaaccaaggaaggaagatccatggatatgtgatcaagctgggaggagactccaatgtgggtgtcaacaatgctctgatcgacatgtatgcgaagtgcagatcagtaaccggtgcacacaaggtgttccagtcgatgcagcgacagtcggttgtgtcctggacggcgatgatcatggcgtttgcgcagaacgggcaagcgagggaggctgtgaaggtgttcgacgacatgctgttggaaggcatggcaccgaaccacgccgcgttttactctgtcctgtatgcttgcagccaaggtgggtttgtggacgaaggctggatatacttcgacgccatggcagacaagtttggtgttgagccaggcgaggatcactttgcttgcatggtcgatctgctcacaaaggcaggtcgcatcgaagaggctgaagagctgatttctcggatgccatttcgccctggagttgttgcctga

SEQ ID NO: 98442 - DNA, 114 bp, Oryza sativa
  unsure (1)..(114): unsure at all n locations
  Clone ID: PAT_MRT4530_96348C.1
acctgaaggccatctatggaaggatcttccatggcgggttttgtgcnaaatcccccgggttccaacccagaatcagcatagtatgatacactactcctttcacacctatctttc

SEQ ID NO: 98443 - DNA, 757 bp, Oryza sativa
  Clone ID: PAT_MRT4530_96349C.1
ggctgcaggttttttttttttttttttttagattgagaacatttatctttaaaaaaaaacagagagagaacattgttttcactaataatttcaagtttcctagtacagagatgccaaatcacactgaaaaaacatatattgatcatgtgatatacaccgttacaaaaaaacaatctcactaatgtaaatgtggtcttagtcaggattcaggaagaatacatcacatttcacaagtagttattttgtcagttcagacttcagagccgaggcaatgaaagaaggttgtatagtccaaggttcgtatatccttcgagctattgggtccaaggaagctgcccagggtaaggcaccagaccacagtatgagaacagacccttcagctcagggcaaccattcggatatggaatggcacggtgaaatggatccctcttaagcctcttcatatgaagagaacctaagcatccataaggatcttcctggaactgagatctaacagcggcttcacccttgacagcagactcccttgcagtcagtgtagcaggggtacctaagaagaagaatctcccttcagggaatccaagagcagatctgtgcaattgcgcaaacctttcctccttaaaatcatagcttacaacagttatattttgcgggtaacttccagtgagttctctaaaccggcaaacgctaaatagggagggtttcaaaactatcacgtgcatgctcctcggtgaatgcccgtctccttacactttcatca

SEQ ID NO: 98444 - DNA, 781 bp, Oryza sativa
  Clone ID: PAT_MRT4530_9634C.1
atggagcaacctctcttcgagctctctgcccctaggtgcgaattctatgagtcacctccttcatcggagccgatttttacagcttgctatgaaattcgccccgaactaatcaaggcattggcgtctaagatagaggaaccatcaatagttgaatcgcaacctgaaccttccacttcgactgatttgactgatgaagcagttcctgagccatcatccgttgagaatgaagaaattcagactctggataatgctccagttctattcagggatggctttgatgaagattacgacaacaccctgagttattttagcaaaaagaaaccacttgttcctttgccacctcccgatcctatggaacttggattcctaagggaaactgtttgggagctgacatatataatgattgacgaatggttaagggaggcagagctttcatccgaaactgagccacaaactaagccttacccactagacatgtggaagtacggtagtgctttgcaacagaggcccgagcttaatccttatagtacccgaggtacgactatcaaaacccaaccacgcacctcgagcccagcctaaaaccaatttggggattttgaatagaaggagcgatgatgtgacttgccttgctcgctttcccaaacgtcggcttcaacttccacgaagagcggatcttccgaagctgcagcgtctacgcgaccgacggaaaagaaaaggcttttactctaataaactccatataacagcagaaacaaagcacaaaaatgggttcttgacttct

SEQ ID NO: 98445 - DNA, 341 bp, Oryza sativa
  Clone ID: PAT_MRT4530_96350C.1
aatggtgatgtagctcactcattaggcaccccaggcttgacactgttatggcttccggctcgtatgttgtgtggaattgtgagcggataacacatttcacacaaggaaacagctatgaccatgattacgccaagctctaatacgactcactatgagggaaagctgggtacagcctgcaggtaccagtccaggaattcccagggtcagacaccacgcgtgccggcaattaccgaaacctcatttttgctaatggcattgtttatttgtttatgcaggtaatcactggaaacacatttttagtgggttgatgaacggttgccgtgttgtttcatgttcatcct

SEQ ID NO: 98446 - DNA, 110 bp, Oryza sativa
  unsure (1)..(110): unsure at all n locations
  Clone ID: PAT_MRT4530_96351C.1
atgaacttnaccaacgcgggcctccctagaccgcgtggttgggcagacttagggtcgcccatcngagttacccgctctggccggaattggcggatcccccaaagtgaccg

SEQ ID NO: 98447 - DNA, 1034 bp, Oryza sativa
  Clone ID: PAT_MRT4530_96352C.1
atgctgccggggtcggtggcgccagctgcttggagcgtcatgttcatgccgacgcagacggtgggcacggtgttgtgctgcatctgcggcgtggcgatgcagcccaacccggccaacatgtgcacgcgctgcatccgcgccggcgtcaacatcatcgagggcgtcccacgccacgccgctgtctactggcccgactgtaccttctaccttcagcccccgcgctcctggctccgtgcgggcccagagtcccccgagctcatgcagatcctcctccgcggcctcaaccgccccctcgcccgtccctctccagcgccgagttcgtcttctccgagccccactccaagcgcctccacctcaagctccgccaagtggatccctgtcctcgatggcgcccacgcccgctcgccctctcccgtgctgacgccggcgctgaggccttcttcaccgccacggcaccgcctggcgagcgaggatagggccccgaagaaggacaaggccccgccgccgtcgtcgaagccggccaagtccggcggtggcaagcagaagaagaagaagtggagcaagggaaagcaaaaggagaaggtgaacaactcggtgctgttcgaccaggccacctacgacaagctgctctccgaggtgcccaagtacaagcagatcaccccctccgtcctctccgagcgcctcaggatcaacgggtccctggctaggagggccatgaaggatttaatgactcgggggcttatccgcatggtctcggttcattgcagccagcagatttacaccagggcaacgaacacataagatgttgtcttatccattttctagtcttatagacctgatgttgccgttctgttaagtttattcagtgatacatatgtgggtgttcatttgccccagtaatgttgaatgttttgagatttttggcacattgttaaggtgatgttatctcggtatctatcttgattattgcccaattaaattgcaccttatacggtgctactgctgtgtcgaaaaaaaaaaaaaaaaaagcggcc

SEQ ID NO: 98448 - DNA, 361 bp, Oryza sativa
  Clone ID: PAT_MRT4530_96353C.1
ggggcaaattaattttttaaaaaacaatcttgggtaccttaaataaaaattcaggggaaatacaaagacccaccattacctgggttgattaatttaaagacaagaaaaccaaacgaaatggcaagcgctcaaaagggagattttttatggcggaaacgggcagccaatccaatgtaaaaagatctaagaaacgtgggctggattatctaaatagatgggcaagatccttgaggccaggcttttcttgtacaacatatttaaggcttgaaacttgtcatcattatttttaccgttgaccaaaacatgatgatacattatgacgtgtgtacaaattcaacccttgaaccacacccggatgggg

SEQ ID NO: 98449 - DNA, 1056 bp, Oryza sativa
  unsure (1)..(1056): unsure at all n locations
  Clone ID: PAT_MRT4530_96354C.1
aactgcnnngaagtncncaccngtggnngngccgttctagactagnnggacccccgggctgcttgcaccccgagcagaagccgccgccgccgcccgaaaccctcgccgccgncgcttctcctcggggcgcagccatggnggccgcaaagaagacgaatttgtccacggacaacatcaacaacaagctgcagctcgtgatgaagagcggcaagttttcgtgcggcnacaagaccgncctcaggacccncaggaaccccaaggcgaagcnagggancannncnaacaacggcccaccncnncggaaggcagaaanngagnaccacgcnangnnggccaagggcaccgnccaccacnnccacggaaanaaggncgancnggggacagccngnggnaaanaccaccgngnnggcngccacagcannanggancccggngacacgganancancaagaccacgggngagcaggaaggangagcggnnccgcnggcgcaacagaagcnggcacacngagcngagcnagacagagcagggggagccggacccgaagagggcagaccggggcagcgaacagcggggaccagggaaccaaaggggcgggggaaacaaggggccgggaggggaaaaaagaggggcccggcccgaagcgaagggggaaagagaaccgcgggccgagagaggacggaaccgggggggcggaagaaagagagaggaaggggacgcggaccgagaaaaggacgagccagcccaggcaccacgaagagacgagaagaccagggggggggccccgagcacgcggaggcgaagacgggggcagccacgcacaaccgcgcgggaggacaacgcaggaccacaaacacgggaggcaccgcgcaccaacgagccacgcccgccgcgcaggcgagaaaaggggacagcacggcacagcggagcaggggagggaggggcccgcgccacggcccagaccaggcccaaggcaacacccccccgcagagggcaggggagcgagagggagaggcggacgggagggcgccgacggccgagcgcaccacggcca

SEQ ID NO: 98450 - DNA, 746 bp, Oryza sativa
  Clone ID: PAT_MRT4530_96355C.1
ccgtccgcgagcgccgccgccgtcgcagcctcccttctcctctgctcgccccgccgccgccgccgtctccgcgccaccgccgcccccgagatggccccgaagaaggacaaggccccgccgccgtcgtcgaagccggccaagtccggcggtggcaagcagaagaagaagaagtggagcaagggaaagcaaaaggagaaggtgaacaactcggtgctgttcgaccaggccacctacgacaagctgctctccgaggtgcccaagtacaagcagatcaccccctccgttctctctgagagactcaggatcaacgggtccctggctcgtagggccatcaatgatttgatgacacggggcctaatccgcatggtctcggttcactcaagccagcagatctacaccagggcaaccaacacctaagtgtgagggtgacatgcatctttgtttgccctgaatgtgtacggggggcttgcctactctagaacagctgttacctttgtcgagtttgctaatgttatgttaaatgagctacttgtgatggtcagcatctctatatggctgaaacatttcagagattttggttattagttgagtactgttcttgtttgccctatataactttttccgccctcgcggccggtgtttgtttggctggttgaatcatgttggtatcataggtgtttcttgttgcgacggtataattgaagttcggtacttttggtattaaaaaaaaaaaaaaaaagcggccc

SEQ ID NO: 98451 - DNA, 2045 bp, Oryza sativa
  Clone ID: PAT_MRT4530_96356C.1
aggagcggcaatccgaaggagcgcctcctcccgatgaagaccatatgcggatccctcatgcacgagctccaggtcatctgggacgaggtcggggagcccgaggccgcgagggacaggatgctgctggagctcgagcaggagtgcctggaggtgtacaggaggaaggtggaccaggcgaaccgctcccgcgcccagctgcggcaggcgatcgctcaatatgaagctgaactcgccgccatctgctccgccattggcgagacgacggtccacgtcaggcagtctaatcagaaagcatgtggattacgggatgagctcggtgcaatattaccatacctagaagagatgaagaggaagaaggttgaaagatggaaccagtttcttgatgtcgtaggaaggataaagaagatctcatctgagataaggccagcaaattttgacccttttaaagtgtctgtggatcaatctgatctatcattaagaaagcttgaagagttaagggtggagctgaagtcccttgaaaaggagaagggtgagagggtaaagcaagttatggaatatttgaagactttacattctttatgtgtagtacttggtgtcgacttcaagaaaacaatatctgaaatacaccctagtcttgatgaagctgaagggccaaggaatataagcaacactacaattgagatgctagcatgggcgattcagagacttcgtgaaacaaaaatgcagaggatgcagaagcttcaagatcttgcatctaccttgctagaactatggaatctaatggatacgccatttgaagagcagcaggcataccagaatataacatgtaatattgctgcttcagaggctgaattaacagaacagaacaccctttccattgagttcctcaactatgatgacaaccggtataatgctgggagaggtgcacacattatgcttaagagggctgaaaaagcgcgtgttctggttagcaagattccaggtccacggcaaacccaaaagccaccaccgcgttcgcggctcagccagctctcgccgccacgcgcaattcaccgcacccgcccgcgctatcatcccacgccacacacacgcgctcacggacgaacacacccgcgccacacgatccatcgccaacccaacaaaccactctcccggtggtctcctctcctctcgcttcccatcaccgtcaccttcccccacacgcgttcccaagcccgcgcgcctcctatataatccgcggcttcacccgaatccagccaactaaaactaccacttcttcttctcgcagctcaacgacgacgtcttcgttttcttggcttgcttgcttgtgagctcgtggccttgccgttgctggtttcttgacatgggcaactacttgtcgtgcacgatggcgaaggtgccaggagggaagggggcgagggtgatactgccggacgacggcgggttgaggcaggtggcgctgccggcgacggcggcggagctgatgatggacgcgccgggccacttcctggcggacgcgcgcgcggcgcgggtgggcgcccgcctcgccgcgctgtcggccgacgaggagctggagctcggcgcggtgtacgccacgttcccgatgaagcgcctcggcacgccgctggcgcccgcggacatggcgcgcctcgccgccgtggccaccagggaggcccggcgctcggccaaggtggccgccgcggtcgtggcgccgccgccgacgccgctgcaggcggaggacgcggcgccgaggctgcggctggatgagatggtcgacgacgaggcggtcgccgccgacatgaacgtgtacaagcaccggctgagcagagcgcgctcacggaggccgacattggagaccatccaagaggagaactacatgtcgacaaactaaaattatacagcttagccagcagctcaccttttttttattttctcttttatgtgcgatattgtttctattatcttttctgagatctgaattggaaaagatatgtaatgaaacagagaaagatgtacagtcaatttttgtaaagaaatcaagaaca

SEQ ID NO: 98452 - DNA, 917 bp, Oryza sativa
  Clone ID: PAT_MRT4530_96357C.1
gcaaaaggctaaagtaaccagacattggattaaaaaaaagtcattttaccagggcgaaaggcctaaccaaaatggcatcagataaatacacaagaatggaatttcaaacatgtcactatggaatataccggtaagaaggtatccatttacatcagaataggtggatatggtgaattggtgaatcctcaatttgaaggaccttacagaatctccgtctcatccaattgtgttcatatacaaatcgattacctgcatttggactaaaccaagtatgtgcaggtataattcaatgatccacccatccaggttgggatgaacaagtgatcgtggaacctctgctttcccgattcatacgatgatgctctgaagttataaaaagcatcaggctccatgcctgttaagccccaagcatcaattcattaaaaacaatccacttctgtaacttggtctagttcatatgcagatcatagtttatggagtactacataaatgcaacaattttgatcacagaatagtgaatattaaacaaaattatgcaagtttgtaatataccaaacttgtcatgtttaactactttaagattcagatcatctttcctagcttcataagaatcaaaagtcaaatgactccttccgctacaatgcccagaactgcaatgatgaatgtcaaaacactagtatggctgacatggagttccagctcaaaacttatccagatctaaattgattatctactatatgtctggtgaccaaaagatggtcaaacctttcagctagtttacatcataaacccttttcttattagtcgattactccagccatctatgaacactgtgctccattatctaaaaaatgaacactgtgctccattctgacagcctcacaaacaagtctcaagtaagtaacttctgaggccct

SEQ ID NO: 98453 - DNA, 300 bp, Oryza sativa
  Clone ID: PAT_MRT4530_96358C.1
atggtgcagggaggagaaggagggttcgggttcgaaggaaagattacagcggcccaagattcctcctctttcttctcgccgccgcccgacggccgccgcgccgctacccccggcaggaacttctgggtcgtccttcccttctttaccaaacgcaacagcacacaggacaggagattcaccgagtcccggactcaggacacgtcgcgtgttgtgaccggcacctccatccacgccgtcgtggccgttgtcgtccacgccgctagggccatctgtctgcatactatcggcaggtcatcctga

SEQ ID NO: 98454 - DNA, 553 bp, Oryza sativa
  Clone ID: PAT_MRT4530_96359C.1
gaattcgagctcggtacccggggatcctctagagtcgacctgcaggcatgcactctgcgaggaccatgtgccagtgctcagctcgtcggtgccgaagaagaggggcgttggtggcgtctgaggccctacctcgccgaagcctgcattgcctcctgaggtcgatcctgggaaagagggctgcggtggtgttaacagtgaaatttggtaagccctgaagacattatcgacctaaaatcagtatcggcttcagagttctggaatcggccaatgggagttatcaagtcgctagcagtcggattcttggaggattcgcccgcttcttgattgccaataagggtttcatcagagtttcagccgatttgatgacatcggatattcagccgatgtatgttttaaccttcggatcggtgattattctatcatatcattgttagccgattgatttctactggatattattatggtttaattacattaccattagtcgattgttcaaaaccctatcgacatcggctggaattattccatcggcttgtcagccgatcggctcatt

SEQ ID NO: 98455 - DNA, 937 bp, Oryza sativa
  Clone ID: PAT_MRT4530_9635C.1
cgtgttcaactaaagcaacccgggggctctccaaatgagctccatgcgaccaacacttaccgggaaggcgcaccggcccctaagattagccccgggaccactcgtcagagggaacggcgcccaaagcgggtaggaaagggggaagagaacgccgggtcccgggctcacccccggtcgacgccggcgtcgggaccgcgtccagaaccgagtaagccgccggcgcggcttggttcaacgaggaccgccggcgttccggcggtcggcgggcgaaacggaggggtggacgaggtcggcgaggtttcggcgaacccgaagaaggcgacgcccgaaacgggaggaggtccggggcgacgacggcggcggaccggagctcggcggcgacggcggagagagagagcgacggcgcgagctcgattccggcggagagagagagcggcgagaggcggaaccggacggagggggtgcggggagggtttaaatagagccggggcgagagagggtggccggggaagggaggaaaccggcgcgggaggtcggccgccatcaatggcgccggcgggattaggggagcggtttccaaccgaatccgagggagagagggagggaaaaatggggggaaagagagagggaatcatggggagtgatttccccctctttattgcgcgcggggacggcgggaggcggcgggattcgcggcggcggcggcgctagggcacgggcgaggcggcgggagcggcgggaggatagggatgacaggtgggccccacccgtcagcgagggtggcgggcgggcccgcccgtcagcggcgcgcgcgcggggagaggccgagtgggccgcggggaggaggagagagagggagggagatgggccgagccggcccaagaggggaaggggggaaaaaggactttttagggtttttctttttataaaacctttt

SEQ ID NO: 98456 - DNA, 192 bp, Oryza sativa
  Clone ID: PAT_MRT4530_96360C.1
atgaaggagaggggtgtatacgacaccatcgacgttatcgggaatgggaacatgcaacgtatagaaaagctggctgctgcgaagaagtcgaattttagagttaagctgcccttcggagttaagctgcccttcgaagcagagtccaggaagcaaagacaagtcgatcagcgtgtgcctagccttgggctttga

SEQ ID NO: 98457 - DNA, 1121 bp, Oryza sativa
  Clone ID: PAT_MRT4530_96361C.1
atgaagcgacgagctcgctctttcctcttccgccctatcgccggcggcgcggctccagcaaagctcggcggcgtgctccggcgaccaaggaggccacggaatactgagaggatcagtggaagtgagggccggacctccttagggcggagtcgaaatttcgtagcagttgagaatcttcgcaggtactggagggcggccatggaggagctggagttgcctctccccacggagaagctcgccgtggatccgggcagggagggaggaaagcgaggtgtggctgtgctcgtggccaccgggagcttcaatcctcccacctacatgcacctgcgcatgtttgaactggcaaaggatgaattgcagcagcgagggtattctgtcttgggtggttacatgtctccggtgaacgatgcttacaagaagaagggccttttatctgcagccaatcgaattcgcttatgcgaactagcatgtgaaagctcatcttttgtgatggttgatcgatgggaggcaatgcagaaaggtttccaacgcaccttgactgttctctcgagaattcggaatgctttgtccaaggatggtttagctgatggagaagagcttgctttgatgacaccctcttctgtatctaggtcaggatcatatgataatattatttcagttgatgagattgttccaaatcaaataagttcgtctagagtaagagaatgcataaaaaaatgcctatcaataaagtatcttgtatgtgatgaagtcatccagtatattggagaacacaaactctacaaggaagctgacggcagtgatacaagaaaatgacatggattgaagtttctggctcatctgcaaaggatgttgttaaacagttgaaggtaaagatatagatacatattttctatctattcattctccctgtttacctatagtcgagctcacaacgttgcatgtgtggtgatgccttatgtatgataccacacctgcacatgttttgatttatgctagcccattgtgcagctctggactctgtatacatgaaactccaaatattgttgtgccatgcaacattagagtcattgaggcacatgaattgttcaagtggtgttcaatgttttccatgagccctt

SEQ ID NO: 98458 - DNA, 246 bp, Oryza sativa
  Clone ID: PAT_MRT4530_96362C.1
cgtcgattccgtcaccaccgtcggtgctatgtctgatggtatacatggggctgatgtatggatctactggtatattacacttgggctggctgaagttatttggcatcaaattgaattgtttacagagaaaaaaattggcagatttaagacttcccaagcagtgattttgaaacaatcgtagtttgggaggtactcaagacaaaaggaaatgcctcaaatatgggctggagatctattcatgggatg

SEQ ID NO: 98459 - DNA, 1553 bp, Oryza sativa
  Clone ID: PAT_MRT4530_96363C.1
aacaatcaatattatcattgattacttttagatgaatatggctattgttagtagcaattagcagaggtttacatgacaaaggtggtgcttttcgctaaatatttaaggaaaaatactacacaagaggcttcagatcagcaagccccctcaaaaaaaaaaaaagatctcctaatgaactgggaaacacatacgacgtttcaccctagttcctgatctttacaagatgtgcaatttcagttcttccatataaaagctacgcttcagaaaacagagaatttctggaatgcatccaagctgtttgcaagtaaatcgctcacacttaaactgtcggtgccactcaaaagtcttgaacaagatgctccgacttctggctccccagtcgattcagactgaaaacaagatgctcccagtcttggctccccagtagattcagacactgggatgtctggcttcacattattgtcatcattggccaagagtgatgcctgagggttcggttcctctcttctatcttcagtagaacattgcttctcaccgtctgtaccagattccagaattgtgcctaggacagacaaggtactagcaccacaactgctaggagttgtaccaggtgtcctgcgtgaaattcgattctgggaaggaaatgcatggcacgtttcttctgcatcccaaagggatggagttgacaccttcggctggctacttgcttgttgccgagcaatcagggaagcaatagcagcatcaaatgaatcagcggtaagaggtatctgttggagacttgagttgttttgtggaagtaactgcttgctgtcttgagaaggcgcagcttcagctaatagtgctccaaaacttatattagatatgcagtcaatccatgaaagtggtgtctctttgctttgattatcctgtttcatagtctttactgtgttggcctcagtggacggtgcagcaaagttactcgggaattcactcaaagcagtcatctgtttctgttcccttaagcgaaatgtcgaagggctgccaacagcaacatgcacatcagctgctgtgcaagaatcactacgagtccatctctcactgccatttatgttatcaagcctagtaccgtcagggaagagcatgagttcacctcttgcacactgagaattgccccattttgtgttgagatgctgcagaactgaggatattttctttcgaggagccacagtcaattccaggtaaggattgtggtttttctgctgcagggacttctgaaactcctcatctattgggaacagttgaagtgcgatctttccagaatggcagggtggtcgagcagacacattcttagaatcatggaacagtgcttccataaagctaccatcctttggtgcactttgtttttcagtatacaattgaggtgatgaggcaccagctcttctgtattttgtgctagcattgcctgatgatttgttgatatattttccaggtttcaggctttgcatcgtactgccaccaagttttgccgccgttcctgtatcagttggtttacagcgctgctgaagaggtttcat

SEQ ID NO: 98460 - DNA, 577 bp, Oryza sativa
  Clone ID: PAT_MRT4530_96364C.1
ccggccggatgaacctctaatccctgatcgactatgtcctgctccggcggcggcggattgtatcgagacagggaggacatggcgccgccgaagaacggcccatgtggagggggaacaatggatgcaaacgaaccaacgtacatgccttacttaataaagactgtcgtgatatacctgtaccgtcacattcgaaagcgcaacgcatacgagacacactagatgtacgaagacaggttaacccgactgttcgagcggcactaacgcatcacgccgtggacgtctccttaggtcatgtccagaacagatgagaatcagaccaccagtaactcctgatttaccgctagcgattggtaacggcaagaacacgctcaccaacatgtggctgactgcggcgcactacgcgataggctcagaacacttactgataactgttaaacactgatcgaggctgatgtggatgcaagaaccacagacagctacgtgctggggacatggtggatgagcttgaccaacaggtgcactaatcatgtcaagacgactcgctgttctcaagcaagacccatcaggacgaattccc

SEQ ID NO: 98461 - DNA, 372 bp, Oryza sativa
  Clone ID: PAT_MRT4530_96365C.1
atggcggcggcggcgaagaagcggaggccggaggaggaggaggcggcgggggcggaggaggagatgcacctggcgttcaggggcgccgccaacgcgctgtcgcaggtgtacgggcaggccgtggccgcgcaggagaagtcgttccgcgccggcgagcgccgcgccatggagaatgtctatcgatggatttgcagcaagcatcaagaaggtttggaggtgtctgttgccgatctagttgctttcctgcagttcttttctgttgcttgcaaaaaccatgctctggttaacaaggatcaggaggacgaggatggtgcattagttgttgatgaatttactgctgtgttccatatattcagaccatacattggttag

SEQ ID NO: 98462 - DNA, 330 bp, Oryza sativa
  unsure (1)..(330): unsure at all n locations
  Clone ID: PAT_MRT4530_96366C.1
gctttatttatncttgttccnactgatgtaaatacccgtggacttgacatacctcatgtggcccatgacactcaatgtgtgacctgccagatgacatagatgactgtgctgatcntatcggaggaacaggaccagcanctaagactggattgacaactgcatttgtcaacgagtccaatctattcctggcaaggccgatatgtgagctaattcaggaagcataccatgaggatgctgactggatcgaacgatgctcagcccggacttggttaanagacaatttatacataaacctgctatcactccgtgcccgttttggtggccagaaca

SEQ ID NO: 98463 - DNA, 2613 bp, Oryza sativa
  Clone ID: PAT_MRT4530_96367C.1
attcaattccatcatcttcaggggagtttgatgagatgaatcagattcaggccatgtgtgaatatgtgaagggcaccagcaggcagcagctgcacaagatagagtaacagtattaattagccatagttgttcagaacaccgaatttgactattgatatcagcatgttgcatgcagatctccaggcaagttgctgcgtacattgcatcactctctttgaaattgattctgtctctgcatgcatatccaataaatgaaagaatcagatggtcaaacaaagcgaaccaggtccatggatctgcacaaaagcctttcaaacttctttgacatgcacattctatccctttgaacacctccgaaaaactgaagcagcatatcttgagatcatgggcatctcgacaggtacatcgcctaccagtcactggcgaaactaacatcaggatgaagccgcagtatcgaatccagcaagaggctctggtgagtaccactgggatgtctggcttcacattattgtcatcattggccaagagtgatgcctgagggttcggttcctctcttctatcttcagtagaacattgctgcagagacaagccgataagcaaatgcatagtgtccttctcaccgtctgtaccagattccagaattgtgcctaggacagacaaggtactagcaccacaactgctaggagttgtaccaggtgtcctgcgtgaaattcgattctgggaaggaaatgcatggcacgtttcttctgcatcccaaagggatggagttgacaccttcggctggctacttgcttgttgccgagcaatcagggaagcaatagcagcatcaaatgaatcagcggtaagaggtatctgttggagacttgagttgttttgtggaagtaactgcttgctgtcttgagaaggcgcagcttcagctaatagtgctccaaaacttatattagatatgcagtcaatccatgaaagtggtgtctctttgctttgattatcctgtttcatagtctttactgtgttggcctcagtggacggtgcagcaaagttactcgggaattcactcaaagcagtcatctgtttctgttccctgacaacaggatctaaaggctcgttgtcgattatattgcctgcagagtgcactaatcctaaagatactccactgttttgttccccaaaattgggtggaaaccaaccatatcttaagcgaaatgtcgaagggctgccaacagcaacatgcacatcagctgctgtgcaagaatcactacgagtccatctctcactgccatttatgttatcaagcctagtaccgtcagggaagagcatgagttcacctcttgcacactgagaattgccccattttgtgttgagatgctgcagaactgaggatattttctttcgaggagccacagtcaattccaggtaaggattgtggtttttctgctgcagggacttctgaaactcctcatctattgggaacagttgaagtgcgatctttccagaatggcagggtggtcgagcagacacattcttagaatcatggaacagtgcttccataaagctaccatcctttggtgcactttgtttttcagtatacaattgaggtgatgaggcaccagctcttctgtattttgtgctagcattgcctgatgatttgttgatatattttccaggtttcaggctttgcatcgtactgccaccaagttttgccgccgttcctgtatcagttggtttacagcgctgctgaagaggtttcatggttttctgatattcagcagcaaaactatctggtgtgcaattttgtaatcctactcctgcacccggtccacgggggcctcgtgcgccgctgccactgccaccaccataagacgacgccgccatcgccgcgtcacgccacgccacgccacgcgcacgccgcggcagcgccagcgcacggctcgtcctcgtctccgtgcgtcgccgacgtggggggtaacgggggtttggaagcttcctcgctagggcgggatggcggcggcggcgaagaagcggaggccggaggaggaggaggcggcgggggcggaggaggagatgcacctggcgttcaggggcgccgccaacgcgctgtcgcaggtgtacgggcaggccgtggccgcgcaggagaagtcgttccgcgccggcgagcgccgcgccatggtacgtccttggcctccgcctgcccgttcccctccccaccgatcggtggccgagtcgcctgaagaactgcgttcttggggccttgagtcttggggtccggtttagttttgggattttacgcggagatgcgaagggggatgggatcctgcttcgagttctttcgagttgagactgagattgagcacagagcaggggaggtgccggggtcattgcagcatacaagtgcacagccagcatgtcaatttccttctgcaaatgttcaaagcaattcgttctcttttgggaatgtaacggatgcacttaactcccatacagcgcaaactggccaaacacaaactgccggcatgttaaatgctccgcccaacccattgcggcaaaatttacactcaaatcatcatccgattcattgttcagcgtatggcactatcaactccctaccagatggaa

SEQ ID NO: 98464 - DNA, 237 bp, Oryza sativa
  Clone ID: PAT_MRT4530_96368C.1
atggtgtggaggggcctgctatcccgcaactactgctccagtagtcgttgtgacgttggctgcggtgacaccaggtggggtgcctgctatccaactgtggtgaaaggcagggttttgcgaacagacatgcgactgtggagactgtggagtggccttgcagatgttgtggctgatcatgttaacgccaagatgcatgttggtgttattgttggtgcgatccatggcggacggggataa

SEQ ID NO: 98465 - DNA, 121 bp, Oryza sativa
  Clone ID: PAT_MRT4530_96369C.1
attagtaaaacgacagagccttctgcacttgggggccaagcatgaagtaacttattcttgtgttcaactccttttttcaaaattggaaggggtttttaacccgcttccctgacactcttag

SEQ ID NO: 98466 - DNA, 699 bp, Oryza sativa
  Clone ID: PAT_MRT4530_9636C.1
atggcgtccatgctctgtgatcctacctgccccgttgaggcgcaactgctacgattgcctgatgggctaaccattgcaggaggaatgtacggctggggattctgggaccgatggagcgtgaacgtctcgagcattgtggtccacatcatctctttctctgattccgggacaaagctgtcattatccccgcgtgcccttgttctacgccagtacaccatgctgacaggcaccgttcattcacgttcgttcacgtttcgttcacgttcgttcacgttcgttcacgttacgttcatgtttcaatcacgttcgttcacgttcggcaatgtcggggcgcgcagcagtggcggcagcggagcgctggcgtggcggcgcggcggcggcgtttcgtggcggcgtcggggcgtctcggcggcgtggcgtggtccggcggcgtggggcggcccggcggcgtgtgggcgcggcggcggcgtcgtgtcgcggcagcgtggcgagctcgaggcgggggcgtcggcgacgtcgccgtggcggccgcatggacgttacgtcgtcggcggtggtggccgcgtcgaagtcggagtcggcatctgcaggaggcgtagtcggggtcggggtcagccgcgagcgtcgaccggcggaggcggcgaggaccgcaagacgacggcgagagacgacggcggcgtcggcgtggggttgccctag

SEQ ID NO: 98467 - DNA, 2986 bp, Oryza sativa
  Clone ID: PAT_MRT4530_96370C.1
atggcaaagaagagttacaaacagcggtgcaaatctgagaaggtccatatgggctgtatgtcgggcctcatccacatgtttgacttccgtcgcagtccaaaacttatttcagatgggacgattaggaggagttcagtcagaagtgacctgaaaggttctgaagatttccatggaatcatcttttctgatgaggacaaagactatggggttaaaacaattcatgccagcaggccaagtattaaagcactgatggaagaagagatggccagtggaacgcagatcttgaaggaaacacaaaggaacatatttgggatacgttctgatgatttgaagtctgtgaacctgcaggaaggatctgatgttgacctagacttggctacaagtctcatggaattatacagaaatcataatggcagtcgcgatattatcacttcggaagtatcagatcactcttccagtttgattgacaaagagcacaatactgatgctagtactcatcctaaacaaatctcctgtagtatagagaaagcacttgaagctgtggctgaagcagtaataacccatcaatctgcaaacgggaaatacacaagcagcagctacgaagctaggcccaatgaatttcttgatgcattacaattgctgagcgcaaacgaagagttctttctgatgcttctgaaagacccaagctctaggatgttgcaatgcctgcagaacctgtacacggcactaggaaatcccatgttagaactggcagaagatgacaaacaaacaaagtcgaaagttaccattaacagtctagagcagtctgaggtttcgaaatacagcgtgcaaaaaacacataattttttcttgaaggaggataagctagtcatgaggagaccaccaaaactgaatgatagtcctcgtggcgttagcagaatagtaatattgaagccaagtcctggaagaagtcagactagtctgatttcaagtagtgcaatgtcgtcaccagtacaaactcgtgctgatttgcaaggtcaggaacaaagtgacaaatatgctcgccatttctcacttagagagcttaaaaggaggctaaggcttgccattagtaacaatcgaaaggatgtcatgagtagtactttccagaaagatgattcaacacaacagttcattctcgagagtatgtcgacaagtatggactcttctgaatgtgaaaaggctgagaaaccctcaatagttgacaagaaaacaatccctgaagatagtggaagtggcatggggaatgatgccactcattgtgctagctctttcttctacgaaaaagctaagaagcatctaatcgagaggctagacaatcaaaagaatgacacttctcagatcgtacacaaatcagaaccctttgggaaattactttcatattcggagaatgatacgttttctcaaactgattgtcctcaagaggatgttaaactgtcagaggattcgactgcttcatcagcattactgacgactgaacaagaggatatttcatcaaattctgacccaccaatgaagtttggggagctaataccattggacaccagcacatcggctaacacacagctggatgaatttaagacagaccatgccagtcatccagtcaaagagggcactatctcgcaggagttaactagtgaagggattgacagcatgaatgatgcaacagataccccccaagtctctattcagatcgaaacttcaactgaaagcttggaacaaataaataccgaccaatgcttcgcagaagagtcacaaaccatgaatgcattaccagaagtatccctgcacactccagaaaaagttaacgagcaattcaatcatagtccatcggcagttgttggattaaccaagccatccatcttgacattttcttgctccccggagaatgcagatgacaaagaggagagactgagccctcaatctgttctagattctttcctgggagatggtatcagccccagccacaaaactcgaacgcaagatgaattgtccatgccaagcacaaggattctgtttaaagaggatgacactccctcgggaaccccaactttgcaaaacacaccacaagaagctattttggatgataaacaggcaaggctttccttcataaaggttgtgcttgaggcttcagacttcttgtctgaggaaagttcagagatatggtatgtggacggatcactgcttgacacatctgtattggctgaagtaggaactttgtactgcctgacagacgatgcggtgtttctctttgattgtgtggaagaagctctttgcaagatcagggataacttttttggttgtgacccttgggtagcttatctgaaacacagtgtgaggccagctccggtaggaacagggctcattcaagaggtggataattgcatcgattctcttgtcagtgatgaggttccaagtacattagatcgggtggtgctgaaagacctggagagtggatcatggatggaccttcgggttgatactgaagaagttgctatagaggtgtgggatactttgcttgatgatttactggaggaaatggtgtttgacttgtggctttaagattgttttgttgccatccgatggaaactgatagagtttatagttcggcacttcggcaggattttattcaccaaaaaccatagtacaaaaagctttgaaaaagtgagtgtgacagatttaaacagagtgtatacagcgcagtagagttaggcttgcctgactgtttgcatcatactataaatcttgactatatgtggctcctaacactaggaatttttcttcttattaatgcttcttctatcatttctgttctctgtacaggtgtgaaagtaggaagaataagttcagttgtatatgtactgcctaattatagttttttttttcctcatgaaagtaaaacaatttcccttgtttatcagatacaccatagtgctgctccattttaagcaaaattaaaaaaaaaaaa

SEQ ID NO: 98468 - DNA, 270 bp, Oryza sativa
  Clone ID: PAT_MRT4530_96371C.1
atgtcggcggcggccggcgaggtggaggcggcggtggtcgtgggggcgcggcgcgcgagctgggagccgccggagcggcggcgatcggtggtgggtggccgcgaaggtggcggcgcgaggaatcaacggctcagcttagccgggagccttctctcggggctggtccatgtgggcccccacaccccggttaggaacaatagttctgatgctcctacttcgtactacttcctccgtcccacaatagttatgattctagattgtctagaatag

SEQ ID NO: 98469 - DNA, 2706 bp, Oryza sativa
  Clone ID: PAT_MRT4530_96372C.1
atggaccttgtgggatcgctgctggtgaacatgactcacttggttgacacctcggggctccagttcttcggctggctcatcaccgccggctccttcggcctcgccgcgctcatctacgccctcctcaggctgcagagggcggcgtcgctgtactggatcaaggcggctgccagggagaagaaggcggcgtggaagtcgttgcggtgccccagctccggccacacctggaccgaggactacttccgcggcggccagccttcgacgtgctgcgtgtgcctgtcgtccctgaccacagctcagggtgtgggctctcggggtgccgatgccgttgtggtccaccgctgctcggtgtgtggggtggcggcccattctggctgctctcgtggcgccgagaaggactgcaagtgtgtttcacagcatggtgcttccaccttgcttcatcactggtcggagaggtgggtggagctggatgacaacccagagatgtcctctttctgttactactgcgatgagccatgtggtgtgccatttctcggcgtctctccaatatggcgctgcctgtggtgccagcggcagatccatgttgattgtcatgcaaagctgttaaaggagacggggaatacttgtgatctaggccttctcaggaggctcattgttcctcctctgtctgtgaaagaagttgcccaaggaccagcaattactggaatgctcaactcgatcaaggaaggtcttgtcacttcatcagttaggggcaggattaagaggcgaggcaacaagaaacgcatgaacaaccatcctggtggtaagacaagtccagtccccacaaacagctctatccttgattctgtgcttgaagggtttgctagactgcagaacttgaatggaaagtatgcgctggcaaaccataagtctagtggggattctgtcaagcaaacacatggatatgacagccctaatggagggaagaaaaagtatgaaatcattgatttgccacaagattcaaggccactgcttgttttcattaacggcaagagtggaggacgaaatggaccttctcttagaagaaggcttaacatgttgctaaatcctatccagatatttgagcttagtgcttctcagggacctgaagttggattgcaatttttccacaatgtaaaacacttcagaatccttgtttgtggtggggatgggactgttgcatgggttcttgatgctattgaaaagcagaactatgaatctcctcctcctgtttccattcttccattaggaacaggaaatgacctatctcgtgttatgcgctggggtggaggtctgtcttctgttgaaggacaagggggaatatgtgcacttctaaatgatgttgaccacgcagcagttaccgtgcttgatcgctggaatgttgccatcaaagagaagaatggagcagaagatcaatgtgttggatgtgatgccaaggttgcatatgacttccacactacgagagaggaaaaaccagataaattttgcagccagtttgtcaacaagctgatatatgctagagaaggcgctaaggatatcatggataggtcatgttctgatttaccatggcatgttagtcttgaagttgatggaaagaacgtcgaaattccagaggacgcagaaggtgtgattgttctgaacattcctagctacatgggcggtgttgatctttggcaaaacgacaatgaacatgatgatgattttggtttgcaatccatgcatgacaaaatgcttgaggttgtctgtatatctgggacgtggcatctaggaaaactgcaggttgatggtgagccatggatccagccacccgggtgccttgagatatctcatcgtgggcagatgttcatgttgaggaggacatccgaagaacccaccgggcatgccgctgctatcatgagcgaggtcctcatgaatgcagagtgcaatgatgcggcgggggaggtttacgagcagttagatcggatgccggagatggctgcggtggaagtgtttggctcgatagcgccgttcatggaagcggcggaaaattttagggttttgattcaagagacacgagccaaggcggaggaggcgtgtcggcttgcggttgtgatccaaaaggcggtggcggcggcggcgctgggtggaggcagttgggatgcggcggcggcggaggaggtttgcaagaaggcggcggcggcggtgggtggaggcagttgggatgcggcggcggcggcggaggtttgcaagaagggggcggcggtgggtggaggctgttgggatgtagcggcggcgtcggaggtttgcaaggcggctgatgtaatgctcaaggaggtggcggcgcccgcgaatctgataaaggaggggacagtggaggacgaggctgaccagcctcttattctaattccggcatcaacaactagggtttttggcggcggtatgcgtcgattgactcaaaggacaatgttggttgacgatagcgaccacacggcactgtttgagaagaaggcaagcgtcaagcaaatcggcatcgaggagatgaggggaaaagctaaggatgtgagcagcgaggagggaaacagcgaggaggtgaagtcaagcgactatgatgaagacatggtcattaggggatatgcgcaaaatccatatgatgatagtggcctagaagacctcctgcaagaccaagatgcattggaaaaatcggcctag

SEQ ID NO: 98470 - DNA, 514 bp, Oryza sativa
  Clone ID: PAT_MRT4530_96373C.1
cgacaggcacacgcagcacgtcgaaggctggccgccgcggaagtagtcctcggtccaggtgtggccggagctggggcaccgcaacgacttccacgccgccttcttctccctggcagccgccttgatccagtacagcgacgccgccctctgcagcctgaggagggcgtagatgagcgcggcgaggccgaaggagccggcggtgatgagccagccgaagaactggagccccgaggtgtcaaccaagtgagtcatgttcaccagcagcgatcccacaaggtccatcccaattagccgccaggcttgacagcctcagaagcagaaccctcgatcggcctcgtggcggcgggggcgcgggcgggttcaaggggtggagcaaaccctagctctcgcttcagcttcggctggcggcccctcgctggctggactgcggcttcgcgggtttctccgccgcgtcggtcgcgtcgtggtggaagggaggagaggcctcgtgcgattcctgcagcccggggatcca

SEQ ID NO: 98471 - DNA, 1643 bp, Oryza sativa
  Clone ID: PAT_MRT4530_96374C.1
gcatcaatcacaccattgcactgtgcattcaagaggacctcgctcatgatagcagcggcatgcccggtgggttcttcggatgtcctcctcaacatgaacatctgcccacgatgagatatctcaaggcacccgggtggctggatccatggctcaccatcaacctgaacagggaatgaactgtggagatgcaaccttataactttcccttgggctagcctgtgtgctctagagagtcccacctgcagttttcctagatgccacgtcccagatatacagacaacctcaagcattttgtcatgcatggattgcaaaccaaaatcatcatcatgttcattgtcgttttgccaaagatcaacaccgcccatgtagctaggaatgttcagaacaatcacaccttctgcgtcctctggaatttcgacgttctttccatcaacttcaagactaacatgccatggtaaatcagaacatgacctatccatgatatccttagcgccttctctagcatatatcagcttgttgacaaactggctgcaaaatttatctggtttttcctctctcgtagtgtggaagtcatatgcaaccttggcatcacatccaacacctatataattagtcataaatttaacttgcttggtacattgatcttctgctccattcttctctttgatggcaacattccagcgatcaagcacggtaactgctgcgtggtcaacatcatttagaagtgcacatattcccccttgtccttcaacagaagacagacctccaccccagcgcataacacgagataggtcatttcctgttcctaatggaagaatggaaacaggcggaggagattcatagttctgcttttcaatagcatcaagaacccatgcaacagtcccatccccaccacaaacaaggattctgaagtgttttacattgtggaaaaattgcaatccaacttcaggtccctgagaagcactaagctcaaatatctggataggatttagcaacatgttaagccttcttctaagagaaggtccatttcgtcctccactcttgccgttaatgaaaacaagcagtggccttgaatcttgtggcaaatcaatgatttcatactttttcttccctccattagggctgccatatccatgtgtttgcttgacagaatccccactagacttatggtttgccagcgcatactttccattcaagttctgcagtctagcaaacccttcaagcacagaatcaaggatagagctgtttgtggggactggacttgtcttaccaccaggatggttgttcatgcgtttcttgttgcctcgcctcttaatcctgcccctaactgatgaagtgacaagaccttccttgatcgagttgagcattccagtaattgctggtccttgggcaacttctttcacagacagaggaggaaccatgagcctcctgagaaggcctagatcacaagtattccccgtctcctttaacagctttgcatgacaatcaacatggatctgccgctggcaccacaggcagcgccatattggagagacgccgagaaatggcacaccacatggctcatcgcagtagtaacagcaagaggacatctctgggttgtcatccagctccacccacctctccgaccagtgtgaacctcgtgc

SEQ ID NO: 98472 - DNA, 189 bp, Oryza sativa
  Clone ID: PAT_MRT4530_96375C.1
atgaatgctgtcaaagctttaccagattgcgacgtcgtgcgcattactgatcaattaacaaagccagccgggaggagcgtgcctctacccgtggggctcggagcttggttttattgggcgctggatgaagcacacgatgatgctctgttggtatcgtccaaacctgaagcgaatctgcccaagccgtag

SEQ ID NO: 98473 - DNA, 843 bp, Oryza sativa
  Clone ID: PAT_MRT4530_96376C.1
ctaaacaagccagtagatgagggagatgaacaggctttgcctgacctcaatgacgaaattgctgaagttgaaatccatcttggtcaggaggaggatcaacttggaggtgatgtccagggaggtgacaaacatgtgtttccttttgatctcaatattgatgcaccttgattgtggttctttgatctcataaactcctgtgttgatgttgtacatgtcttcatcatcgtcgcttgacttcacctcctcgctgctcacatccttagcttttcccctcatctcctcgatgccgatttgcttaacgcttgccttcttctcaaacagtgccgtgtggtcgctgtcgtcaaccaacattgtccggccgccaaagaccctagttgttgatgccggaattagaataagaggctggtcagcctcgtcctccactgccccctcctttatcagatccgcgggcgccgccacctccttgagcattacatcagctgccttgcaaacctccgacgccgccgctgcatcccaacagcctccacccaccgccgccgccttcttgcaaacctccgccgccgccgccgcatcccaactgcctccacccaccaccgccgccgccgccgcatcccaactgcctccacccaccgccgccgccgccttcttgcaaacctcctccgccgccgccgcatcccaactgcctccacccaccgcagtcgccgccgccaccgccttttggatcacaaccgcaagccgacatgcctcctccgccttggctcgtgtctcttgaatcaaaaccctaaaattttccgccgcttccatgaacggcgctatcgagccaaacacttccaccgcagccat

SEQ ID NO: 98474 - DNA, 1112 bp, Oryza sativa
  Clone ID: PAT_MRT4530_96377C.1
gcacgaggcgtcaacgaaaaataaaggagaaaaaaaatatcttctcgccgtctcgcgtgctgccgtctccgtctccggcgatggcgccgccaccgccgccaccgacggcgacgaagtacttctggggcgactccccggagcccgacgagtactacgcctcgctgggtctccgccacgccgaggcctacttccagtccccctgcggccgcctcttcacgcactcgttccacccgctctccgccgccagcgacggcgacgtcaagggcgtcgtcttcatgagccacggctacggctccgactcctcgtggatgttccagaacatcgccatcagctacgcgcggtgggggtacgccgtcttctgcgccgacctgctcggacacggccgctccgacggcgtccgcggctacctcggcgacacggaggccgtcgcgagggcggcgctctccttcttcctctccgtgcggcggagcggcgcctacgcctccctcccggcgttcctcttcggcgagtccatgggcggcgccaccaccctgctcgcctacctccgctccccgcccgacgccgggtgggcggggatcatcctgtcggcgccgctgctcgtcttccccgacgacatgtacccgtcccgcgtgcggctcttcctgtacggcctcctcttcggcctagccgacacatgggcggtgatgccggacaagaggatggtggggagatcgatccgcgacccggcgaagctgagggtgatcgcgtccaacccgcggctgtaccgcggctcgccgcgggtggggacgatgcgggagctcgcacgcgtgacggcgctgctgcgggagagcttcggggaggtggcggcgccgttcctggtggtgcacggcaccgacgacggggtgacctcgccggaggggtccaggatgctgtacgagcgcgcggcgagcgaggacaagagcctcatcctctacgacgggatgtaccactcgctcatccagggggagtccgacgagaaccgcgaccgcgtgctcgccgacatgcgcgcctggatcgacgagcgcgtccgccgctacggcgccggcgccggcgccgcggcggccgacggccacgccgaggcgcccgcggcctga

SEQ ID NO: 98475 - DNA, 345 bp, Oryza sativa
  Clone ID: PAT_MRT4530_96378C.1
atggggagcgacggcgctgacgactccgcgccgcttagcctcatcgttggtggcggctatgggcgggcggagcatagaggcgggggagcagaggggtgggggcacggcagcagggatagggctgacgggaggggcaccaagtcgtcgtcatgctccgcgtcgctgactgccgccagtcgcaccagccctcctcttagccacgttcctccctcaccggccgccgcgccggcccttatctccgccgcgctccccctgccggccacgtctactcccccgccagccgccggcgtgcccgccgcgccggcactcctcccctgctggctgtgctcctcgacaaaagtgtga

SEQ ID NO: 98476 - DNA, 1641 bp, Oryza sativa
  Clone ID: PAT_MRT4530_96379C.1
ctcgcagctctcgcgctcgggtccggccgacgcgctcgccgtcgtcgtctgctgcctttttttttcgatttttgtcctcgccgaagggctcgccgccgccgagtccactcgctttctccccccgctccgccgccgattcgatccgaagggaggcagcgagcgagagagagaggtttgtcctgtgaaggcggcgatgccgctggcggaatcgctcagtggcgccagaaggccacgaatttcttctcttcatccagcttcaagctgaagcaggcagggcaatcagcaggggacaatatagctgatgttgctggcaaggttggttcagtggttaagagtcggtgggctgtcttccaggaggctaggcagaggcagccgccaccaggggagactgtgcaagagcgtttcatctctgctgctgccaccactggggtgcttctgaggaagggcatttcagagacaaaggagaaagttgcagtgggaaaggtcaaagttgaagaggctgctaaaaaaactgctgacaaaagcaagactattttgaacaacattgaacgctggcagaagggagtcgccagcactgatgtctttggtgttcccattgaagccaccgtacaacgagagcaatctggtaaagctgtgcctctggtacttgtgagatgtgcagattatctggttatatcaggtttgagtaatgagtacctggtcaaatcagagggtgaaaaaaaagttcttcagcaattagtctctctttacaatgaagattcaggtgcacctttccctgatggtgtaaaccccattgatgtggctgcactgataaagtgctatcttgctagcatccctgagccacttactacattctctctttatgatgaacttagagatgcaagggttagcattgcagatttaagaaatatactgaagaagcttcccaatgtgaactacatgacactagagtttgttacagcactgctacttagagtaagccgtaaatcatcgcttaacaagatggactctcgtagccttgcagtggaatttgcgcctttgatcatgtggcagcaaggtgactctggaacagatttgcggaatcatcttagatttaccctaaaagcacctccaaaaattgtggatacaacatcaaataccacagaatgggatctgttagatgaggatgatgtggatgcatcttcccaaatccccttggatgacgcgtcgcccccagattacagctcaattgaggtcatccaatctctcattgagcatcacaatgccattttcactgatgcgaacgagaccgtatggagatagccagcgtctctagatttcactggtgttattagctcgtgcaatgtacaagttccaggtaggaggatggagtatttgcacattgtcgtcagggagacgcattttggtcgaaatatttcttaaaatagatttgtatatatactagtattaattctccataggaggaatctatttgtaggaccctcggcacgtctcatcaataaagctttctggtgccttataatgttcggttgtaaacctggtagacatgttatgatgtgccttatactcgtgttcttcatggcaaattactattgtatgaactgcactgatgataaaggttaccagaaaccattggtcgtt

SEQ ID NO: 98477 - DNA, 1715 bp, Oryza sativa
  Clone ID: PAT_MRT4530_9637C.1
acccgcggcccccacacaatctgacgaggaaattgccagggaaagcttaccaggaagctcatcaaaagcagcaatctatcctgtcccaaagctagcagctgccccagaaaatttaccaggagattgcaggagactagagagcgccactcccaatggggagtaggagcagaggagggagacacctcctcctcctgcttcacctcctctccctccattcctctctgctaccatgggcggcggtgtcggcggcgggagggggtggttccggagacccgtacgtcggcgtgacgatcgggacggcggtgacgaacctgctgtcgccgtcggacctccccgagttcctccgcgcgcagcgcatcacccacgtgcgcctctacgacgccgacccgcgcatgctgtcggcgctagcgtcgtcgggcgcccgcgccatcgtcggcgtccccaacgacgagctcctcgcgctgggctcctccccggccaccgcctccgcctgggtcgcccgccgcgtgctcccctacgccggcgccaactccagcaccccggggctcatcgccgccatcgccgtcggcgacgaggtccccaccgcgctcccctccgcgctccccgtgctcctcccggccatccagtccctcgctgccgcgctcgccgccgccaacctctcctccatcccggtctccacaccgctccccttctccgtcgtcctcgacccgttcccaccctcccaggccttcttcaaccagtcgctggccaagtcgttcattctcccgctcctctcccacctcgccaacacctcggcgccgctcatgctcaacctctacccgtactactccatgatgcagagcaacggcgtgatcccgctcgacaacgcgctgttcaagccgctcccgccgtcgctggagatggtcgaccccaacacgctgctccactacaccaacgtgttcgacgcgatgctcgacgcggtgcacgtcgccgtgaagaacctcaacgcgaccggcggcggcgggccggtgccggtgctggtcacggagaccgggtggccgtcgtacggggaccgcagggcggagccgtacgccacgcgggacaacgccgacgcctacaactccaacctcatcaagcacgtcaacgacaagcccggcacgccgatgcgccccggcgcgcaggccagcgtctacatctacgagctcttcaacgaggacctccgcccgggcccggtctcggaggcgaactggggactcttccacggcaacggcacgccggtgtacctgctccacgtgtccggcgccggcggcttcctggccaacgacacgacggaccggacgttctgcatcgcgtccgacgacgccgacgagaaggcggtgcaggcggccatggactgggcgtgcggccccgggcgcaccgactgcacggcgatccagccagggcaaggctgctacgagcccaacgatgtgcggagccacgcctccttcgcattcgacagctactaccagtcgcagggcaaggccgctggctcctgctacttccagggcgtcggcatggtcaccaccactgatcccagtcacgatagctgcatctttccaggaagcaaatctgacggggcaaacacaaccactgcgcagacgagtgatgcagagggctctgcaatatggaggctaagaactggaagggagacagggttcttgttcatcctccggtggttgttgagcttgtcagtggtg

SEQ ID NO: 98478 - DNA, 281 bp, Oryza sativa
  Clone ID: PAT_MRT4530_96380C.1
cccacgcgtccgcccacgcgtccgcccacgcgtccgaccttgtgcgcgtggtgacatcttcctctctgctccaccaccgcgacatcgagcatcgacattctgccttctctcgacgctgcagcttcggaagatccgctcttcgtggaagttgaagctgacatttgggaaagcgagcaaggttgagatcgcgcaatcctatgagaagaatggcgcggcttgcctcatcatcctgacagatgaaaaacactattaggcgaagcggaggtgactaggggaggagg

SEQ ID NO: 98479 - DNA, 333 bp, Oryza sativa
  Clone ID: PAT_MRT4530_96381C.1
atggagcgagatgagattgagatggttgccatgtcgagaaacgtcgcctgcacctgcatcgtcatggagaggcgcattggtgtcgaggcgagagtggcagcgtgtaggagcgatttggcgatgggattacgggaaggagcgctgaagccgaggagtgcggcgttttgggatgttacacctaatcggcatatgcctcttgtatttgcatattattatttgacgtttcccaatagtatagagtatccaaatggggtcatcgtatcaaaagggaaggcttatcaatactctggatggatattacatggaccacaaatcacatggacatacacttga

SEQ ID NO: 98480 - DNA, 1365 bp, Oryza sativa
  Clone ID: PAT_MRT4530_96383C.1
aaacgcgagggcacaggttaagtcactttcacctgcaaatccacaagcacattgctcgatcaccgaggaagaaaactagctagcttaatcaccgggaagagttgagcaatggcggcaggattgcaggtgttcggccagccggcgtccaccgacgtcgcgagggtcctgacctgtctcttcgagaagaacctcgagttcgagctcatccgcatagacaccttcaagaaggagcacaagctccccgagttcatcaagctacgggatccgaccgggcaggtgactttcaagcatggcgacaagactcttgttgattcaagagcgatatgccgatacctgagcactcagttcccagacgacgggaacaggacgatctacgggacggggtcgctggagcgggcgtcgatcgagcagtggctgcaggcggaggcgcagagcttcgacgcgccgagctcggagctggtgttccacctggcgttcgcgccgcagctcaacataccggccgacgaggcccgcatcgcggagaacgagcggaagctgcagcagatgctgaacgtgtacgacgagatcctggcgaagaacaagtacctcgccggcgacgagttcaccctggccgacctgtcccacctcccgaactcccactacatcgtcaacgcgcggtcgccgaggggcaagaagctcttcacctccaagaagcacgtcgcgaggtggtacgaggagatctccaaccgcgcctcctggaagcaggtggtcaagatgcagagcgagcaccctggcgcgttcgagtgatatgcgcacgcgcagctcaaaaactctcttgcattctgcggcgagctctgctttgtctcgtccacggctttaattcgtcgggcttcatgcagtgatgtggttgtcgtctacgttaattgtcgtttcggctaagaataatatgaagccttcttgaggtctcctctcagtgtattccttttgcaacgccatgtctttcgattcaataaatataaatgtgtcccagccttttttgctcaaaaaaaaaaaaaaaaaaaaaaaaaaaaaaactttgggggggggcccggccccgtgccgcccctgcagcccatttttttaaccccccttacttgcccgtttttaaaaaactcggaaatggaaaaaacctggggttaccaaaattaaatcctttggaaaaaaatccctttttccaaattggggtaaaaaaaaaaaagccccaaccaaatcccttttcaaaaaatttgccaacctaaaatggaaaaggaaccccccctttaacgggcaaataaacccggggggttgtgtggttaccccaaagtggaaccttaaaattgcaaagcccttaaccccccttcttttggt

SEQ ID NO: 98481 - DNA, 1632 bp, Oryza sativa
  Clone ID: PAT_MRT4530_96384C.1
ttttttttttttttttttttttttttttttttgggacagaataaattatttatttgcatcctgtacagcaaacggcgtcaagccaccaataaatttacaccacaagcttgcaagaaaaaccttacgtggtttgcttgcacgaacttccccatagaaacgggaaaactgcattctccacaaagcaaatttcagtagacctgttgcctcgaccaaaatggtggacgattcatcaggtctaatttgagtagatactgggtgcttccaggaaagcatcaggcatgatgctcttcatgatcaacttgatgcaacggtgacggcgggagtgaaaatatacattttgcagtcatgcacgtcaacttgcgccccaaaagttccaacaacgttctctgatagagtttcatgcttccacagatctctaacagaatagggagatgaaccatcaaggcctacagatggcaattttactataatattggcagactcctcacagcggttccataaaacaacagccagacggttaccagagagggggccagcccacacctcttggcatccatttttcccttgacctaaaattcttcttccttgaactccaagaggatcttgatttacttgaattacttctttgttgctcaatatttccattgtttctttagtcatgtttctgacatcgcaaccaattaagagaggggcttgatccagtaacagcacaaataagttggagtcatgaagaccaaatgcaacatactggaatataggtgccatcctagtgattacagaatgcacccaatgagtacttgccttcataagtgcccagatgctaaaatgtgcacgatactctgcaaaggtcatgccaccattcccgacttccagcatatccgggtcattccatccaccgggtccagcatatgatgcccacttgttattcttatcagcaatatcagtcatgcttttccatgtatcctgtatgtcatctgttgtgcgccaactgttaccaactttgccagcccataaggctggatcatcctggccccattcacatagagagtagaatatttggcgtccagttgaatttaaagcatcacgcattggaggatacctgtccttgggctttattcccaaattgtagcagttgtcatacttcaggtaatcaacaccccatgaagcaaatattgcagcatcgtccttttcatgatggagcgatccaggtcgaacttgacatgtaaaaatcccagcatcagagtagataccaagctttagacctttcccatgcacatagtccgcaagatctttgatgccagaagggaaagtttttgggtcaggtagcaattgatccttttttcctctttttacattggaccaacaatcatctgtgtcgcggatgaccgtctcgttgatgttgcaggcgaagaaattccagctgttccatcccatctgcggggtgagggcgaggccgttgttgagctgcagcttgccgtagttggaggtgtcgtagaggcggcgcagcgcggcggtggggaggggctcgatccgcattcggctcgccgccgcggcgaccgccggcggcgagacgacgagggccaccagtaggaggaacgggaggcggaggcgcggcgcctccattcccttcgc

SEQ ID NO: 98482 - DNA, 603 bp, Oryza sativa
  Clone ID: PAT_MRT4530_96385C.1
gctgtgcactcaagaacacacatcaactatgtgatgggtactataggctacattgaccctgagtacgcacgcacatcccgcctcaacgagaaatcggatgtctacagctatggcattgtcctcctggagctacttacaggcaaaaagccagtcgataatgagtgcaatctccatcacttggtaactattttttcattcgcttgctactgtttatttgaaaacttgttcctttccttcaccatatactcttgcatttgaggttcaataagtgcacaatcatgggcattatcaggtctgtgttccttcaaggggaccacgcatgaatcctaccatgtgagtagatctatatacactgtggcggacctggtagtgtgtgattcattgtatggctggtgaaagctctatcataacttgccagtgtcccataaagcctgccatatttgtcccccgccttcaatcatgtgggtgaacatttacaggcaacacacacctgtcaaaaactgtagctaactatgactgtactagttattttgatcactgacatgctggtaacttatcggaagaatttaccctgtcaatcctgaacatctctttttgaaagaa

SEQ ID NO: 98483 - DNA, 750 bp, Oryza sativa
  unsure (1)..(750): unsure at all n locations
  Clone ID: PAT_MRT4530_96386C.1
atggagttagctgtatgtgaggtgcatgtttactcaactgtaccaaaactggtagatgcctcaagcttggagaataagaatgcacgagctgtttcttgtggagctcgtcatagtgcaataataactgatgaaggcgaggtcttctgctggggatggaacaagtacggacagctcggtctcggcgattccatggacagaaacgtgccttgcagtgttcctgtcgacgcataccacccactgaatgtgtcgtgcggttggtggcacaccttggtgctcgcggagtcccctacttaaaacctgacggcgaacaaacttccctagttgacaattttgtcaggagtttggtaggctttcatcaaggtgcggccgtgttgcatttcgtgtatatacatggcagtgcatgcagatatggtgtattcattctttccggtgcgctcttcaacgggcaacgtacacaagcttgtatcgcaccgcgtatacagttgggtaggaatggctgtaaggcctgtgcttgaaagtgcatgcggtgatgactgtgtccatgcttcgtcttgcattttccagttgctatatgcagacgaaattaaccggttgctatatgcagacgaaattaaccggaacgctgattacgctagaacagggacgatcatgtatggggctgatgagctatacatttctgctcccgcctctgaaatccttcagaatttgacggtnttcgtgttaattttccctcaaaaaaaaaaaaaaaaa

SEQ ID NO: 98484 - DNA, 261 bp, Oryza sativa
  Clone ID: PAT_MRT4530_96387C.1
atggaggggttccgtggccacaacggagaagatgacttcggcccaatcgtcaatgcctctagtcagagacaaggaaccaaaggcggagaagaggacagggatgtggtgccgacggcgtggtggcgtagatccggcggtggtgtcgagatcgacggggcggtgatgattccaactctggcggtcgtcgagaaggagcacgttggcaaccctccagaccacagggaggcttttggtgccaagctggcggcactcgtattgtaa

SEQ ID NO: 98485 - DNA, 1300 bp, Oryza sativa
  Clone ID: PAT_MRT4530_96388C.1
tctagatcgcgtggcacggcccttttttttttttttttttttttttttttttttttttttagcaaaacagagtgaaaagatgatttcttagaagggtttctacatagtttctcatgactatcaaaataataataatacatatataatcccgctccataacaacgccggcaggatatgtcttaggtgacacacatggtgtgatcttctcttaaactacatcgccggcgaaaaaaactatttacaaaaatgtcttccctcagttaagcaagagggtctaggcataagaggtacacggaatttttctactactaaaaattaaaaagaaataaatgaactagcggtcatcatgtaaaaactccggctgctagacctccatcggcggcggacagttcagatcaagatcaaaagcgatggctttcttcgccaacgcggcgggcggtgatggtgccagatccacgatcgacgaggagtcggagtcgctctgtgccaaggcggccacggtgaccggcgccggcgcaatcttgagcatgcggcaaccagaggcggcggcggcggcggccgcttgtccaaagaagtagtaagggtgcgatacggggtagccctcgaaagggaaacgcatgccgactgcgccggcggcggccgcggccaccggactcgcgcttggcgtgggcggtgtcgccggagccgccggcaccggccagcacttccggcgcggggaagcggcgacgtgggtgaccgccgttgcggcggagatcggccccgccgacccggccaaggagagccgcgggctcggcacgttcgacacgggccggcgcctccggcgccgcccccggccgggcgcgcgccgcggtgccaaggccaagaccaacttgcccccgcggcccgccgccggcgtccccccggggggcccggaacagcggcagcagcaacagcagcaccgtcgagtcgttcggcagcgacgtgccggcgcccatccatgccgatcccgccgtcgctcgagctcgagctgttccaccgccccgcggccgcagcggccgcggccgccggcgcaggcggcatcgcgttccccttccgaggcccccccgctaccccgcgcaccctgacgacggagcccgcgagcggccgccgccgccgccgcctcccgccagccggcgccggtcactgcgtggccgccttggcacagagcgactccgactcctcgtcgatcgtggatctggcaccatcaccgcccgccgcgttggcgaagaaagccatcgcttttgatcttgatctgaactgtccgccgccgatggaggtctag

SEQ ID NO: 98486 - DNA, 913 bp, Oryza sativa
  unsure (1)..(913): unsure at all n locations
  Clone ID: PAT_MRT4530_96389C.1
gtgcctttcagcgtcccccttgaactgtccgncttgctcnncagttcngtatgtgcatcgctcagcctccatcagcgccatccanttcgagccaatgccccggtccaggagccatccaagtatcgtgccaaatgtccggagggcacctttgctcctgtctgccaggcaagacccagctaccctgatcggcgttggtgcgcgtccgtgaccatctgcggccctaatgcaagaacgtaagatcatagaccacttcgcacaagaatgccggtgcnctatcccaagccggagccaaaagccggaggccaccccaagcccaagcctggagcccgggangcacccatgtgcctgcgagccacatgccacgcatagataggagaagcagctgtgctgtgcggagccactgtgccaccaaggaagcnccgttgcctactccatagcctggagcactnaatgcccggatggccacaagcctcgctagcctggcggtccaggagtgacctacaaacacctgagccctgcccaggcggaattatatgctatatgggaaagtgttggcaatggcatggcaatgggtgtgcacgttttgggttgagtgacgttgtgggtggttggtgtggcatgatggatgtgtgcctgtgcatggtgcagtgtgtgtgctgcaggaatgaatgggttttgcttttggatggcattgaggctgtgttgacctgcacaagtnttgaatgttggtgtagtgtggtggtgctgattttgtttggttatcagcaagtaattaatataatcagggatgtgcanaannatatgtgcaacttgtttgatctcaaaataatataatataatttaaaaaggcgccgctctagagtatccctcgaggnccccaagcttacgcgtacccagcttcttgtacaatgtc

SEQ ID NO: 98487 - DNA, 204 bp, Oryza sativa
  Clone ID: PAT_MRT4530_96390C.1
atgtcctacatggtgaccaagtacgaggaccattgtatgatcttgaagcttaatgccaagcacatcgtgagttacacgttggcacacgaggagagatatagcgctgtctctgacctcgctgggcacggattcgaggaggaaggctgccatgttgtcgactacaagtcagcacttcagaccgccaagtctacaacagatagatag

SEQ ID NO: 98488 - DNA, 258 bp, Oryza sativa
  Clone ID: PAT_MRT4530_96391C.1
atgtggttgattccacggagaggaatcaaatttccatggttggaagagaaaatcaccgataggagcactgtagcggtggctagggtttgggaatcggggaggagaagaagtgaccaggctcggctccccctgggtatttatacccccgacccccggaagttccagactggggtgaccggaacttctggcctgacaaaacagagggcagtcaggcccaagttcaatggaatagatgagaattcaatgatttggaaatga

SEQ ID NO: 98489 - DNA, 526 bp, Oryza sativa
  Clone ID: PAT_MRT4530_96392C.1
ccacgcgcccgacccgattgcgttctacgcgcacagggattgccgactttgtgctagagttctttctgccaactgactgtgaagtacttgaggagcagaaggcagtgctggactcattatcaggcaccatgagaagtgtttgccaaactttacgtgttgttactgacaaggagatggaggatgaggccatgagagaaatgaatgagcttgcaggtccttcggcagtactttgctgggagcctgaaggatgcaccaaagagccttggaatgcgcccaaccaccctggaaagaaaatgtaggcttttttggttggacccctggccatcaccgaagataaagaaagtagaccattctctaaggaaactgcagcaaatcattgattcagttcatggagcagagacagcttttcagcttaacaccctctacaaggacctcacaaacacctctggatcatctgacaacaatttgtcaggaagtgtcacaggtcctctggctaaccagaacaatctagactttgaaatgcacc

SEQ ID NO: 98490 - DNA, 2893 bp, Oryza sativa
  Clone ID: PAT_MRT4530_96393C.1
ttccctactacccacaccctgcaatccaaacgcaggcaaatctagcacaaaattcatcccaggactcccagtctcctgtactccccttgcccaagatgtgcagcgagctttacttcttgattccgaacaggagagaagcattacgacttgcatgctccttgcccaagttctagtcatcatttccaagagcaaaaccatcttaagagctttaatactgatgcaatgactagaagggaaaaatatgataccagattctgaaggaaaccttacctgcatggaagagggagacccccagcccagcatctccttggcacgcactccgtcggaaggcgcggcggcggcagtcgacttggatctccttgagcagcttctctcagccgacaacgcctggcttgaagtggcagcaaacacttcacgctcacccaacttctttgctaccccctccaactgcttgacagatgcttcggtcgccaccaccacacctgcaaattcatggtggattcagccgagcggtgcaagcacctcagttcgggaacggtttgaccaagctctagcttacatcagggagacacagagcgacgccgatgtgcttgtgcagctctgggtgccagtcaagggcaacgatggtcagctggtgttgacgacgagcgggcagccattcactctcgatcagaggtccaatagcctcatacagttcagggaggtttcgacaaagtaccagttctctgcagatgttgcttcaggttcctcacctgggctaccagggagggtgttcatcggtaggcttcctgaatggtcaccagacgttcgatacttcaccagctatgagtaccctaggatcaaccatgcacaatatttggatgtccacgggacgatggggctgccggtgtttgagagggggaactactcatgcttaggtgtcatcgagttgatcatgaccaagcagaagctcaacttcacctccgagctcaataccatttgcagtgctctccaggcagttaacctgacaagcacagaagtttcaagcattccgcgcgcaaagcttaacagtgcttcctacaaagatgctttaccagagatactagaagtcctgagagcagcctgcatcacccacaagctaccattagctcagacctgggtcacatgtgctcaacaaggaaagcggggcagtcgccattctgacgagaactacaagtactgcatttccaccattgatgcagcatgctatgtgaatgaaccccggatgcagagcttccacgaggcctgctccgaacaccacctgctacgggggcagggggttgcagggaaagccttcaccacaaaccagccatgcttcctaccagatattggatcctccactaaactggagtacccattgtctcaccatgctaagattttcaatttaaaaggtgcagtggcaatccgattgcgttgcacgcgcacagggattgccgactttgtgctagagttctttctgccaactgactgtgaagtacttgaggagcagaaggcagtgctggactcattatcaggcaccatgagaagtgtttgccaaactttacgtgttgttactgacaaggagatggaggatgaggccatgagagaaatgaatgagctgaactcatttagtcctcggggcaagaacaaagttgaggagttatcctttggagacaacacaagaggggatagagaggaggcatcttggacaaccttagtagggacttcacagaaaggatcagatttagctgaattgcatacacatggaatgttatcacatggagggcatggttcatctcaagctggtgatcaaacaagtaaagaaggtagcaaagtgaaaaggcgtacaaagacggagaagaccgtgagcttgcaggtccttcggcagtactttgctgggagcctgaaggatgcagcaaagagccttggaggtcaaccttcacatgcaccttatagtcagaatgtgagcattgttatcaccctattttttcgtgattcgtgctattgcatgaaggtacaagtgtgcccaaccaccctgaaaagaatatgcaggcagcatggcataaaccgctggccatcacggaagataaagaaagtagaccattctctaaggaaactgcagcaaatcattgattcagttcatggagcagagacagctttccagcttaacaccctctacaaggacctcacaaacacctctgtatcatctgacaacaatttgtcaggaagtgtcacagttcctctggctaaccagaacaatctagactttgaaatgcaccaacaccacaggttaagcagcaatattccatcgacttcactctcacactcatcatgcagccaaagttccgattcaagcccttcctgcagtggaggagcaacaaaacattcaccccaggttggagctgatcaggtgaggtcaggatgtcttccacaacatagccctgtccagactctgcaaacagaagctgcttcaataaatgaacatttctcaggtcaggaagcaccaatagatctcttacaggatgttgctgaaaaggcaaatggtgaacagcacatgtctcaaagtccatcatcccccaagcagactgcaaatgtaggtatgagagtaaaggtcacttttggctcagaaaaggtgaggttcagattgaaacctgagtgtgactttcaagaactgaagcaggagatatcaaaacgtctgagtatagcagacatgaattccttgattgtaaagtatttggatgacgattcagaatgggtcttgatgacatgtgatgcagatttacacgagtgttttcatgtttataaactagcagatatccaaacaatcaagatttcagttcatctggctgctagtccaacaacaaggatcaccattggtcacactggtttctcatga

SEQ ID NO: 98491 - DNA, 1065 bp, Oryza sativa
  Clone ID: PAT_MRT4530_96394C.1
atggcatcaaacggcaccagcgtggcagagggtgacaaagctaatcaagaagacaggctcagtgcacttcccgacgacattttgattcatatattggatagactcaaaacacgtgatgctgtgaggactagtgtcctctcaagacggtggaggcatctccctggcgtcctgtctaagatcattctccatgttggatcatttaagcctaaggatggttccatgctagccaaagacgatttgagaataagaagcaacatctctgtcatcgaagcaacccaaagtattctagcacataaaagtcagtgcaaaattaattttttgagcgtgggattctatttgagggaggaatctatcagcatcgcccactccatcaatgatgccatggcaaatagagaaatcgtcagtacgaagtttatgattttgccagaaaaacatggaatacaacggatggaagatgacaagatcatatgtggaaaacgtttcatgtcattctcttatgcttgcccccgtgcatttggttgcctcaagcaactaatcttaacctgtgtgaggctaggcgcactgcatctggattttgaatgtggaaggatttggattcaaccggaacatccgaaactattggctcctgtgttgcggaatctgcagattgctagtcttacttgcattcatgaagagtgcaaccttacttggatattttttcttttagaagctgcgcctctattggaaaccatgcacataaagatgtgggaccatgaatgcaaaacgagtgaggatgaggaactataccaaaaggaagggacgtttatagcttccatgcgcaagaatataatgcataaaaattggaggaaagatagcagaaaggtcgtatgcacagttgatgacgtttgcaagccaatatttatcacgaatatcattgacactcgtaaaaatatagaactccaaccatttgaaaatatatgcagttactttgttcctatttttaattatgtcatgcaaacatcaccaaagattgccatgcaaatatcaccgaaaactgatctaataccaacatctgttgagctttaa

SEQ ID NO: 98492 - DNA, 1394 bp, Oryza sativa
  Clone ID: PAT_MRT4530_96395C.1
atggcatcaaacggcaccagcgtggcagagggtgacaaagctaatcaagaagacaggctcagtgcacttcccgacgacattttgattcatatattggatagactcaaaacacgtgatgctgtgaggactagtgtcctctcaagacggtggaggcatctccctggcgtcctgtctaagatcattctccatgttggatcatttaagcctaaggatggttccatgctagccaaagacgatttgagaataagaagcaacatctctgtcatcgaagcaacccaaagtattctagcacataaaagtcagtgcaaaattaattttttgagcgtgggattctatttgagggaggaatctatcagcatcgcccactccatcaatgatgccatggcaaatagagaaatcgtcagtacgaagtttatgattttgccagaaaaacatggaatacaacggatggaagatgacaagatcatatgtggaaaacgtttcatgtcattctcttatgcttgcccccgtgcatttggttgcctcaagcaactaatcttaacctgtgtgaggctaggtaactcagacttcactgatgtgcttagcacatgcaagaagctagaatacctccaactaataagctgtgactttcagccatcagtattgcaaatggaacacccgacgcttattaaaatggagcttgtggtgtgcacatttggaagtgtcgatcttaaatctcttccgaaactaagaacattgattgttgacacgtggatgggtttggaggaaatttatccgctatcatttggttatgttccacaactttcgaccctaaagctaacttataaaggcacaactcgggacaagaatatcaagctaagtgagtttcttggtaatgcggctataggcgcactgcatctggattttgaatgtggaaggatttggattcaaccggaacatccgaaactattggctcctgtgttgcggaatctgcagattgctagtcttacttgcattcatgaagagtgcaaccttacttggatattttttcttttagaagctgcgcctctattggaaaccatgcacataaagatgtgggaccatgaatgcaaaacgagtgaggatgaggaactataccaaaaggcagggacgtttatagcttccatgcgcaagaatataatgcataaaaattggaggaaaagatagcagaaaggtcatgcacagttgatgacgtttgcaagccaatatttatcacgaatatcactgacactggtaaaaatatagaactccaaccatttgaaaatatatgcagttactttgttcctatttttaattatgtcatgcaaacatcaccaaagattgccatgcaaatatcaccgaaaactgatctaataccaacatctgttgagctttaa

SEQ ID NO: 98493 - DNA, 198 bp, Oryza sativa
  Clone ID: PAT_MRT4530_96396C.1
atggctaggctatatatacattcgggcaccatcagctcgcagctgacgttggagacggcggcggcggcaacctggagggttgtgtcgccgatgatgaggacggcgatagccgcagtggccgtgtccgatgatcagggaggcaaatatatgagggaccaaaatagacttatttacagtcatacaattgacagctcatag

SEQ ID NO: 98494 - DNA, 1923 bp, Oryza sativa
  Clone ID: PAT_MRT4530_96397C.1
atggattacttcactaagtgggccgaggctgtgccgctcgagaatattacttatgcggagaggacaaatgtggctgttgtcccatccacgaagctggagtttgtcggctgtgaggatctttctgtgaatcatgagccaaccaaagaatttgcatttgttttctaccttcgccttccagaagaaatcagacctattgtctttccgcctgtggagcggttggaggagacctgcttcctgtgctgcggcaaggagcttttgcaggggatcaatcgcaagaatgaagagcatgggatcaaatcaactggcacgctcacgaacctaaaagcaagattttggacctgcacagaagttaagcagatcttccaggccaagaatccaccacagtcaccagcaacgggaggcaaaactaaacctccgttcactaagccaccgcccgagcaaccgtctgaggttaatgaagggaacatcgtcccgggaaaagttattcaaaagtacaaggtgaaggtggttgctgccgatgaacctggaacaagctcatccaaaggtggtaaagctaaagggactaaaggtgctgcagatggctcaggtgaaaaggtgaggaacctcgagatggtgaggttgaggatgtggatgaagatgatgcaaggagtaccccagcagaagccatgggctgatatgattgcagatgtcatgagggagcagtttggacttaagccgaaggacactggaaacttatatcggcacccttaccttgagtggtttgaaagagttccattgcctaaccgatataaggtccctgatttctcaaaaattttagggcaagataatgtgtcaacttacgagcacgtcagccgattcttggctcagtgtggagagacatcggctgttgatgctttgagggttagattgtttcctttgtctttatctggatcaacattcacatggttctccgcattgccctataattctgttcaaggttgggccgatttagaaaaacagtttcataattacttctacagtggaacctatgagatgaagctttctgatttgacaacgcgtttgatagctccaatcaaggaaaaattttcatctcagcagtttgaaagcttgtctcaccttgcacagaaggtaaccttgcataagcaaaggtttgcaaatgctaagaaaaacttcaagaagattaatcatgtgtatccttataggtatgattctgaagaggaggataactccgaggtagcagcagccgagtgggccaggagcaaaaagatcatagcatgctcatgggtgaagagttctaggaaagaagaaaggtttgattttgataccactaaggctgacaagattttcgatttgctacttcgggagaagcagattcagcttcctgctggtcatgtgattccatcggctgacgagttagggaaaaggaagtattgcaagtggcataattctaattctcatgctaccaacgattgcaaggttttcaggcagcatatccaattggctattgaaggtggaaaaatcaaattcgatgactcgaagaagccgatgaaggaaaagtactatgcagaagatgatggtgggtttgatcctcattgggattgtgaattcttcaggttctgctggaatgaggggatgaggctaccattgattgaagattgccctggatgcagtggcagggcagggagttcaagccgatcttacagtagaggaagtcggctgagtcagaagagggtttctgttcatcagaggttgggcccggtgcaccaggatcattatcaggatgaagatgaaggcaggaaatcgcagtggtgtccttctgaattcgaagcaagacaagccgatgttgatgatgtggaagaggcctctgctagattaattttgtcaccagagccagcaatctttaagaagccaaaggggacataa

SEQ ID NO: 98495 - DNA, 277 bp, Oryza sativa
  Clone ID: PAT_MRT4530_96398C.1
gagttaactaaaaccagttacttggcaaaccacacgcatacaggattgatgaatgatactgaggatagcacggtttcattacattacacatatcaaggccttgctacacgtataggccgcgcagcgactagctgctcaatcaatcgctatcacacgggtttaattcaccgttcgtacgcacatacacacaccacattgatatgggtggcgcttattgtcgcctaatggaggtagcgcaagttcaagggtagatggtgttcgggatgttgatgtcttc

SEQ ID NO: 98496 - DNA, 324 bp, Oryza sativa
  Clone ID: PAT_MRT4530_96399C.1
atggctctctcgccgtcgaagggtggagcgctggaaggtggaccccggatggagggcgaagcagctgggaggaggtggacggagtggccgcaggccgggagcctcgacttcatcaccgacagattcggcaagatctctcttctcgactcggatccaaaccagtcgggaggagataacacctcggctccgttcggtctcccgaactcggctgagatctactccaacatgctttcatctgacttggcttcaaaccactcggatgggggctcattagcgccctcccacacagcgacgttgtcacgccctaaaaatcgcctaaattaa

SEQ ID NO: 98497 - DNA, 177 bp, Oryza sativa
  Clone ID: PAT_MRT4530_9639C.1
atgggactcttccatcctcccccgctcccacggctgcgtcatccaagcgggtgacagccggccacctgtggcttgcgggctccaagaacgccgatggcagcagatcaagagggagaggaacgcaacgaggacagcgggcgcggcgagcagcgtgagaggagtggcacgcgacgcgtg

SEQ ID NO: 98498 - DNA, 1149 bp, Oryza sativa
  Clone ID: PAT_MRT4530_963C.1
ctcatcgccgcatagaaattccaccgaacacatagcgagcaagaagaggaggaggaggagaagcgaaggagacaaggaaacagcgcgacatgccgggcatcccggcgtccagccctggcatcccgcaccagcaccagcaccagcaccaccgggcgctagcaggcgtcggcatggcggtcgggtgcgcggcggaggcggccgtggccgcggcgggtgtcgcggggacgaggtgcggggcgcacgacggggaggtgcctatggaggtggcgcggcaccacgagcacgcggagccagggtcggggcggtgctgctccgcggtggtccagcacgtagcggcgccggcggcggcggtgtggtccgtggtgcggcggttcgaccagccccaggcgtacaagcggttcgtccgcagctgcgcgctgctcgccggggacggcggcgtgggcacgctccgcgaggtgcgcgtcgtgtcgggcctccccgcggcgtcctcccgcgagcgcctcgagatcctcgacgacgagagccacgtcctcagcttccgcgtcgtcggcggcgagcaccgcctcaagaactacctgctccggtcaccaccgtccacccgtccccgtccgcgccgacggccgccaccgtcgtggtggggtcctacgtcgtcgacgtgccccctggcaacacgcccgaggacacccgcgtgttcgtcgacaccatcgtcaagtgcaacctccagtctctcgccaagaccgccgagaagctcgccgccggcgcgagggccgccggctcgtgagcgctctccaccgccgggccaccgatcgtttttttccgggcggatggatgtgtgtttcttcggcgcgtgagagctttctcctttttttccccctttttcctctttggtttcttcacatttgaccccctcttttttttcctctttatttttttccctcgttgttgcgagagacacacaaacaccatccacccttgtccaaaaagattcaagaaatgacatgtataattgacagcctgcaattccatttgtatgctcgagttggttggtgtattgagtacatacatacatatacataaacacgatagtagtattagatattttgatctgttctctggcacaaatttaaagtgtacgttcgtatttaaagt

SEQ ID NO: 98499 - DNA, 318 bp, Oryza sativa
  Clone ID: PAT_MRT4530_96400C.1
gagttcaaaatttgtgttgtaagttgtaacacaaatgatacatttacaaggttacatactaaaatactacacacctgaaatagtactacctccatactatcatgcttatttatgttcattgctacatagcgatcatgaaaaatcaaaagcaccatgaagacaccagtcatgcatgatcactttgatcaaggtctggttggtcaagaaatggagtgcctccgatccttgggcggcttcgtccgcaccctgccgccgccgagcacgtccgatcgcaagaacgggttgagccttccgagctttttggacatgctgttcatg

SEQ ID NO: 98500 - DNA, 582 bp, Oryza sativa
  Clone ID: PAT_MRT4530_96401C.1
atgcctcatctactaatggtgtgcctcagggggcggacccagggggtgtgccgggacgctgtagtgggcggtggctggcgacgagaggagccagcggctgtcttcggcttcgatgtcttctctgcgcccgtgtcgcggccattggcggagtacgccgggcgccgccacacgggacggcgtgtccgtgaacatcgcgccgccaacgccgcctgcacgaccgttgagaccagccacaacgcgtccacgccgaccagctgcgccacgctcgacgcctgcccgagcgcacaccacaggccgctcatcgccgggaagcagcgcattcgctctccgccgccaatccggcccccgctccccgcgttcgggccggagctccagcccccactccaccccgagaccacgccgccgtctcgtcgctccgcctcatgggtcatggccagccgcggctccgcctgggcagtcaccgcggctgcgcagaaccccgtgatggcgacgcttgggtggagggcgcataccagcacaaacaaggattcatcctccatcatccactccaatccaactaatgcctgcaactacatcacctaa

SEQ ID NO: 98501 - DNA, 447 bp, Oryza sativa
  Clone ID: PAT_MRT4530_96402C.1
ctcgaacagcggcacaagcaagcgagactagaaggaaggagaggtgttaacgccaaaattttttaagcccgaagtcatcatcggcttagagtcgatctctggcaaaggggtaagtcatacgttccgttggccctggtaattgtgtcggctacattgctatagtctctagcctgctttttgattgccaataaggatttcatcggggtttcagccgattttacgacattggacctccagccgatgtattctttaaccttcggattagcgcttattctatcatatcattgatagccgattggtttccactgaattatattagttatgttacattatcatcagtcaactgtctttatatcattatctacattggacatataatcgattattcaaaaccctgtccacattggttggaattactccatcggcttgtcagccgatcggctcttt

SEQ ID NO: 98502 - DNA, 371 bp, Oryza sativa
  Clone ID: PAT_MRT4530_96403C.1
gggcccgtgagaggggggtccggcgacgatggttcacgtaggcttctggggcaagtggggtaagacattcaaaaatccccctcccccttacaagaaggagcgttttgtttcaaacctgaacttagtgggggagtatggactgaggtccaggcgtgagctgtggcgtgtgcagtatgctttgatcccaatccgaaacaatgcaagggttattctcacacttgatgagaagaatcaacgcctaatctttgagggtgaggcactgtttccccgcatgaaccgcttagggctccttgctgttgggcagaacaagcttgattttgtccttaccctcactgttgaaaacttcctggcagggcgttttaaaacttttt

SEQ ID NO: 98503 - DNA, 2154 bp, Oryza sativa
  Clone ID: PAT_MRT4530_96404C.1
atggcggcggaggaacaagacacgaagcctttcttgtccccgaccaccaccaccaccatcccgccgcgagcccaccgtggataccagcttagcgcttgcccccaccaccaccaccaccaccagatgacggcggcggcaccggaccagcgcagtgcaggcgcaggagcggcggcagcagcagccgggcagcagcagacggcggcggctgcctgcgtcctgaaccgagaatccgatgaactgccggaggaagaagacggcggcgccgccacgtggttattggctcgtcaggcgcccgcacggaggatcagcaggagcttctggagcgccggcgagtacgatgcggacaccagcggcgcggcgcggccgcctggaaatgtgcagaatcgcatgtgcgtccacccaaaattcctccactccaacgcgacttcccacaaatggccattcggagcggtggcggagttattggacaatgctgtcgacgagatcaaaactggtgcaacaagaattatagtggacaaagttaacggttgtaatggatcaccagctttactcgttcaagatgatggtggaggcatggatcctgattccttgaggcgttgcatgagctttggattctctgaaaaacagtcaggctcttcgattggacaatatggaaatgggttcaagactggcacaatgcggctaggggcagatgtaattgttttcagtcgctgcatgaagagcagcgagcctacacaatccattggtcttctctcttacactttcttggccgagaccaatcaaaaggatgttgttgttccagtggtggactacaaatacaatctattgacaggagaagctaaaccacaccagcggcttggtccagatcagttttcgtcaaatctctctgttctgttgaaatggtccccttttgcaactgaagaacaactgatacaaaatttcagtgacattggtccacatggaacaaagattgtagtcttcaatttgtggtcaaatgacaatggtgatctggagcttgattttgatatcgatgagaaggatattttgatcagtggtgctccaaaggcagcagaaacaactaatgctgcaaaaagaatgaacgaaagtcatctggcaaatcagttacactattcttttagggtctatgcttctgtcctatatttgaaactacctgcatactttaggatcatactccgaggagaagaagttaagcatcactacattgcatctgatctcagatatacccaatgcattagatataggccgcaggcctttggaaaaaaggaggacgaggtggatacaaccataggatttctagatggtgctccaaacatcaacctgcacggatttagtatctaccacaagaatcgccttatattgccttttcaccgagttttgagtagtgcaagtagcaaaggcagaggtgttgcaggggtattagaggcagacttcatcaagcccacccatgataaacaagactttgagaagtcacagctctaccagaagctaataaaccgcttgaaagaaatgacgaacgagtactgggatctatacagtcatctggttggataccataagttgccccgtgcagcttctggctctcatgcttctgctgcacttgtgccaactctgtcaggcaccattgctactgcatcgtcagagaggattccagccatccgtgacaatccaacaaatgcaattccaatcgcctttgctccccatcttgtctcttcacctgtaggaacaaatgctgttgctgcagtttgctcccagtcccagtcaagtatgcagatcacaattggcactgatttagtagatacaagaaaaagaagaatggaaactcttgatcagatggatggtcgatcgaaaaggctgagtatacatgatttggcaggaaacaactctgtggactcgagcaatcagatactacagatatgccagcatatgggagaacgggagttgaaggaattttcctacttgaagatagagaatacactactccgtcaagagtgtgcggaattagagtcatcagagaaggaactcttgctcaaggaacaacaattgagccttgaacttgagcagacggaggcacagtacaagagcctgttgaacgaatacatatcggtggctgcagttaggacagtgaaacgatag

SEQ ID NO: 98504 - DNA, 1782 bp, Oryza sativa
  Clone ID: PAT_MRT4530_96405C.1
aattccacccctttttattttttcaaaccagccagcagttaatcctgaaaccaggtcaaaaacagcattaaaaatggaaaggtaaatgggcaccctcaatggggttaaagcatgagcttatattacattcgacgttttctgtactagggtcggacaacaacacatcactcatggcctcaaactagattatcagtatccttcgaaaaacgggggcgggggcgattggtattttgctgacaatattggcgggaggatgacgggcttttgaattggcggcggcggggacataatcggcggtggcggtggcggcggcgaggaaacaggcggtggaggaaatgtcttgggcggcggcggcggcaaaaaggcaggcggtggaaaaaacactggcgatggcggggataccaccggtgccggtggtggcggggattgtaccggtgctggtggcggcggcggcggcggtaaatgctttgagctctccggcgctggctttttcgccggcgccggccatccacagggcttggtcttgctgcaatccaccggatggctcacgaccggggcacattcaccggcactcctctgcatcggcctcacgttgcccatgcagttagcctcgtcctccaacgacttgtcgagcttcgcatccagcagcgcgctgctgcactgggcgtcttccccggcgatgaagttgtacgagaccgacaggttcgtcaacgccggcagcggacggacgtcgcccggcacaacgccggtgaaggtgttgtgcgacaggtcaagctgctcgaccttggccaggccacccatcgtcgcggggatggcgccggtcagcaggttgtggctgacgtcgaacaccgtggcgttggcgaggaggcccgactcgaggggcaggcagccggtgaggctgttgttgaggaagacgaactggtcgagcgtggcggcggcctggccgatggtgggcgggatgcagccgccgaggtcgttgttggcgaggacgatgaccgacgcggtggacctgccgatggtgtccgggatgccggaggtgaagcggttgttgttgaggaagatggcgtcgtaggggcggaggaagagctccggcggaatggggccgtcgaagtcgttgaaccggatgtcgaggtagctgagctcggggacgcggagcaccgcgccggggaacgcgccgacgaggcggttgttgctgacgtcgagctcgtagagccgcgtcatgttggcgacctcctccgggatgacgccgcagaagcggttggagttgaggtggagcacggcgaggtcggacaggaggccgatctccctgggcaggtagcccgcgacgtcggcggcgttcatgtccagcgacgcgacggcgctcgccgacgcgttgtccggcgacggcgcgcagagcacgccgttgtaggcgcacacgtcggggccggcccagtcgccggtgaagttgccggggtcggagtagagcgcccgcttcagcgcgtgcagcgccctgtgcgccgccgccagccgcgggttgctcaccttgatctcgatgtcgatatcgatgtggacgtggtcgccgtgcttctcgaagttgagcagctggcgccgcgcgatggccgccgcctcatggctggtcacagcaaagcacgacgaggagaggaaggagaagatgacggcgacgaggaggaggaggggcgggaatggtgggagggtgcccatggtggttaggaatgtctcatcagccttggccgaagccaatggctaaagagaggaggaggtcatggaggggggagacaacgc

SEQ ID NO: 98505 - DNA, 214 bp, Oryza sativa
  Clone ID: PAT_MRT4530_96406C.1
ataattaaaacgcaacaccaggtttcgttgtgccggctgagaacctgcgcagggatacacactgccgtgtcagcactcagcttctctacaatactgaggcatacatgcgcgctacatacacaaattcgtacagctatactgtgcacgtacgtacatttactgcacggggttcacacacacacactgtcctgaagagacgcgcatacaacacaac

SEQ ID NO: 98506 - DNA, 359 bp, Oryza sativa
  unsure (1)..(359): unsure at all n locations
  Clone ID: PAT_MRT4530_96407C.1
cccacgngtccgggaccaaggtccttattgtggattagatttggatgattttaaaactctttaaacacaggatgcagaacagctcaataacagaagcgctggaccctggagggctatctccaatgctggtggaatatgaagtccggagcatattgcttagtttaaatttgttgtggtgaatagcgaggaaatcagctctttatgagtttgctcaagattgattgaagccagaccttttggtgnatattatcaaggncagttcatatggctagaggtatanncgcagccacacataaatttatctaccttgtanggngggttancccctganggntttgacangggtattnaaggtgatt

SEQ ID NO: 98507 - DNA, 779 bp, Oryza sativa
  Clone ID: PAT_MRT4530_96408C.1
cttgcgaccctgctctgctctgatacgtgtctgaagctgaaaacgatcgaagagaagatcggtcgaggttgccgaggaggaaggaaggaaggaaggaagaaggcgacgatggtggatttggtgaacggcgtgctcaactgggtggcgacgccggccatggtggccagcctgctgctcttctacccgccctactacctcttcaagaccgtccactccttcctctcctacctcttccccgacgacctcgcccgcaaggtcgtcctcatcaccggcgcctcctccggcatcggcgagcaattagcatacaactatgctctgaaccgggcatcattggtccttgttgcaagaagagaatggagcctgcgtaaagttgccgatcaagcgttcgagcttggagcacctgatgtgatcattcttccgggcgacgttgcgaatcctgaagactgcaaaagatttgttcagaccgcaatcgatcactacgggcgattggaccatcttgtgtgcaacgctggcatcgcaagtgttggcgcgtttcaggagattccagatgttactaactacagctctcaatttgatgtgaacttctggggttcagttcagtcaacttttgaagctctccctcatctgaaaaggagccgaggaagaatcgttgttactgcgtcggcaaccggatggaatcctgttccaagatgaccttctacatgctgccaatgctgcactgataaacttctacgagacgctgcggacagagcttggtagccaagttggatcacaattgt

SEQ ID NO: 98508 - DNA, 1360 bp, Oryza sativa
  unsure (1)..(1360): unsure at all n locations
  Clone ID: PAT_MRT4530_96409C.1
gatcggtcgaggttgccgaggaggaaggaaggaaggaaggaagaaggcgacgatggtggatttggtgaacggcgtgctcaactgggtggcgacgccggccatggtggccagcctgctgctcttctacccgccctactacctcttcaagaccgtccactccttcctctcctacctcttccccgacgacctcgcccgcaaggtcgtcctcatcaccggcgcctcctccggcatcggcgagcaattagcatacaactatgctctgaaccgggcatcattggtccttgttgcaagaagagaatggagcctgcgtaaagttgccgatcaagcgttcgagcttggagcacctgatgtgatcattcttccgggcgacgttgcgaatcctgaagactgcaaaagatttgttcagaccgcaatcgatcactacgggcgatgcaagtctccaatatcactgatttgttcagtaaatttcttcagcaaaatggaccatcttgtgtgcaacgctggcatcgcaagtgttggcgcgtttcaggagattccagatgttactaactacagctctcaatttgatgtgaacttctggggttcagttcagtcaacttttgaagctctccctcatctgaaaaggagccgaggaagaatcgttgttactgcgtcggcaaccggatggaatcctgttccaagaatgaccttctacaatgctgccaatgctgcactgataaacttctacgagacgctgcggacagagcttggtagccaagttggaatcacaattgtaacacctgggtggatcgagtctgagatgtcaaaagggaaatttctcaaggatcatggtgaaatggaggtcgatcaagaaatgcgagatgctcaaattggtttatttcccgtggagtacgcgaagaattgcgcaaaagccatggtacaagcggttcggcaagggaagcgttgtctcaccgtgccaccatggttcagcacaatgtacctgtggagggtattcgcaccggaggtcgtcgagttctgctaccgcctcctgtacatgcaccgccatggtggtagccaagctgatgcgccgagcaagaagatggctgaggctggtggaaagaagctcttgtatccaacgtcgctgcgctctgatgacatcaaggatgagtgaatgcccagttcttctgagcatgaacttcagtatattcctctgaagaactctgcaggtctgaaccttccatgaaatgggccaaatagataaaatcttagtatgaactgtggctatgatcatggaaaaatatgtatgtgctactattctgtgtatgaataagttgtgttctaatagtgctgtgttcttaactggtaaaaaaaaaaannaaaa

SEQ ID NO: 98509 - DNA, 238 bp, Oryza sativa
  Clone ID: PAT_MRT4530_9640C.1
tatccagtggcacatggtcgccggccccgtatgcgtaccaggtatttagtggtcgtcgaagtcaaacgtcccgtgggtaaaggggtacgtgtccgtccggtgtgtacacaatgtaatcattatagcatttctcacatttatataatgacttatgttatgatacgctggaatagtgtacttactccgtttaataatgtcactcattatacatttctcacatttaaaaaaaaaaaaaaaa

SEQ ID NO: 98510 - DNA, 239 bp, Oryza sativa
  Clone ID: PAT_MRT4530_96410C.1
gaaacctaataagggggcggggctcattttacttggccgataatactattactactccttcagttcacaatgaatgattcactgctatctagtttgcggttctaaaaatcgaatacttaatactcttcatacgcaactagaaaaacctagttgttggccgcactccgactacaatgccatatacgggacatttggggcgctgcttatcatatggcaatatcataccaacatttttctac

SEQ ID NO: 98511 - DNA, 497 bp, Oryza sativa
  Clone ID: PAT_MRT4530_96411C.1
gggtttaaagaaaacgtttttttggaatttaaatctacaggatgtgggaagctaatttaaagttgcccatcaaagttggatttcaaaccttgccagcattcgtagtagttggtattgatggggctgttgacactgaaaggagtaagcttgaacaaataagtactctcaaacataaacgacatggttccactaagtttgtaagggttaatttcacagggactttctcgttcgaatgtagcggtatcaggtccatgtggagtcatgcagctgtgcaatgaaactcctccctctcggaagccttctttcttggcttcatacactcccttaatcaggcccatgaactcactcatgcaattcttgggataataaggagggcggaaagatcgttcttgagcaatccatcgctcagggaagatcacgaaatcagctacagccacaccaggagatccactaggacaagtcagcactgtgaaaataccctcgttccgcctcgtgcc

SEQ ID NO: 98512 - DNA, 1020 bp, Oryza sativa
  Clone ID: PAT_MRT4530_96412C.1
atggtgaacttcgtggaggcgcagaagccgctgctgaagcggctgatgaggatggcggggctccggccggtggacgtcgagatcgagccgggcaccaccatgcacatctgggtgcccaagcaccatgtcagcaagaagaccggcacgatcaggccggtcgtcgagcacggcggcgtcgatggcgacggcgagaaggccggggcggcgaagaggaagaagagcgccgccgagtcgaggcccaacgtggtgctcgtccacggcttcgccgccgagggaatcgtcacgtggcagttcaacttcggcgtgctcgtgtcgcggtacaacctctacatccccgacctgctcttcttcggcaagtcggccacggccagcgccgaccggtcgccggagctccaggcgcggtgcgtggcggcggcgctcgcgcggctcggcgtggcgcggtgcgacgtggtcgggttcagctacggcggcatggtggcgttcaagctggcggagacgcggcccgacctggtgcggtcgctggccgtgtccgggtcggtggtggccatgacggacgcggtgaacagcgccaccatgacacgcctcggcgccacctcgtccgccgagctgctcatgccggagacgctcaagggcctcaagcagctgctttccatctccatgtacaagaagatgtggttcccggacaggttctacaaggactatctcaaggcgatgttcaacaacaggaaggagaggatggagctgcttcaaggcctcataaccagcaacatggatgccaagatccctactttccagcagaaaataatgctgatctggggcgaggaggacaagatcttcgacatagagctcgccaagaaaatgaaagagcagctgggcgacgggtgcttccttcacggcatccccaaggccggccatctgctgcacgtcgagcggccgtgcgcgtacaaccgccagctccagaggttcctctcgtacgtcaactcggaggagaaggaggcagccggtggtggcgccaactga

SEQ ID NO: 98513 - DNA, 1080 bp, Oryza sativa
  Clone ID: PAT_MRT4530_96413C.1
gacgagggcattgcatcgcccccctccctcctcctccgtctccatccaacgccgaccacttgagcctcgacggcgacgaccccacaccggcggcggagatgaacgcgttccggctagccggggacatgacccacctcctcagcgtggtggtgctcctcctcaagatccacaccatcaagtcctgcgcaggcatatctctaaagacccaggagctatatgcacttgtgtttgctgctcgttacttggacctgttcattcattttatatctctgtataacactgtcatgaagttggtctttctggcaagttctttctcaatagtttggtacatgaggcggcataagattgtccgaagaacctatgacaaggatcatgacacctttcgtcatcacttcttagtgttgccatgtttggctctggccctccttattaatgagaggtttacttttagagaggttatgtgggcattctccatatatttagaagctgtagcaattctacctcaacttgtgttgctacagcgcacgaggaatattgacaacctgactggccaatatgtcttctttctaggtgcataccgtgtgctgtatatccttaactggatctaccgatacttcactgagccccatttcgttcattggataagctgggttgcgggcatcgtgcagactctcttgtatgctgacttcttctactattacataatgagctggaagaacaatgtgaagctggagctaccagcctgagctcatttttcatccaagataggctaggtaaaacttgttaaatagatagaaaggcatgatacaccaaggccactgctccaggttatgatatatgcatcttggtttcctgctctatcctcttgtttatttcttttcctatttgtcggatgagaggaaatccaagggtcaccttgtatcttgttagacaattaagcacagagagatgagtaccaggacgttctgagttatgataggttttgagacacaatggaaatgctatcttttagtgtacaatgtggtatgatccttcagcttggaagaataaagtattctgtgttctgtcttcaaaaaaaaa

SEQ ID NO: 98514 - DNA, 400 bp, Oryza sativa
  unsure (1)..(400): unsure at all n locations
  Clone ID: PAT_MRT4530_96414C.1
gccccaaacccccaaaatcattttttgtcctttatcacccccttttttgtttgggagcatttcattattcattttttgttttgaacactatttccttncatgcaacacaacaaccgggtgatcctactacctatgaggcaagccacctaaaccttatactggcccgcggcaaaaattcttcacttctggggctcaacccggcacattaacggcaatttccccccgtactgcctccccctggtcagcctcacccgggtcatccccggttttttctttttctccccaaaataaccctccttcaacaaccccttgccgtaatacccctttttcgacaacaaccccttgccggcgtaatacttcaacaacaacaacaaccaaccttttttcaagggcattggca

SEQ ID NO: 98515 - DNA, 562 bp, Oryza sativa
  Clone ID: PAT_MRT4530_96415C.1
atgagcgatgaatggctaagggaggcagagctttcatccgaagtaattcggataaataccgctccccgaatcattccttgctatatggaagggaacgacgtcggtattctctacagtccaattgtcggggccaacctcgtctctgagtcttttgcattcgcttatttaagcgataaggcagtgaccccaacaaacaaatttttcaaacatccgaacggaaatatcattggaggatttgggattgtacaagatgtacctgtctgctttgaagacagggaggcaatcttggatttccacatctttgaaatccaaggctttgacatcctaatcatattgcccattgagcaactcctaatcaacacaccccgattaggtagcctcaaaataacactgggagaaaatgtattctcaattccattctcacgggcaaggatcaccttgaccgaccctctcccagaaattgagtcagcggaagaggttaccgcagttccccttcatgagtctcccgaagcccttttggaagatgagttccccaattttatcaaagaagaagcagatcccg

SEQ ID NO: 98516 - DNA, 186 bp, Oryza sativa
  Clone ID: PAT_MRT4530_96416C.1
atggtgggtgaagatatgcggcggtcagtggatgaggtaaaggtggtgacgcacagtcgtggagggggtcctgtagccacgacggagagaaggggcgaggagctcattgtcgactacctagctagagagatggagctcgccaaagcgccttcactactgcccaagctgatcaaggctcaggagtga

SEQ ID NO: 98517 - DNA, 948 bp, Oryza sativa
  Clone ID: PAT_MRT4530_96417C.1
atggaggctctgccgcagatacggcaaaccctcagcgagatcgaccgccgcatccccgacgccctccgcgtcgcgatgggcctccgcttgcggcccaccgccggcgccgcgctggaggaagtcacgaggatcgccgcgtcctgcctgcctcggccttgcccggagggcggcgacgaccccatggagtgcgacgaggcggcgccggcgcgggcgctgcggatggaggccgcgtcgtgcttcctgcccgaccacgacgaggacacgcacttcgttcgccccgaggcaggcgtcgtcgccctggcggacggcgtcggcgggtaccgcgcgccgggcgtcgacgccgccgcgttcgcgcgcgccctcatgtacaacgccttcgagatggtcgtggccacgacgcccggcggcgcggggggcatctgcccctacgcgctgctggggtgggcgtacgagcaggcggtatcggcgcggacgcagggggcatccacggcggtgatcctgtcgctcgccggcgcgaccctgaaatacgcctacatcggcgacagcgcgttcgcggtgttccgcgacggcaagctcttcttccgttccgaggcccaggtccactccttcaactacccgttccagctcagcgtcaagaacgggaacagcgtcacctcggcggcgcgcggcggcgtcgaggtgaaggagggcgacgtcgtggtggccgggacggacgggctgttcgacaacgtgaccagcgaggagctccagcggatcgtcgcgatgggcagggcgctggggctgtcgcccaagcagacggcggacgtcgtcgccggcttcgcctacgaggcgtcgacgacgatgggcagagacacgcccttcagcctcgagagccggaagaagcaagggacgattttccggcgagggaagagggacgacatcaccgtcgtcgtcgcctacattgtctga

SEQ ID NO: 98518 - DNA, 188 bp, Oryza sativa
  unsure (1)..(188): unsure at all n locations
  Clone ID: PAT_MRT4530_96418C.1
gccaaaagctgctacctacctagctaagcctaagctaagctccctcctgcttcttcatatattgtggtttggtttgcatcttgccgcgtaaactaccacactagtgtgcatccatgcacgcatgagcgtcatggaaacaaggcccctctccccgcgagcctcgccgctnccctcctccgccaagagcc

SEQ ID NO: 98519 - DNA, 604 bp, Oryza sativa
  Clone ID: PAT_MRT4530_96419C.1
gtgtggggggtgtgtttttttttgcagcttttcttttttccttttatgcacctatctgtctttgttctctttctcttttattattttttttagcaaaaacgacctcaagtagcttgttgcaagattatagggactcaaatgtaaatataaaaaaatgtggggggctgaaatataaaagtacaaatctaaaaattaaaatcatataaaaatgaatgctctctacatgtagattctatttttgcaaacggatcttcaatccagcacattaatttttttcaccaatctgagttgacttttttttttggcttttctttttctttttatgcacctttctgcctttgttctctttctcttttatttttttttaacaaaaatgatctcaagtagcttgttgcaagattatagggactcaaatgcaaatataaaaattacagggacacaaatataaaagtacaaatccaaaaattaaaatcatataaaaatagaatgctctcgacatgtagattccgtttttacaaacagatcttcaatccggcagatcattttttttaccaatctgagtcaaacttttttttgggtgatataggagttcggacttattttt

SEQ ID NO: 98520 - DNA, 1638 bp, Oryza sativa
  Clone ID: PAT_MRT4530_9641C.1
atgcaaagggaggctggaggtacagaacctgaaaccatcttgggccgcatggatgtagtcgaagattatatttcttgcggttttcttcctccgccttccgagtttcttcttctcgccttgaacttctatggcctttctttgcttcacctaaaccccaactccatcgcctttctgagcatcttctctcatatttgcgaggcctacattggggtagtgcccttccttgatctcttccgcttttattatgagctgcgctggatggaatccaacagggtgtctgtatgcgtcggattccgacttcgggatgacctgaagtcgcgttacatccccttccagtgcccctcttctcgcagcaaatggcagacgagatggttctatctccagatagaaaactcagatcccgtcctcgtggtccctaaggaccagccagaaaaaaatcccagagtggcccgccaaacccgccctgactccgaagacggcggttgtcgggatatcattgatgatctccgaagacggcggttgtcgggatacgaagtcgctgccgacttcataggtctggacagtgacaccgtggggcgctgcgttggccaaataatgatcagcgcaccctcgggggcgggcgacatccccgtcccacttagcgacaaggactcggccgagcgcgccacgacgattaatgcagcgacgtcactgaagaagcgcgtcaccaaggaggcatctgacgctgctgctaccaccacaagcggcagcaatgttcctaagaaaggaaggaagttctcctccgtgatcgggacccaccggaaggcaacgagcccggtgcggcgcgggcttgagcaccggatgtcagagctcgagggccatatgaccgacatccggggttcgctacggacgtcgttcactaacctgcaccagctcgccggggagtgtggtgtcacgactacaatcccgacacaccctgatgagttctcgctgacgtcgtcgctcgtggaactggctatggcgatggaggagatcccctccaagcatgaggccaggatcggcgaggagacgtcaaacgacatctacactggggcgtgccatgtccttgtgtgtatgaggctggcgtatcctgatttagaccttaagaaggccttggatcggggggccaccgatgacgcgcgcaaggctacaatggaggaagtcgttgacttgggggagtctgtcctcctcctttttgaagaatgtgttgctgtcgaggatgtccagcagcgtgggcagcctgatgtaccagcggttgttctggcgctcacacttgagccgcacgcgccgctggtggaagtcaataagagcccgttcgtggagacgaacatggcgatgacgtccttagtattggaagacgaaactcgaggtggccgagaactcgagagagccatggttgaggtgaagaaagaccaggccgtggaagccctccgaggtcgcgaggtgtggttcaactcatacctcaagagttgctgcacggcggtggcggaggtttgcaaggagctccgagttccccgcggagatcccgaggagtcggccgctggttatatctcgtggttgaacggggcctgcgcacagctcgaagggattggcaagcacatcgacgagaccctgaagtag

SEQ ID NO: 98521 - DNA, 101 bp, Oryza sativa
  Clone ID: PAT_MRT4530_96420C.1
atggcggggagatgtgggctaagcgggagctgtgggcagaggatggggacgaccacaaagctggcctacatgtacaaggggcttgtcgatcaatttggcat

SEQ ID NO: 98522 - DNA, 279 bp, Oryza sativa
  Clone ID: PAT_MRT4530_96421C.1
atggagaagccggtgagaggacgagggcatcggcggccggccacgggcgatgcagcggtggtgaggggaggagctgtgggcgggcggtgggagaggggcagcgcacaggtgggcggtggaagcggggacgtccacctcagtggtagcggccgcatgctcatttcggcggtggcatggagctcggcgagctccatgtcttgccgtgctcgtgccttctcggcttgcgccttctccaagcttcgtcttagctcatcaagaaggcgcattggtgccgcctag

SEQ ID NO: 98523 - DNA, 315 bp, Oryza sativa
  Clone ID: PAT_MRT4530_96422C.1
atggtggagaagcaaaccaagctggcggtggggtggcgaaccaaggacctccataaggatatggcactgccgacgggtggatttgtgtcgggaggggaagagctcttcacgcgcgagaggggaagagatggcgcgcgtgggagggaaagagatggcgtgcggcacgggagatcgagcgccatcacccgggatcgcgcgggagatcgagcgcaatcgcccgggatcgtgtgggaagggcggagatcgggcgggcgctgggtggaggggaaaggggatctcgatcagctacggtggggaagggatcggctgcggtga

SEQ ID NO: 98524 - DNA, 189 bp, Oryza sativa
  Clone ID: PAT_MRT4530_96423C.1
tttgttgcagcaggagacgcttcacaagcagagggacctcttacatcccggggggaggttctgcccgcgcccaccgaatagacaggagaggtttatccggcgtttcgaccggcagctcgtgcacccaaaggtctcccctgagctgctggccattatgttcaactacctctcccagcgagatgagtcgtt

SEQ ID NO: 98525 - DNA, 550 bp, Oryza sativa
  Clone ID: PAT_MRT4530_96424C.1
cgtgctcgccgtctcccgccgtggtgcacggcttcggctacgcgacttcggcgagtactccgcgtggggaagcgtgtcccggaacccggtcccgtcgtccggaactacttcgccgtggtgcccccgccggggccgcatggactcccgcaaccaccccgcgggagttcctggaccgtgctgccgggagctcgccccgtgccgatccagtgccggtgcgacgcgctgagcgtgctggtgccggcgtggtcacggaggaggccgaccgcgtctccgggatgatctcccagcacgcgcaccggggtgcgacccgcgacgatcccgggatggcgagcgcctgacggactacgccggtccaacctccagcacacgcccggttcctttccctccctcattttgtgtgccatggattagattaattattccattagtgattaaataattaattagccctttgcttaattaatatcgatgtttgctattactagctaccagtatcatgtttggatcctcttctctatgtttgtgataatgataataaaaaaaaaaaaaa

SEQ ID NO: 98526 - DNA, 465 bp, Oryza sativa
  Clone ID: PAT_MRT4530_96425C.1
gcacgagctatggggaggcccattttcttaaaaacccaaggtccaggggtccgtagctgccaccaccgcactgaaggcaaacacgattcgtccaccggctcttcttctcgagcggagaggcattttcccctcttgaatccatcgccgcggcagtgattcgcccaccggcggcggctgcgagcgtcggcatcggcggcgctggaagggtcaggcttggaaaaaaagagagaggcagaagaaacactacagttctacatgcaccaagatcctatcagaggattggattttttttttttcaactacaacatgagaacagcggtggcagacacatcaagcatccacatatcaacaaaaaaaatagaaaatacatttgacgatctgtattttatactaaattcgtccttgcggtttcgatcgacctgatcctcttgcttcctctaatccaatatagtgtatttgatctgt

SEQ ID NO: 98527 - DNA, 1279 bp, Oryza sativa
  Clone ID: PAT_MRT4530_96426C.1
ccggccgggaatccccaaatcgaaggatcgggagccgccggattggtcctcaaatcgaccccaaatcgaaggattgagccagggacgccgccggatccgtcctctaatcgaccgccatggcgatcgcccgcaccggcgtgtacgtcgacgactacctcgagtattcgagcacgctggccggcgacctgcagaggattctctccaccatgcgcgagctcgacgagagggctcatggcattatgggacagaccaaagaacagataaagtatctactcggagtgccatcccatgggttcgacaggtcaaacatggatgatgatgaatctgcctcagagagaatgaaaaaggacatcgaagctagtcaggacaatgcgttgagtctctgcaccgagaaagtgttgcttgcacgccaagcttatgacctgatagagagtcatatcaaacgtctggatgaagacttaggccagtttgcagaagacttgaagcaagaaggaaagatacctccagatgaaccatcaatccttcctgcaatttcagcatttagcagggatgacaaacggaggcctggtttcagtacacctcaagcaacaaagaagttcagagagagggaatgggacagggaaaggggtatggacttcgacttaatgccccctccaggtagcaacaagaaaacaactgcacctatggatgtggatcaaacaattgatccaaatgaaccaacatactgtatatgccaccagatttcatatggtgatatgattgcttgtgacaatgataactgcgaaggaggtgaatggttccattacacttgtgttggtctgacaccagaaacgagattcaaggggaaatggttttgcccaacatgcaggaatctttaatgagaggttctccaaagttgtgcgaagcaggacagtggctccactgctcatgtgttagttcggcgctcggagcggtttcagaagatgcatgagggaatcctcagtaatgagttggtccaaagttggtaggatgcaaaatggtgacaactttggaattgtagggtgcgcattacttgacagttaacagtgggttaaggttgttggttcaccaggtttactttagtttgtccatgtatatgcaaggggcaacagtaagactatatatataaacttgttcaaaaatctctccctgtgagacagttgttcttatagtggtgaaatgctttactgctcagtgcagctgctgtagtctcccaaatgttggctaccaagtatccatttccatagttggtgaagcttcc

SEQ ID NO: 98528 - DNA, 862 bp, Oryza sativa
  Clone ID: PAT_MRT4530_96427C.1
cccacgcgtccgaatgactgctccattgtctaatgtccagaggatgaagtttacaaaaggtggagttccctttgtgctagactttcttcctaaggtcgattatctaccactatctctcatggtaacagcttttaagaaggaagatgtcaaaaaaccattggaaggatttggtgccttgataccctataaggaacagcaaaagcatggtctcaaaacccttgggaccctcttctcctcgatgatgtttccagatcgagctcctaatgatcaatatctatatacatctttcattggggggagccataatagagacctcgctggggctccaacggctattctgaaacaacttgtgacctctgacctaagaaagctcttggtgttgagggacaacctacttgtgtgcgcatgtacattggagaaatgcttttcctttatatggccagaattatgatctggtactggaagctatagcaaaaatggagaacaatcttccagggttcttttacgcaggaaataacaaggatgggttggctgttggaaatgttatagcttcaggaagcaaggctgctgaccttgtgatctcttatcttgaatcttgcacagatcaggacaattagcatttaaggtatctgaccttaagcaatttcagacaaatttgctcactttatgtaaattgaaaaggttcacatgatttccagtttcatatttttctcttgctatagtatatccactcatgtaaagatgggaacatagtcctaaaagacattatggtcgcttgagatgctcatgtttttttgaacagtgattcttgacttgtactattttttgacaaccaaataaatttctcaatgtttccgagaat

SEQ ID NO: 98529 - DNA, 885 bp, Oryza sativa
  Clone ID: PAT_MRT4530_96428C.1
ggcggaatctcgtcttcgctcatggagaatcgggggaggagagctccgctggatttctcacctcggcgcagctgcctcaacccttgcccccatccgattcgcggccgacgtcgccgatcttgccctagctccggcatggcccgacctcctccgtccaccccaatccccccggccgcgtcggtagcgccaaaaaactctagaaggattcgtcttcctcgaccacgagcgcgcgcggggttcataaaaactggaccaacaggctacagagaaccttgagctatacatcagcacaagcatattgtcaacaagtagaaagatgcatcgaaatagcgtctaactgtatggaaactgatagacacaaaaggcccagcataggggatgtgatcagtatgctaaatgcaacagaggttggttgccaagaagctgaaactgtggaatccacggagctgcttggcattcaccctgttgagctccgcttcgtttttgagccaaataagttgattccttgctcactgcacctcacgaatagcacagcttaccgtgtcgccttcagagtcagtccgaggaggccagatatgtactttaccgagtggctctgtggtgtcgttccgccaatgtgcacttacaccctcattgtggtaatgaaagagaggcagcagccactattggatttggatgcagatgagtttgtgttggagcagagcagcataatggatgagaacgaccttaacgttatcagccaaggaaaagccgacacagagtacaatactttctttgcggaaattgaagagaagagtgctgttaaggtgcaagagaagaaattgagagctgtttgtgacccacgaggaaagacggcctctgagattatgtccacgatggactttg

SEQ ID NO: 98530 - DNA, 1029 bp, Oryza sativa
  Clone ID: PAT_MRT4530_96429C.1
acgaggatctactcgcgcgcccaaacaaacacgcgaagcagcaacaccccgagcgagtgagtgcgtgtgaagccatggcggcgccagcagccagcgcgctcccgctcgacggccgcgtcgcgctcgtcaccggcggctcccgcggcatcggccgcgaggtgtgcgcccacctcgcctccctcggcgcccgcgtcgtcgtcaactacgcctccaactccgccaacgccgacgccttcgccgccgacctcaactcccgcggcgccgccgccctcccgcgcgccgtggcggtgcgcgccgacgtgtccgacccggcggcggtgcgcgcgctgttcgaccgcacggaggaggcgttcggcacgccgccgcacatcgtcgtcgcctgcgcgggcctcctggagtccaagtacccgtcgctggccgacaccgccgtggaggacttcgacgccatgctcgccgtcaacgtgcgcggcacgttcctggtgtgccgcgaggcggcgaaccgcttcccggcgggggcggggggccgcgtcgtgacgttctcgtcgtccatcctcggcacgctcctccccgggtacgcggcgtacacggcgacgaacggcgcggtggaggcgatgacgaggatcatggcgaaggaggtggcggcgaagggggtgacggcgaacgtggtggcgccggggccggtgaggacggagctgttcatggcggggaaggacgaggcgttcgtgaagaaggtggaggagaggtcgatggggcggatcgccgagacgacggacgtcgcgccggtggtggccttcctcgtcagcgacgccgcggcgtgggtgaacggccaggtcatccgggtcaatggcggcttcgcgtgaccgagctctctcccccttcgtgtgcttctccgataagctggagtgttataggagtattattgttggtgtgttggaataaaaaaaaatgaatagctttggcttgtatgtagagtgacagttgtatagtgacataataaaataataataaatttgtaatgtttagtgaggt

SEQ ID NO: 98531 - DNA, 529 bp, Oryza sativa
  Clone ID: PAT_MRT4530_9642C.1
ttttttttttttttttttttttttttttttttttttttttttttttttttttttttttttcccagaaaaacaaaagggaaaccccccatatcagaaccatggaccggaagggccttaaaaaaacacaatccctggctagtggggaacaaaaacccccaaagggcccaatattttttttttaaccaaaggcaaaaaagggggaaccccgaaagcaaaacgtggttttaagcgaaaaaacaaaaaaacccccaccccatcaaaaaaacccaccctaaaagggggcagaaaaacccgggaaaacctttcaaaagtcaaaacaccccagggcaaaaacgttcaaaggggacctttcaccagcgacaacgggggacttcttgaaacccgggggggcgctccccccggaaaagaaaaacggccttgccctccggggccccgacccccggaaaatagggctccgcgtccaaagaaaccatgccccctgacccagggggagaaaaacccgggggaaacttttgggccggccaccccc

SEQ ID NO: 98532 - DNA, 1741 bp, Oryza sativa
  Clone ID: PAT_MRT4530_96430C.1
cccacgcgtccggtaaatccccatccatagctatccaagagccccaaatcagatgctctctcctgccaccaccttctcctcctcctcctcctcctcgtcgccgtcgcgcgcccacgctcgcgctcccacccgcttcgcggtcgcagcatccgcgcgcgccgcacggttccgccccgcgcgcgccatggccgcctccgacgacccccgcggcgggaggtccgtcgccgtcgtcggcgccggcgtcagtgggctcgcggcggcgtacaggctgaggaagcgcggcgtgcaggtgacggtgttcgaggcggccgacagggcgggtgggaagatacggaccaactccgagggcgggttcatctgggacgaaggggccaacaccatgacagagagtgaattggaggcaagcaggcttattgacgatcttggcctacaaggcaaacagcagtatcctaactcacaacacaagcgttacattgtcaaagatggagcaccaacactgattccctcagatcccattgcgctcatgaaaagcactgttctttctacaaaatcaaagctcaagctatttctggaaccatttctctatgagaaatctagcagaaggacctcgggaaaagtgtctgatgaacatttaagtgagagtgttgcaagtttctttgaacgccactttggaaaagaggttgttgattatcttattgatccatttgtggctggaacaagcggaggagatcctgagtcattatcaattcgtcatgcatttccagcattatggaatttggagaataagtatggctctgtcattgctggtgccatcttgtccaaactatccactaagggtgattcagtgaagacaggaggtgcttcgccagggaaaggaaggaataaacgtgtgtcattttcatttcatggtggaatgcagtcactaatagatgcacttcacaatgaagttggagatggtaacgtgaagcttggtacagaagtgttgtcattggcatgttgctgtgatggagtctcttcttctggtggttggtcaatttctgttgattcaaaagatgctaaagggaaagatctcagaaagaaccaatctttcgatgctgttataatgactgctccattgtctaatgtccagaggatgaagtttacaaaaggtggagttccctttgtgctagactttcttcctaaggtcgattatctaccactatctctcatggtaacagcttttaagaaggaagatgtcaaaaaaccattggaaggatttggtgccttgataccctataaggaacagcaaaagcatggtctcaaaacccttggtcaccctgctagctgtattgaactcaatatacaaatcaaccttgctacattgctctactttttctcagggaccctcttctcctcgatgatgtttccagatcgagctcctaatgatcaatatctatatacatctttcattggggggagccataatagagacctcgctggggctccaacggctattctgaaacaacttgtgacctctgacctaagaaagctcttgggtgttgagggacaacctacttttgtgaagcatgtacattggagaaatgcttttcctttatatggccagaattatgatctggtactggaagctatagcaaaaatggagaacaatcttccagggttcttttacgcaggcaagtcaatgaaggcacccctattgtacaaaagaaatcttagatatttgaaacatattcctgttgattga

SEQ ID NO: 98533 - DNA, 1021 bp, Oryza sativa
  Clone ID: PAT_MRT4530_96431C.1
tttttttttttttttattggaacaaatactgctctgattattggaatagttgaagcaataactagcaaatgcttttagctttagcattgcatggtaaactaacatgaatactttgccagtggatatgaaagaggtaaataaacatacacaggcagtaaagcatcgatgcgaaatgaaacagtagaaaggagaaattaataaaagaggccccattaaaagatgagttcacaattcgcagataaaaaaacacaagcaatccctagtacagtacacaaaaaaggaaaaatcaacaccagactgagagaaccgccaatgatgaaggcgatgccacaccatactatcatcaaaaggcaactcaaatttcaaatttccatgtcaccaaagggaggccaatagagcacgattgtttcaaatttcagttctcatgacagctctggatcaggatcagtcccaagcactagaaaaaccttgcccgccacctccgtagctgctaccgccaccatagccgcctccaccgccaccaccaccatatccgccacctccataacctccacctccaccaccataccctccaccaccactgcctctgtctcgtcggaagtcccggccaccaaacctagcaccaccacctgacctgcggtttctcccgccgccgcctccaaacgatgaacgggcagcatacctctcaagccattgaggaacctcctggttagcctcctgcatgagctcactcagcggccttgccagtggggtgttgctctcgttgaaaaatgcagttgccagaccagatttccctgcacgccctgtccttcctatccgatggacatagtcgtctatatcatttgggaggtcaaaattaatgacgtgggcaacatgaggtatatccagtccacgagcagcaacatcagttgccacgaggatgggagttgctccactcttgaaggatctcagggcatactctctttcctttttcgttacatattcagaaataccagttgctgggaacccattgttataaagc

SEQ ID NO: 98534 - DNA, 248 bp, Oryza sativa
  Clone ID: PAT_MRT4530_96432C.1
accttgcaagtcaacagcactattttaaaagaaaaacattaacaccatgtgtatatctaaaggaaccggcggctcatctggaagaccaaggattcagggagggatgtgcctgatagaaagcacagaatctgaatgctttgccctagagaatcatgtcattttggctactatcaaaaataacaatgaatgcccttcacctgacttctaacccgaaccccaaacaaaaaaagaacattttatttactatg

SEQ ID NO: 98535 - DNA, 306 bp, Oryza sativa
  Clone ID: PAT_MRT4530_96433C.1
atgccgacgtccagaacgtcgtcatcctccaccttcggcaggccctacccgtcgagccgggcgcttccagcccattctgtcgctgctgacggccgcgcctcgccgtgctcgtccccggcatccccttcccaaagcccgaagctcgctagaaacctatcctcgctggcgaacagtgaggacaccgtcgtcttcttcttccggcagccccttcccttctcaccggagcgccgccttgctgcgccgtcgctgctgtcggctgcacctcgtcgccctcttccttggctgcaccttctcttcaagcattga

SEQ ID NO: 98536 - DNA, 330 bp, Oryza sativa
  Clone ID: PAT_MRT4530_96434C.1
gttgcgtccgctgagatagcagcgaaaggagatgagacgaagcctagccacacgtcatgcacacaccagtgacagaggtctagctcagcttatcgcagtccatctaggacgcaatatggtaggcagattgaagaaactgccctagacgcggaactcctgactgaagggacacgggggctggtatactcgtggacgtgaacaggccctgaaagctgacctaacggacgatcttatcaggaaggttgcgaaaggtcaggccctggtgcaggcgcttacgtaccaacggattattacacccgagaaccggcagggcttgcgacaccggaacat

SEQ ID NO: 98537 - DNA, 640 bp, Oryza sativa
  Clone ID: PAT_MRT4530_96435C.1
tcggctccatggaggctctcgcctatattgcattcgcttggtctccaaagcatcgtccatggagatgtcaagccaagcaacatcctcattagtgacaacctcattcctaaggtctccgactttgggtcatccaagtccgcattgaaaatcaagcatgcgtgcgccgataggaattacgtcgaccccgtgtgcctgaagacaggaaatatcactgagaagagtgatgtctatagctttggagtagtgctggttgaactcattactcggaagaaggctaaatgcaatgggacaagtgcccgaccagattttgtcaggtattacacagacgatgatgtgaggaggaagatgtacgacccggacatgtacgctagtgccttgcagtcagctcggtgcatggagtgccttgacaagatggctgccatcgcagtatggtgtctcaaagatgatgtggacgagaggccgaccatggcagaggcgctggaggagctcaagcagttgagagcaagcatgcaagagatctaagtcatatacaagatgtggcgagcgagtccgttctccaggctttcggttggtggcttactgcattattctctatggtttcacttcaccctgttattatctgggtctcagccataggtgt

SEQ ID NO: 98538 - DNA, 446 bp, Oryza sativa
  Clone ID: PAT_MRT4530_96436C.1
caattcccttgcaccactagcttctcctcactccggcgaatccattttacccgttttcccctgccttttcctcttgaatccagccacaccgaagctctctttctcctgaccggaccacgcattatcttcgccgttccggccatcttacccttcatctctaccagccaccacccctcctaggaagcaggaaggaagaagaaaacgagaaaggagaagacactgacagcggggcccactgcacaaccatacaagaagttctatcggcatccaaggagctgacgtggacccagatggctacgctgaagccacgggaaatattaaggcacaaggcaagacataattaaaattttgatcatatagaaaactttatatgatcttcatatttaatttgatgcataataccttactcttttaacatctcatgggtagatgttaaatgcttttaa

SEQ ID NO: 98539 - DNA, 345 bp, Oryza sativa
  Clone ID: PAT_MRT4530_96437C.1
gggaaaatcggctttaattaggggtttttaagcaagggccccgtctccagggtggggggattccaaccgggaagatgaaaaaaccccgggacaggtttttaaacccccccaaaaaaaattggcagtaatgggggaacagggataaatattccggggggccccggcaaggggccctggggcgggtttttttaaggggggctcggggtcctaaaaaaaagtttccgggacctgtttgggggaccctttttttttttcctggggggccccccccgcccccggggttttttttgggggctccgggagggggactcctggttcacgggggttttcggggggggggggggg

SEQ ID NO: 98540 - DNA, 156 bp, Oryza sativa
  Clone ID: PAT_MRT4530_96438C.1
atggtgtacgtccacatggacgacgtcgcgagctgccgcatcctgctctacgagacaccccgtgcagccgggaggtacatctgcaactctgctgtcctgaacatcaatgagctgctggtcaccttgctgttcttcttcttctcatgtccaaggtga

SEQ ID NO: 98541 - DNA, 276 bp, Oryza sativa
  Clone ID: PAT_MRT4530_96439C.1
atggctactttcgctaacaatgcctctctcggcgagctgccgagctcgtacaccaggtacatgtacccgctcatggcgcagaagccgtacttggagcttgacgatgttcccgtagcggacgcgcgtcagcaccagctcgttcaattctccaagctcttctcactgatgtcccagcagtcgccgcagctccaacactaccgctgggctgctgcacgcggctgtcagaaggggaaggagctcgcgaggaggcggtgtgtagggatgaaagcaagctga

SEQ ID NO: 98542 - DNA, 439 bp, Oryza sativa
  Clone ID: PAT_MRT4530_9643C.1
acaacaccatatttcattgatcaggttcagatcctgttcgggggaaaaaaatatatagccggggcttccatatttttaattcacatatgcctaacccaacaacatataggcgtaggacataccacttttacattaagttacagagagagcaggggaaacaaaaacaaaagctgatctcgggcggtaaaattaaaagacgatgaacaaacgtgggaacacacgaaacaaggtgggagagattctcgaatcagagatgaactatttaacaggggtctatatggcggtgacgggttaattggcaccagactcctcgcaacccgggggcttgtgggcgagtaaactggtgagctgcacctgcctgacgttgtctaaacccatgatccggacaaatgcatcagggtacggcttcttggccttctcgagctccttgagcacctgg

SEQ ID NO: 98543 - DNA, 574 bp, Oryza sativa
  Clone ID: PAT_MRT4530_96440C.1
aaacaaactggtactatacaaggaaaacgggcaaaaattatcatcaaaaagccctaagcctgatgctcaagggaaaatactctcaggctcaaccctttgatgaaagggaaaaggaaagaggaaaagggattgttactgcatcttttatgagggggcacttaaagggcatggctcgaaattgacttaaaggactgagtcaaagttgatgactgggccagggatggatgctttgactgaccatcccaacaaatgtccctgaaaaaagggcttaagcccttggtgcaaaatttttcgtactccaacggggcccctggaaacttttttacctaaacaacaaaaaagggatgggggcacttaaaaaatctttggattgatcgggagctgccctttcctcccttttttggatccctggagcttaaccaagccatcctggtttttcaccttgaagctttttggctaaaaaatctggtctaactttgacactattggtgaagctggtttttggggcaagaaccgggaggctgccttttgctctttggcggtctcaaacaggcctgacagataaaatcctttg

SEQ ID NO: 98544 - DNA, 451 bp, Oryza sativa
  Clone ID: PAT_MRT4530_96441C.1
tgaaaaaaataatttattttttataggagaaaaaaagaggagaaaaaaaagggaagaaagagatggacgaggcgtgggagagggcggtggaggcggcgcttcatgccgccggagaggggtgctcgtctccgtcgaggagcctgacgctggacggcgccgtgaagtgcctgcacggacggttgcccttcgcggacattctggagcgttaccagagcctgtagcccctgttcgtcgccggcgttggtgtcgtgtctcttgcccgggctccctcgtttgctctacctgtctctcctgccgttctcctcctcccgtttcgccttattccttctccaccttcgcttcttcccctcttggcccttcttcctttcctcatcctctgttctcttcttttcattactcctcctctcctcttctcccttcccctccttccccctcttttcgttcccctttt

SEQ ID NO: 98545 - DNA, 1747 bp, Oryza sativa
  Clone ID: PAT_MRT4530_96442C.1
ccggccgggatcgacgcatcgcgccgcctcgcgtctcgggctctcggcgtcgtcgctgcgcgcgaccgcgccggctcgccgcctcccgcccctgagagtggagacaggggcaggcgacgcgacgcgacgcgacgccgccattctgcccccgccaccccgcgcgccggcgccgggtcccctgggctctccgcctcaggcctcagcgcctcgctcgccttcgactccctatccctctccagctctcttgctgccctgagtgcaacgctctaaccacaagtctggaacatttctccaggtgacctctgtgagtctgggagcaggtaaattaagtaaacatgatatatttgttctctaaaactgttctctgatacaggtatactgcttggatattcttggcagcaatatcaccatctccccagttttcagtcaatggggttggatttacggatgagcctttctcttttcctcaacatttatatctcctctctaattttcttgatcgtattccatgtcatattttttggcccgtggtatcctggccttgtttctcgtatggcagaggaaaagtcagatatgcttattataatccaagattgtgcagtaaaaagtatagcttgctctgtactttacagccactgacccgctgtggtaacaagacgtcgtctcaagagataaatctattaatcgtagaactgctagctggattgtgttctctctgtgggaaaaaaaaacatgaggacaattcacttatttcaaagctatcacgtatgcataagtttaaagagcagatttgttcatcctggtttgtctctgctagtgattaccctcttctatctgaacgggcaatttatggagaattagcttctaatggatcctgatgttccaatgatatttcacgtgtctactcattatgggctacatgcattggtctttacatagccagttgtggagcggtccatcgggtgtgccaaccatctgaacacatccacctgataattctctattggtgtgtgttatgagaattcagaagtcaaagatatgggttctgtcataatgagaaagcaacacctgatattggaaaagggaactaaattcaccatttgtttatctaactgggcactatatatacgaactaaaaggaaatcccatgttcacatggtgtaattgtattacatccaaaaaatagtagaaactaaaagtctccttggtttgttcagattttttttaaactcagttttcgtatcttttgtttcatttgagttgcttatagatgggctctaacggtgggtatgaaaaaatgaagaaacagctgaaaccagattttgagggtactctgggtaatattagtgtactccacaaagatggtgatttttttccttttcccgcagacatccaaatccgtcctcgttttcatatgaacggcatcttttcttccctttctagtatgccttccagccacctgcttggtataaacttgaacatgtagcattggtgaaacccgagtttctgagctcaggaaatatcatggacgacagtgtcttattgttcttggaaaccatgataagtttggttcactgcacacattcatgaggtatatatgtcataaaagttggctgggtgagtgatttctacctcagaagatcatgaattatttagccttaaagcttcctgattggtggtgggtttttggccttgatcaagcacttcatgttgacattgatatctggaaacaaaatgcatttcgacc

SEQ ID NO: 98546 - DNA, 282 bp, Oryza sativa
  Clone ID: PAT_MRT4530_96443C.1
atgcatgacgacgtcaccctgattcctagttgcttcctgctcctcttcaaaggcagtgacttgcatgcatgccaggcaggactgttcccaagtcgctcgttcccctggtacggatggtcagcgggcctgtgtaccgtcgtctactgttgcaaacttgcaatcgacgacgaggagaattttagcatcaatgaacagaaaatatactatattcggaagtcatggaaattcgacgcatctataattattaacaacaaacagtgtactactgagttctcactgtcg

SEQ ID NO: 98547 - DNA, 284 bp, Oryza sativa
  Clone ID: PAT_MRT4530_96444C.1
ttctgcccaagagcgagcctagaaccaccacgggctccgtcgccgatgacagcgcttctcctcggatcagcccggagagccctctcgggagctcactgcaccagccgcaagcgaggcaacgaaagcgcttggtccacgcccaggatgtccatcaactactacctacacagctgcccacaccttgagcgcatgcccgcggacgagccacccagcagagcatgcgccaacccgaccacggcggcggacacgcatcaggataactagcgccactgctactgccaagg

SEQ ID NO: 98548 - DNA, 370 bp, Oryza sativa
  Clone ID: PAT_MRT4530_96445C.1
atggagggagtactaattacagaatgctatgcccctggttgcatcctttcaacgacggcacagaaaaacaagattgtaatcgtgacgattgctgtaagaaatgatctagtgctagcactaatcatgtatctcctaccccaatagcgccggtgccagtggaagacattgcgatggagaggaagtagacggtgcagacagctgatgcagaggaagtagacgtaccagaggacgtagccaatgcagaacagcagaagacgtagccgatgtagagcagtcgcgtcgaaggatgctccccaaaaatatgatcacccgcccatgcaggtacataagcggatggagtttcaaaggcctgcttgtcccgagcacccat

SEQ ID NO: 98549 - DNA, 1322 bp, Oryza sativa
  Clone ID: PAT_MRT4530_96446C.1
acgccgctgctgccggccggcgccgcctctccgcatcatgcgcggcaacatcgtgtgcgtccgccgcggcggcctttgcatgctctgcccggcggcggagcgggtgaccgacgaggagatgatgaggggcaccaacgccgccgccgccgccggtgccgggaacgggatcgatcatcgacatggcgtcgcttataatatgggatgaagcctccatgtcaaagaggcaagcggttgaggccctcgatatgagcatgagagatataatgggttgtccgtgttctccgtttggagggaagacgattgtgtttggaggggacttcaggcaggtgctcccggtcattaggaagggcgctaggtctcagataacagatgccactctgcgcaggtcctatctttgggattgtatggttcaattgaagcttgttcgcaatatgagggtgcagagcgacgtgtggtttgcggactacctccttcgagttgggaatggcaccgaggaggtgaaacggatatttgcatgtcgtgcaaagagaatgaaacggacctcgaaaggctcatcgatactgtgttccccaacctaaacgataatcttacgaacccaaactacatcacataggatgacccttataactattacccgcctgaattcttgaactctctaactctaaatgggctacctccgcatgtgcttaagctgaagattaactgccccatcatgctattgaggaacattgacccagccaacggactttgcaatgggacaaggctggtggttcgtgagttcggaagaaatgctattgacgtagagattgtggtagggcagcatgctggtaagagagttttccttcctcggatacctcaatgtccttcggatgatgagatgttcccctttcgcttcaagaggaagcaatttctggttagattgagctttgcattgaccatcaataaggcgcagggacaaacaattccaaatgcaggcgtctatttaccagagtctgtcttctctcatggtcaactatacgtcacgttgtctagagcaacctctagaacaaacataaaaatactatcgatgccgaagaaattgtctaaacagacagcagcatacacaaaaaatattgtgtatagagaggtcctcacagattagaaaaggtatattatgtgactattaaccatccataatatgcttgcttaaattccattctttctgtaatttttatattccaagtctaacatttcgtgtgtttttttcttggacagcagtaaacattactttcggtgggattttggcacggactatatgcaccattacgggtattgtgatacta

SEQ ID NO: 98550 - DNA, 4968 bp, Oryza sativa
  Clone ID: PAT_MRT4530_96447C.1
atgcctaatagtcagccatttgcggatgaccgcgatgcatccttcagtacacccagcaatttgcctatgtgcacaggtgcgcatggagatgttactaaccttacccatgctgaagttgtaagaaagcgtgctagaaactggtatgcatcattgacccaggagcaaaaggatgagaggaacaagaaggaccgtgagagaagaaaacggaaggaggaggaaagtcaagttttaaataagtctgcaaccaatagtggtgtagccccacttggcaagctttccaatataagtgctgctgatttaatgacatgccaattggaagtgaacgattcttctacgttgcataaagaacgaagtgatgcttcccatcttaatatcacacccagacgtctcccatttacaatcatcaacaatgtagctcactatggtccaaatgaagttccaatgagctgcgtaattcaaacaacccaaaacagagacgtcaagttgcgtaatgcaactcttacaccggagcagaagcaagctaaggtcgatcgacagagaacaagacgtcaagcactaaccaatgaacagagactagagatgaatgatcgccgtagggttgcgaggcaaactctgccggatgtggaaatacatgatatgaatgctcgccagcgatcaagacgacaaagtgttactcctggagaacggtctgctcatctggcacgacataatgaactgtatgcaactaggcgtgacaaaccatgcgctcaatcgattgcattggagtgccctgaggattgtagctcgtcgttcctaaatccaacgccttcctttgaaacaaccggtgatgtgccagctacatcgagcctgcaaactgaacttgctgcagatcatcttgcacgatcgtctaactttgatgatggtatcatctatatatgttttcatttatactcgcaatttgtacccttcctcatactcactttatattcaactaaattagatatggattccttcatggatgatgacaccgacgatgaacactacatgtttgctgggctaggcgatgatgaggatgacgagatggtacaatccgatgacgatgacacgcaagcactgagctcttcaattcctgatccgttcgactttgtgtatagcaacatcccacagagcgaaaatgttctgaaacctgagcctgactgtaaacactgtggcgccaagaggttccagtatgaaccgccgggcttctgttgtcgggatggcaagatcaagcttgtagaaaacgaaacaccacctgaactgatgaggctctggacaagctcggatccagacgcaaagcatttccgggataacattagatatttcaacggccacttctcattcactaccctgggtgtaagccttgacagtgccttcgcaaacatgagttcggacgtccttcgaaacaacccgtactcggagacattcagaagtctggggcaggctaacgacctcgcgaactaccgcgtgacactaaatttggattataggttggaccaaaggcgctacaatgtgccggtgacaactgaggtcgctgctgtctgggttgagggaaacgagagaaggaagttcgagcctagcgtgacaaaaaatgggaatgaccgtacgcggaaatctatccagcctttctacggatgttatgattccctctcgtaccctctgttcttccctagaggagagagtggttggcatcaaggtcttccaaaggacaaaataaccatggaggatgcgaacgcgcggaatggcgatgatcctgattgtaacagcagaatacgagtctctgtaagggactactactgctataaattccagatgcgtcgtgggattttcaatcctatacttcacggcggacgcctgttccagcagtttgccgttgacatgtacatcaaggttgagagctcccgtctagactatgtgtggaacaaccagaaggagataagggccgacctgtatcaagggttgatggatagcatccaggctggggagagtcgagcaagcgcggttggcaaacggactgtgttgccagcgtcgttcgtcggtggtggccgaaatatgaagcgtcgatacatggatgccatggccttagtacagaagtacgggaagccagatgtattccttacaatgaccagcaaccccaagtgggatgagattactcgcgagcttgagcctgtccagacaccacaagatcgtcctgatctcgtggttcgtgtctttcgagccaagttagaggatctaaagaagcagctgttcgagaagcacatccttggcaagaccaatatgaccgcatcatctcggctgagcttccagacaagaaaaaaatatccagagctatacaatatggtcgtcaagcatatgatgcatggcccttgtggtcgactcaatggtagatgccaatgcatgcgagatggaaagtgcaggaacaactacccacgagagttcaaccccacaacctcgcaaggcaaggattcatacccgctgtataggagacgtaatgacggtaagagtagggtggttagaggccatcctctcgataacaggtgggttgtcccgtacaatccttatcttctacggatgtacaactgtcacatgaacgttgaggtttgctcgagtatcaaggcagtaaagtacctctttaaataccattacaagggacacgacaaggcctcgatatctataaatgaggcaaataaaaacggcgaaatcgatgagattcagcgctacagggatgcgaggtgggtgatccctccagaagcattgtggtgtatatatggttttgacatatgccacatctcgccgtctgtgaggcagttgcaactacatctgccaaacatgcacatgttggctttcgatgcagacaaggatctccgtgatgttcttgataaggaagacgcagggaggtcgatgcttacagcgtatttcgaggctaataggcagcatgtctgggttcgagatatcctttatagggatttcccaatgtggtttacttggcagacggcaggtaagtactggaaaaaaagagatagaggtggccaggtcgggagaattgtgtgtgcccacccggcagagggggagcgttactatcttcgggtgctgctaaaccacgtggcaggctccacctcattcgaagacctacgtactgttgatggtgtggtcatgccttcgttccgtgctgcaactgaaagaaggggtcttatagaggcagacaacaccctcgacgagtgccttacggaggccagggtcttccagatgccagcgtcgctacgcaggttattcgctaccatattggtgtattgcgaacctagcgatgtccgtggtctttgggacaagcatctagatgccatgtctgatgactacaggcgtaacaacgcatgccctcatgttgtccaacagatggtgctgatagatatccgaggcatgctacaatcaatgggaaaggaaatcacatcattttcgttccctgaaattgatgaatcacatgatagtaccagaggagatcccagagagattattgaggagtcatccattggtgtggagacggacgatatgaacctctcagaccagctcaatgatgagcaaaggtctgcattcaacaaaatcatgaatgcagttggcagtgctcaggggggtgttttcttcgtagatggcccaggaggcacggggaagactttcctgtatagcgcgttgctagctacggttcgcagcaaaggagatatagcggtggcaaccgcgacgtcgggtgttgcagcttctataatgcctggaggccggaccgcacattcgtggttcaagatccccctcaacattgaggaagggtcttgttgcagcttcaccaaacaaagtgggacggcgaagcttctccagatggcgtcgcttataatatgggatgaggcctccatgacaaagaggcaagcggttgaggccctcgatatgagcatgagagatataatgggttgtccgcgttctccgtttggagggaagacgattgtgtttggaggggattttaggcaggtcctatctttgggattgtatggttcaattgaagcttgttcgcaatatgagggcgcgtggtttgcgaactacctccttcgagttgggaatggaaccgaggaggtgaacaaggaaggactcataggccttccttcggatatttgcgggtcgtgcaaagggaatgaaacggacctcgaaaggctcatcgatactgtgttccccaacctaaacgataacctgacggacccaaactacatcacatgtagggccatattgtccactcggaatgagttcgtcgatcgaataaacatgaagatgattgagcggtttagaggggatgtgatgacatatcatagttttgaccgagcagatgatgaccctcataactattacccgccggaattcttgaactctctaactccaaatgggctacctccgcatgtgcttaagctgaagataaattgccccatcatgcttttgaggaacattgacccagccaacggactttgcaatgggacaaggctggtggttcgtcagtttggaaaaaatgctattgacgcggagattgttgtagggcagcatgctggaaagagagttttccttcctcggatacctctatgtccttctgatgatgagatgttcccgtttcgcttcaagaggaagcaatttccagttagattgagctttgcattgaccatcaataaggcgcagggtcaaaccattccaaatgcaggcgtctacttaccagagcctgtcttctctcatggtcaactatacgtcgtgctgtccagagcaacctctagaacaaacataaaaatactatcgatgccggtcgaagacaagaaacaaaataaaaagtctaagcgtactggcgtgaaggacaatgagaagaaaggaaaggaattgtctaaacaggctgcaacatacacaaaaaatattgtgtttagagaggtcctcacagattag

SEQ ID NO: 98551 - DNA, 1704 bp, Oryza sativa
  unsure (1)..(1704): unsure at all n locations
  Clone ID: PAT_MRT4530_96448C.1
atgtcgtgcaaagagaatgaaacggacctcgaaaggctcatcgatactgtgttccccaacctaaacgataatcttacgaacccaaactacatcacatgtaggaccataatgtccacccggaatgagttcgtggatcgaattaacatgaaaatgattgggcggtttagaggagaggtggtgacatatcatagctttgatcgaccagaggatgacccttataactattacccgcctgaattcttgaactctctaactctaaatgggctacctccgcatgtgcttaagctgaagattaactgccccatcatgctattgaggaacattgacccagccaacggactttgcaatgggacaaggctggtggttcgtgagttcggaagaaatgctattgacgtagagattgtggtagggcagcatgctggtaagagagttttccttcctcggatacctcaatgtccttcggatgatgagatgttcccctttcgcttcaagaggaagcaatttctggttagattgagctttgcattgaccatcaataaggcgcagggacaaacaattccaaatgcaggcgtctatttaccagagtctgtcttctctcatggtcaactatacgtcacgttgtctagagcaacctctagaacaaacataaaaatactatcgatgccggtagaagacaagaaacaaaagaaaaagtctaagcgtactggcgtgaaggacaatgagaagaaaggaaagaaattgtctaaacagacagcagcatacacaaaaaatattgtgtatagagaggtcctcacagattagaaaagtaaacatttactttcttggtctgccccttctcctgtatatgcctacatccactccttccccgagcagtccctccggccgcctcctcgttatggctgactcagagaccaaaaccgttgtagtcggctgctcgccgaggagttgcaggtgatcaggagagaagcagccaggtccaggatgaagcaattcactgttatgaacaaattcaagatgaagtccttacttgtaagctgacagttatttcttcttcttttttaaaacaatcgtagttggtttgtacatgtcttgcagcttagtactgatgttagcagatttatgaggttctgctttagttcagatttccaattgcagtttagcatttcttgtaatcatgttgtggcagtccagtttccagtggggtactgaataacacttgagtggagatcatctgaactgaaagccaacatttgagctcatgctattagcctattactatatcaaataaaactttgatctttatcaaagaaaaaaattatccnnnanaataaaattantaattattttattttttatttttttttcatatttatattattacatttttcttcacatattttctttctcttggggggggccgggcccaaatcccccctaagggggtgtatcaccgcgccccccgggcgggttttaacagctgggagggggaaaaaccggggttcccaataaattgctgtcacacaacccctttctccgggggttattacaagaagcccccattcctttttcaaatttgctcccttaaggaaagagcccctcttcggccttaaccggggggtggggtccccaatacccttttttccccccagcccttttttttttcggttgttgacggtcgtgtgccaaatatatgggatcttggtc

SEQ ID NO: 98552 - DNA, 563 bp, Oryza sativa
  Clone ID: PAT_MRT4530_96449C.1
ctattgtgacatgcatttgactattgtttaccttattcctttgtacccataattagcggatgagtccctagtcacttatgacaaatgcttagtaatgctaatttagattcatgcattctcatatttattaaatgctatatgcttgggcaattaccttagggaaggtccaattgttcgtccgggtgtttccattctacatccgtctgtcgacccaaacaagccaagcccaacatcccagccacgactatttcgtccaaccactccaaaactaaataataatgtgatgtaagacctaccatataaccaagtcagtccagaactcaccataattttcatgggcatttcttttcttctcttcaacgtcgtacatatgtgtgtgtgttgatatcaaaaattgacagccgatgatttttattcggttattttatttggacgaggtcttgccgaatgtttttattcttctacttaattgaattcggttgttcaatggttaatcaggttattatcagagaatatatgggcaagtgcttctcctgaatgtgatgcatgcatgtatggtttaa

SEQ ID NO: 98553 - DNA, 594 bp, Oryza sativa
  Clone ID: PAT_MRT4530_9644C.1
ccggccgggacgatacgattcggtgagtctgtgaagaggaaccgaccaagcaaaccctagccgccgccgccgccgcctccgcgtccgcctccagatccggccgtcggcatggcgatgcgcgctctggtctccaagctgagggtccccgcggctgcttcccgccgggctcttccgccgtttcgatccttctccgccgcctctcaggataaggttggcggaactactgcacgcgctgccgctaaagaagggactccaatttctgataatagcaggaaggtcgagaagttctacaggaagctgcgatggtatcaagcccttggcaacttccttgggttcaacacttcagtttatttattctatcgctaccactacacctaagctaaggaggagcaaacttagtactctgattgtcactctatttatgtatccatataccacctaagtactgaacactcaattgcatgtatgagtacgtacttagtactctgattgtcactctatttatgtatccatatgccaccaaagtactgcacacgtactctcaatggcatgtatgagtaatgtttgcataaaaaaaaaaaaaaaaaagcggcc

SEQ ID NO: 98554 - DNA, 412 bp, Oryza sativa
  unsure (1)..(412): unsure at all n locations
  Clone ID: PAT_MRT4530_96450C.1
gcgagacatcctagcttcctccacgcccggaatccccgcctcatcccctctcgcaggcgatcgatcctccaccctcccgtacgcggtaggcctcccgcctccgccaatcaacgccgtcgtcctctcccgtctcgccgatgggatattgacccggcaccaacagaacacggtgagagaggagacagaaaaggggcgccgacgccgctgctgccggccggcgccgcctctccgcatcatgcgcggcaacatcgtgtgcgtccgccgcggcggcctttgcatgctctgcccggcggcggagcgggtgaccgacgaagagatgatgaggggcaccaacgccgcgccgncgncggtgcccggaacgggatcgatcatcgacgaggccctctgcctgatgaagctccgcgagaacgtc

SEQ ID NO: 98555 - DNA, 1719 bp, Oryza sativa
  Clone ID: PAT_MRT4530_96451C.1
aagtcagttagaaaaggaagattttatataaaaccaaataatcacttcagaccaaaaaacaagagtgtgattgcttagcacttgacacacacacaccacgcatacactactacacaaagcgttttttcgtgcggtcgatcggatttttgcatgcggagcctcggcccgtctggaacaaatcgcttgggaaaatcacgattttctcttgccggtggcttatgccgcccgcacggaaaaacaaaaaaccaaaaaaaaattaagatttcaaaaaaaaacagaaaaccctagattgggtcgtcgccgccgctctagcctcgtcggcggcggtggtggcgtcgccgctcccgcctcgtcatcgttgtcgtcggcggcggcgccgcctcccgccggcctccagcgccggatccgtggcgggggcagggcggccggccaccggatctaggcggagacggccgcgtgccgtcgtcacccgcccgcccgccggatccgcagcccgcgcgctcccgtcgccaccggggaagggaggggaggagccgtggccgcccgcccgtccgccagatctgccgcccgtgcgctcccttcgccgcagggaaggggaggagccgcaggccgcccgtcccgcctgtgcccgccgccgcctccccacatccgcctgctgccaccgagctcaccaccgtcccgccctcccctcgcctctcctccgcgccgcccctccaccagcagccggcgcggtccggcgcccctctcctctccacccgcgtcgccgccgtccccactgcgcgccaccgcccatcgccgccccaccgcgcctccacccctagccggagaggcgccggccgcactgcccctccacctccacccggcgcccctctcctctccacccgcgtcgccgccgtccccacgccgcccctcgcctccccaccgccctcgacctgcgtcgcctcctcgcccctcgacgccctcgaccactcaaggtggtcacagacgccgtcatctgaaggtatgtatcccctcccgccggaattcttgaactctctaactccaaatgggctacctccgcatgtgcttaagctgaagataaactgccccatcatgcttttgaggagcattgacccagccaacgggctttgcaatgggacaaggctggtggttcatcagttcggaaaaaatgctattgacgcggagattgttgtagggaagcatgctggaaagagagttttccttcctcggatacctctatgtccttctgatgatgagatgttcccgtttcgcttcaagaggaagcaatttccggttagattgagctttgcattcaccatcaataaggcgcagagtcaaacaattccaaatgcaggcgtctacttaccggagcctgtcttctctcatggtcaattatacgtcgcgttgtctagagcaacctctagaacaaacataaaaatactatcgatgccgaaggaattgtctaaacaggctgcaacatacacaaaaaatattgtgtatagagaggtcctcacagattagaaaaggtatattatgcgactaattaaccatccacaatatgcttgcttaaattccattctttctgtaatttttatattccaagtcaaacatttcgtgtgttttttttcttggacagtagtaaacattactttcggtgggattttggcaaggcctatatacaccattacaggtattgtgatcaactgcaggttttttatg

SEQ ID NO: 98556 - DNA, 330 bp, Oryza sativa
  unsure (1)..(330): unsure at all n locations
  Clone ID: PAT_MRT4530_96452C.1
caatttatgatggtccatgagctatatgtttgatccaaattagcacatttccagtaaactggatcagtagctatatttcgtgaccagggattaaaatttgacatattacaagaaaaaatcctgtggtcttttttggtacacgtagctttccagttccaggttctggaaccatctggtgtgcaactccactatccttacataaccaggacgtatcttttttccattagttctgcatgttttttttatttgtgcaatcattcccacctgaatttcaagatagcttacttatggtagctttatggttcgccgccatcgnatttgaggttctct

SEQ ID NO: 98557 - DNA, 288 bp, Oryza sativa
  Clone ID: PAT_MRT4530_96453C.1
ccattgtcaacgattcgattaccttctcgggtccatcgtgctaagagaagaccagaaactgccatgcaaatacaagtgaagaaggctaggattgagcaaagcagtgacgacgaagaatagtataatgcatgcctgtaagtatgtatgttgctataacacatgttgtttttttaggatataagaattcttagcaacatttttacctttcatgcctttgtaacagaatatttggtcatattgtagccatgcgattcaaaattattcttcaattgttggattcggtgcttg

SEQ ID NO: 98558 - DNA, 165 bp, Oryza sativa
  Clone ID: PAT_MRT4530_96454C.1
atgtgggagaccacggcggtggctgcatggcctccacagttgttcccgtacgtcttctcttctagtgctgatctctacgcctcactgtggcgaggcggtggcaaggagcctacgcagcccggcgagatccgtcggcggcaacgtcgtcttatcttacaacaataa

SEQ ID NO: 98559 - DNA, 174 bp, Oryza sativa
  Clone ID: PAT_MRT4530_96455C.1
ttttgttttttttatttgattggtattgaaaaaatcttaaacttcaaattctggttacaacaaaaagtatagagaaactacaggtctacaaccgtggccttcctgaacaagaagcaagaaccacgcgctccagtacacactgcgcacgctaggtgttcgcacactccgggagag

SEQ ID NO: 98560 - DNA, 174 bp, Oryza sativa
  Clone ID: PAT_MRT4530_96456C.1
atgggccaagcaaggcagcacgatggtccaccataccatctgacagcccacaccctcccccgtagggatgatgaaagcatggcggccattcaagcgtcgtcccgtggcctcagttacacgtcgggccccaagaccatgtcctatcccacggccattgaaatagacccgagctga

SEQ ID NO: 98561 - DNA, 372 bp, Oryza sativa
  Clone ID: PAT_MRT4530_96457C.1
actactcccccaccgctaccatccctctcctcctcacatcctccgcgccgcctccatctccgcccccagccacctcttcgctgcgccgacggcaacggcacccctccacacatccccgcacacccctccacccgccaccacatctcttttccccaactaccccccaccggccggcggcggctgcctcctccctcggagacttgtacggtggtcactgccgccgtcgccacctcgcctttacctccaagcaatcttgaccaagccaccaaccagggaactagctcctcctccgcgcacgcaaaaggaaaaaaatggaaaagaggggaaaagaaaaacctagctcgcctcggtttcttcgtccgcggtcatgat

SEQ ID NO: 98562 - DNA, 720 bp, Oryza sativa
  Clone ID: PAT_MRT4530_96458C.1
tcaccgcccggcccgggcccggccctggcccgcagctcgtctgggcccagacggacgcgccgccgccaccggccgccgcacgacgaacgcgccctccgccacggccatggcgctcttgcagccgtacaggtcgaggagagagccgaagacgccgccgccgccgccggcggcggcggagagtgaccagcggcgcgaggaggatggcggcggcggtggcgccggcggcgcggggaagaggtcgtcgatggcggtggtggagcgctccctggtgcactcggcgagcgcggcggcgaaggggtcggagtgtggcgcgtctatggcgccgccgcgctggtggtggtggcgccgtcggtggtggtggcgggacgacgggtgtgccggcgcgcggcggagcggcgccggggggagagggagcggcggcgtgggcggggagttggacgggtggagggaggtcttggggatgccggggtggtgctcccacgagaacgggacgacggaggtggccgtcggcgtggcggctgtcgcggcggcggcgctggtgttggtggtccggccgcgaggggacggggagggagaggaggcggtggaggagaaggaggcggtggagagggagcaggaggaagaggaggaagcacggtggcggcggtgagacaacggcagaggtgccggcgccggcggcaatggtggttgcggcggcggtggcgcgtgagtggtggccat

SEQ ID NO: 98563 - DNA, 265 bp, Oryza sativa
  unsure (1)..(265): unsure at all n locations
  Clone ID: PAT_MRT4530_96459C.1
cntcngtgnntgtncattattctccatagaaattnantggnaaggaaanattcaggattntgcnntncnggantgggaaaccaaggggntntatgtatggncctntggacagnattggtttttggntgggnaaggncncataggagantctgntgatacatgagnccatatgcgnaatggcttttgcatattggattggnggatcaactctttttnatacntgatgtgatgattcatttttaagctcaaaaaaaaaaaaaaaaaa

SEQ ID NO: 98564 - DNA, 1318 bp, Oryza sativa
  Clone ID: PAT_MRT4530_9645C.1
ttacaggagccaagtcgccgggagatctagtcgaatcaactcgactacgatcttgtcggtatcgtcaagttccactagtccctttgtaatcccaataccctctatatccggtctacgggtatccaccgtcgacagtggcgcgccaggtagggacacttggtgctcaaggttcgtctccctgccggaatcgagctcgcgccgtcgccctctctctcctccgtcgccgacgacctctggccggccttctccgctcgccgggactgtttcccgccccggcgtcgcctccttcggcttcgccgcaccgccgtcgaccccgtccaccccctcgccgagctcgccgaccgccggaacgccgccgaccccgtcgacccgagccgcgccgccgccttcctccgctccagccgcctttttcgtcgtcgccgtcgacctagggtgagccgtggaccgccgcgtcttttcccccttcccttcccctctctcggccgccgctccgccgtgcctatggccgccgccggcgaccataggggcgcggatgccgcctcccgccggctgccgcgttgtcgcgtcccaaaacgacttctccccgtcggattcgagctcgcgccgttgtcctctctctccgccgtcgccgccgagctccggttcgccgccgtcgtcgctccggacctcctcccgactcggcgtcacctccttcggcttcgccgcgtcctcgtcgacctcgtccgctcctccgtttcgcccgccgactccccctctattcaaaatccccaaaaatggttttaggctgggctcagggtgcatggttttgatagtagcaccttggccacataaggaccggtcttcgggcctctgttgcaaagcactaccgtacttccacatgtctagtgggtaaggcttagtttgtggctcagtctggttataaacaaaggtacatggatggagatggacgaagtcgagggtcgatggacatctctaggacaaatgaaggctacacgagctgcggcccggtagtcgagatgtcatggcacagggctggtgtcctgctgctaggggctcaatcctgcctgcctgtcccagaggttccggccgtaggcggggttgggtcggtactcttgtctagggctaggatgggttggaaactatgtcacgtcttccatccgtataccgtggtggtatgtggcacgtggttacacgtgaggaagatgtgtcttgtggcacttgtgggtgtgtcttgttgagtacggtggttgtactcagtcttgctcaatttttcccaaacccagaagagaagcccctgaaagatgaaggctttggtgtc

SEQ ID NO: 98565 - DNA, 471 bp, Oryza sativa
  Clone ID: PAT_MRT4530_96460C.1
atgtggggcccacatgccatcctctctcttcttcttcctccgctcttcctcccttctctctttctttccctttctcttctctccccttcggccggccgcggggagcacgggctggagcggcggcgagcggcggcggcggcggcggcggtggaagctgacgcggcggcggcaagattggaagttcgggactcgctgctctgtgggctgtatgcctcgctgctctgcctcctccaccgcggcgctcccggcgccggcgggtccagatccttcgagacggtggactcgctcaacatcttcagggccaaggactacgacgccaccatcgagttatactgggcgcccatgctcgccgagtccaactctgacggtgccgctgtcctcgacgaccgcctcatccgcagtgcccccatgaacaagcactccaccttctggaagggcgccgacgtcctcgtcttcaactcccaccgctag

SEQ ID NO: 98566 - DNA, 447 bp, Oryza sativa
  Clone ID: PAT_MRT4530_96461C.1
ggctgcgagttcaggtctgttgagtaaccactttgggaaagaccgggtgattccaaaatggcagttgttgacagtgccaagggtgcaaattggctgggatgcaattgccggcaaatgactgacgctggtgctttgaaacgaaacgcagagcatgaaggatcccaaatacatgtgcagtcaagaccaaatgccaaactccatgtggaccacccttgcagggatagaactcttaatattccagtgccatgccagtcagatggtgatcgctaatgcttaccgcatatcgagggacgcaagcaacagaagcacttaagaatgataggggagaagagctcggtggcacttcactcctagatatcacagcagacctacccaggcttctcaaatgagtcggagatgagcgtcagagtcgatctataatgaaatagtatagtgtatcaaaaaaaa

SEQ ID NO: 98567 - DNA, 717 bp, Oryza sativa
  Clone ID: PAT_MRT4530_96462C.1
atggtggaaaaccgtcttgttggcatgaaatcgcacagtgtctatgagacccttggtgacaccataatggcagctgccattcgtgagctcgagtccctgacccttgatagggagatcatgcagtggaaagacattcttgccctcaaaatacgccaagttggtttatgttggccgctggttcgacccactccagcaatccatggatgccttcatggagaagagcccctacagcctgtacggggaggacatttcctacagcatgggatcggacgcattgatatggtggaaaaccgtcttgttggcatgaaatcgcacggtgtctacaagacccccggtgacaccataatggcagctgccgttcgtgagctcgagtccctgacccttgatagggagatcatgcagtggaaagacattcttgccctcaagtacaccaagttggtttatgttggccgctggttcgacccgctccagcaatccatggatgccttcatggagaaggttaccgagacaacaactggttcggttaccctcaagttgtacaagggttcagtaaacattgcatcccggaagagcccctacatcctgtacggggaggacatttcctcgttcgagaatggaaagatatataaccaggcaaaaacgctgagggattcatcaggttgtatggtctccccacacgagtgcgggcagtgctggacaagggtctataagatttag

SEQ ID NO: 98568 - DNA, 1102 bp, Oryza sativa
  Clone ID: PAT_MRT4530_96463C.1
atggcgtcgccccacccgcacccgcaccccggcgcgccgctcgccgcgcgcccgctctccgcgctcgccttcttcttcctcgcccggccctcctccaccgccgccgcgcctcctcctcggcacgtcaccctctcgtgctcgcggccgcactgcaaccacaaccagtgggccgccagccggtgccgcgggacggcgggccggcggcggctgcaggcgcgtcgtggcgatgtcctcgtcgcccccgtcgccgcctccgggatccgtgcagaaggccgaggaggactgggaggccatcccctcgccggagcagttccgcatcctccgcctcaagggcacggagtatcctggaacaggtgaatatgacaagctcttcgcggagggtgtttatgaatgtgctggatgcgggactccattgtacaagtcatctactaaattcaactcaggttgtggttggccagcattctatgaaggatttcctggagccatcgcacgaacgcctgatcctgatggcaggcgaatagagatcacctgtgcggcttgcggaggacatttaggacatgtcttcaaaggggaggggttcaacacgcctacagatgagcggcattgtgttaacagtatctcactcaagttcattccagcctcagaagatagtaagctttgagcatgaaagtataagcctacaatagaacagtctgcgcagtcagagtaaacctgtgattattaaaaaatagtatcggatttttcagaaagcaatttgtactctgcagtttgtcaataatgcgaaataccaagtctgatgattgtcgaacattgtgttaacagtatctcactcaagttcattccagcctcagaagatagtaagctttgagcatggaagtataagcccgcaatagaaccagtctgcggccagtcatagtaaacctgtgattattaaaaaagtatcggatttttcagaaagcaatttatactctgcggtttgtcaataatgcgaaataccaagtctgatgattgtcgaaaaaaaaaaaaagtaacctatttacacttccagttctacttttttctgataaccagagaagttcatatccgtaaaaaaaaaaaaaaa

SEQ ID NO: 98569 - DNA, 304 bp, Oryza sativa
  Clone ID: PAT_MRT4530_96464C.1
ccaaatcatatcaacgatatacaatgagctatagaaagctctcgaaccttgcatgatgatctcgtgtaatggctccggagcctaactctgcagccaatgtaatagtcaatgtcattgcatgagccaagaaagttacatacagtgcagatttgatcggatgcacgcttttagaaccgattcgcactagtacggtcctaagctggtacaaatctacttttcggtggactctaagcagtagcatgctggtacacctgcagcggcagccacgaacgggccgatggggctgacccacctgggcccagcc

SEQ ID NO: 98570 - DNA, 204 bp, Oryza sativa
  Clone ID: PAT_MRT4530_96465C.1
atggagtggagtggtgtgcgtggcgttgaatgcgacgcgggtgagacggaggagggaggtaaaaatggcgccggccccctcgtggcgttcgtccgtcgttcacggcacctcctcctggcgcaccagctccggatccagctcctgtcggcgtcggcggcggcgcagctcctgtcggcggcggcgcacctccagacatggcgatga

SEQ ID NO: 98571 - DNA, 686 bp, Oryza sativa
  unsure (1)..(686): unsure at all n locations
  Clone ID: PAT_MRT4530_96466C.1
atggcggccgagggttccagccgcggcggcggcggcggccggaaagcctcctggctggggatgtcatcggagggcggcgcggccaagttcctgtctggcttgccgtcgcgcggcaatttctcctcgatctccgcctcttccactctcggacggctcagggtttacgtctgcgagcatgacacggatcctccagagggacaagttatagagaccgatacaacaaatattttgatcagacatctccagctaaagaaaaaggagatggatgccaaagaagccaaagaggccagagatgcaggttctaggaaccaaggggaaaccgtcaaatggaaaagagttgctcccagaagtttggatggccaaagttcatctaaaaggcccaatttgggtagctcctctgggctgtcttctgctgaagaagcggcacctggattttcaggtcacacactacagacattcacagttgagaggttgcgtgcacttctgcgacagaggggcctcatgaccaaagggaaaaaggatgaactcatcgctcgcttaagagaatcacaggactgatctagagaaagctcgtgccgtactctctntgtaggttgatgcaatgtgtttcctgatttgctatgtcaagctttgctgggagcagaatgagaaccagncttcatctgttggctggatgttaaggctct

SEQ ID NO: 98572 - DNA, 243 bp, Oryza sativa
  Clone ID: PAT_MRT4530_96467C.1
ggcacgagcaacaaggtagtgttctcagtgttgtcttctcgccgtcgtctccgtgctcacggcgacgggaccatggcggagtaccaccaccaagaccatgtggtctacacccgggtccgctctgtcagcaggatgggctacgatgtaccgtccggttgcggctaggtgaagcgcatgcgtcggcgtggcacgcgcgcgcgagcagtcgcgagactgctgcgcagtgcgcgtcgcgcagtgtgc

SEQ ID NO: 98573 - DNA, 427 bp, Oryza sativa
  Clone ID: PAT_MRT4530_96468C.1
tttttgatggaggggaaggaggaggatgtacggcggggatccaacaagatctcggagaggcagccgatcggaacggcggcgcagggctccgacgacaaggactacaaggagccgccgtcggcgccggtgttcgagccaggggagctcaaatggtggtccttgtaccgggcagggatcgccgagatcatggccaccttcctgttcctttacatcaccggacttaccgtaatgggggtcaacaactccacctgcaagtgcgccaccggctgcatccagggcatctgctggtccttcagcagcatgatcttcggcctcggctactgcaccgacggaatctacggcggccacatcaaccctgcacgaacctttagcctattgactctgaggaagctgatcataaccagggtcctcttctacatggtgatgc

SEQ ID NO: 98574 - DNA, 371 bp, Oryza sativa
  Clone ID: PAT_MRT4530_96469C.1
atacatgggaaatttttttatattttatatataatttttattaactttttctttattcatttacatttttcaccaatcataaatgattatattttttgatcatgaacatttaattttcatatcaaaaaaaacataaaacacgattatgagcatgacatattcattcattataaaacttacaattgcagcacttttatttattcattattgcaaaaacatcatcttcttctacatattcttagtgtacacaacaccaactcgattataaattagttaaaataaaaccattttcccaaatctaaaaacaattaactctcttgataaaatatcatttaaatctaatttaaaactcttataaactacggtccccc

SEQ ID NO: 98575 - DNA, 4476 bp, Oryza sativa
  Clone ID: PAT_MRT4530_9646C.1
atggtcgatggcgctgagcttgaacacctcagcaccgaccgcatcagcgctgagtacgtaacggccctaagacgaggatggacggaacggcacaatgtcagcgccgaccgcattggcgctgtgtttcaggacctcagcgccatcgggtctggcgctgaggtcctacatcccttggccgagccgcgcccagcagcccggcccttctttcttcctcctcagtggctctcggctgaggcgcagcggcgccgaaccatctctctcctcccctccaaaaaatcgaaaaaatctccactaaatcgtcgcattttggaggggaaattgttggaggacatagtggcaagagatgattcttttgacctcaatcgcacactgttttatgatgaaccaaactatgaagcatttgatgatgaaggagctatgaaaagtcagtcggttaagtctttgacagttgaggaagtcatagaatctcaagggatgggggttgatgttaacatgcaaaagaagaaagcagttgatgcaaatgagggaaggaatcaggaatctgatagggtggagataaatgtggagttgcagaaggaggaagcagttgaagcgaataaggcaaggaggcttgaatctgaaggggtggaggtaaatgtggaattgcagaaggaggaagcaacagaggtgaatgaggcaaggagtcaggtagttccgatagttggaaatcatgttgatgatgataatgaagtggcagatggatcaatggggggaggtggagaagagcgtacaacggatgctcaattagcatccttggtgcggttctgttttcgagacaaaatatatactcggagggagtgtgaggagactttgttgatgaatggattgagtgttgatttgttgcaccaacattcaaaggagtatgatgacacacatgaggaggagggatatgaggttgagtatgccgtagactcagatgacgatcatctagtagccaagatgtctcaggaagaaagggaggtgtttgagaaattagttggacgcaatccagaggttgttcagttcgaggatgttagcgattatgagctagcagttgttgatggaggagtaacatacaatggcatcatcgatgcaatgggtgaggagccaaagaatggtttggaatttaaatctcttgagctattacagatatggctgcagagttactcgatcagtgtgcatcgtccattccatgtgaagcactccaacgcttctaaaaagtacacggtggcttgcatcgaagaatcatgcgaatggcaggttcgtgcaaggaagactaaggatgggaggtggagagttaccggtgtaggcaaagagcacacatgttgtagtgctgaggcttctggcaatcacttgcaactaacttctaagttcatcggtaataggttgcaaccatttgtccgagctgagccgacattgactcatgttgctatagttgaggctgtggaggccatatggcactatcgtccttcgtacggtaaagcttggcgtgcaaagcaggtggccatgaagaacatatggggagattgggatgaggcatatgttcggctcccaacgcttctaaatgctattaaggctaagaaccccacaatgcattatgttgttgagcctcacccagagaggtcgaggccagtggatggggtaatgagacgtgtatttgggcgtgccgcatggatctttcggccggcatggactctagctggcatagctacagatcccgaggatgttgaggagatgaacgagtatgacacccacactcgagcaagagcgacggtcaagtacgggcctatacgtgaccgagtgacacgtgagctgatgaggtccgtgaacgacgtgggtgttgcccttggcacacccgctgggtcagagaatgaagttgggatacttcggagcgcacttcaaaggctaaaacaacgaagtcggatgttagcggcaagacttggttgtaggtccacagacgcagttgacccacaaccaagactaatgtggacacaggccggagaaacaagtcaacaaagagctgaagaggaaggggaggaagaatatgatgaaggggaagaagaagatggacagagtgacgaagaggaagaggaacaacccgaagaaatcgggtcatctcagcttgcaggtgccccgcagccatcgcaaccttcccagggtcgcccgcaaagaaagagggcaccggtggaccggtacacaccttccactagtggccggagagctcacccggcgactcagcatccctcgggtggcaatctcagcgccaaatcggctagcactgagatggccgacctcagcgccaggttctttggcgctgagatgcggctcagaatccctcgggtggcaatctcagcgccaaatcagatggcgctgagatggccaacctcagtgccagattttccccaatgtgaactagttgaactaagcatggctaagcaatccctagtcctaactctaatcatgttagcaccccaagttgacaaagaaacaagggctgacgtcatcaaggcggggcgcggcgccggcaagcgggacccgcatggcagtgactcggggagggcggtccacggcggatcgggtccacggaccggggaggagcggcgcaccacgcggcggccacgcgacggccgaaccgatggccccgatctacccaagggtagatcggacggcggcgggagctcgcggccgatgtttaacagagaaaaaggaaagaatgtcagcgggtatgcctcaagtaactcaagttttcaactcaatccaccactggcctcaagagagttaacaagggcacacccttggtccattccgagcatgctgcttggttcacagctaccattggttggaagtcaagaccaaaatcagtatgtgtttgatcgaacatttgccacccaggtcaatgagcttccaatgccagaagaggatgtccccttttgtcatgattgtagagaacaaggacactatgccctgaattgtccatgggtatatgtcaaagaagccccttcctttggtttagcagggcagacatcgctaaaccagcctcctcacaccaagtcaagcttgcagcctagtgtgcaaagtagagagcccaatggagagaatccatggaatcccgggaaatgctttcctcctagcctttcgtatcacgtggggtcacgtactaagcaagccaaagtcaagaagagtaagaatcagaagagaaaagcaccgatgcgaactgaagaagaagtacgtaagatgactattaccagcaccgaatggcctccagcagggataactattcctagacgtcaaagaggaaatacctttcgaggtgcccgacagttgacccagcaccttctaagccatggtggcagagtatctgatagtgaagggtcagatcaagtctcctcggatgatgaagatgagtctccccgacatgtcggcgaggaagagatggaatcaaaggcatgcacccgttgcggagaaattggacacattgctagcatgtgtctcacactctgccctcattgtgaagaagaccatccaccaggggagtgtcccacccgcaaggtcacatgttttctgtgcgaaggtacaaaccatgtgcccaaggattgccaacttagtgtgttgttgaccaagaccgcagaaatccaacgaacaactctacggttgtctcatcagctagtcagctccaacagcaacattgacgacatcatccacagcaccaatgctcctcctgctccacctaactctgcaataaatcatagcaataatacctttagcaccaaccattctctgcaccgacagcctcagcaaagaattgtcgtcgatggaagaagttgtgtctctccccgacctactccaggccgagccaagggcaatcaacctctggagggcgataccaagcagaagaccgtcatccgcgcctcccacctcggcgccgcctccttcggcttcgcgcatcctcgtcgacctcgtccacctctccgtttcggtcgccgaccgccggagcgccgtcgtccccgtcgacccgagccgcgccaccacctccctccgctccggccgcctcctccgtcgccgccgtcgccccggggtgagccgtggaccgtcgcttcctttcccccttccctcccttctctcggccgccgctccgccgtgccggtggtcgccggcggctaccatcgggacgcgggcgcgccgcctcccgcgctggcttggccaccctggcttggccgccctcgggcgcgccgagtggctgccgcgtggggcccggccgtcagccgcccgcgccctcgggtgcggctgacgcgtgggacccccggcgccggccggtgtgagccgggtgcacccggtccaccgtggaccgtgaggctgccgcgtgggccccactcccgtggacccggtccgcgcgccctctcccctcggcttgttcaccctagattaaacaaaaccccaactagtggatactctactcat

SEQ ID NO: 98576 - DNA, 216 bp, Oryza sativa
  Clone ID: PAT_MRT4530_96470C.1
ggggggacaaagaggggctttatcataaatgtacaaaagacggctcattcattgcaacaaaacaactgcctgccaataatacaaaaatgattcgtcatccgccagccaccccaagagggatctcgcggggccaaaccaggaggaaacgcaccaatagaaacggggggacaccccaaccccatccactgtattgagccgcaccctctgaccctctta

SEQ ID NO: 98577 - DNA, 233 bp, Oryza sativa
  unsure (1)..(233): unsure at all n locations
  Clone ID: PAT_MRT4530_96471C.1
gggggcctagccaagagttgctgaacatttagttagaaccagctgtaaaagaattttaaggcaaaactattttnccagtaggatctggtactgctgcatcttgttcaggattggtcgatcaattcaattcctgttgcagaatatgcattattgataaaaaaaaaaaaaaaaaaaaaaaaaaaaaaaaaaaaaaaaaaaanaaaaaaaaaanaanaaannatnnaanaaaaaaa

SEQ ID NO: 98578 - DNA, 1449 bp, Oryza sativa
  Clone ID: PAT_MRT4530_96472C.1
aagaagaaaaagggccgaattgatgggtggtgggcccccctgggggtatatataggggtgtatcttgtggacgagtgatatctcgactagggtatttagatggtatgtggatcgtcggtacagggtggtatctatcaacgtttgatgtcgcgattccagtatttgcatagtatgaggatagttggtactaggatatatgcgagacagtacaatatttggggtatcctatctatctgttgtcgacatggtggcttgaagtatcatcacgtagtcgataacagggtagtcttcctcctcgaatctgtgtccagcgacatcagagacaacgctagaaccctacggccggcctccgtaggtaccggatagggtccgtccaggcatatctctgacgtcgatatccggcgacttgtcttggcgtatgttggcttttgttgttccgtgtatgttgattgtgtcccctcttctcctaggggaccttgtatttatacatataggtgtccccttgtccaagtaaaactagggaaaccaatatggatacaatccgagtagtccttgtcgtttccatgtagaactctggttgtctttccttattggaactccctccatatctgaagtcagtttccgtataagacatggtatgtggtggatcatggtatttcgtctctacaggatccgacaaggccttatcggctctgggcgtccccagccgaagatcccttaggttcctcggaggcctgctaccaactttgttgaagtagaggtagtgggagaaatcgctacaccgctggtcgaggaccaggcagtagtcgtaactcgaccactgtgtagatatatgccggatatatccttccggcatcatcctcaagatcgtcaatggtcggaaataccgtacagatgccctccgcagcggtggcgtcatctttgaagagcaccaaaacccccctacctggcgcgccactgtcgacgtttgatgtctcgactacggtatttggacagtatggggatcgtcggtgctaggatatacgcgagacagtacaatatgtggaatagcctatctaactgttgtcgacatggcggtctgaaggtctgactcgtagtcgactacagggtagccttgctcctcaaagatagcgctttagtctctcctgacggtatccggagacaccgtaggggaatagccatgcctatccctgaagtcgatatctggcggcgtgtcttggcgtatgttggcttgtatgctgtggcttcagttgttccgaatattgtggtggttgttgattgaggtggatctcgatcgtggtgaccatgttgatcgtgttgatcgtctcctggtcagtcgtccccctcctcatagggggccttgtatttatacccataggtgtccccttgtccaagtagaactagggaaactaatatggatacaatccgaatagtccttgtcgtttccgt

SEQ ID NO: 98579 - DNA, 1831 bp, Oryza sativa
  Clone ID: PAT_MRT4530_96473C.1
ttttttttttttttttttgaaggaaagagggttcattgcgattgggattggcatttacatgatgaaagagcaaacaaaaacagggagcagctacactactgtagggcaatgctaaggatcacaaaatgggaagaaaccaaaatgaaaggagaaaaaaaaaagaaggaaagcagggttccctagcttaacatgtctctcagtctccaccaactacatttatccttaaccttacctactactcaaccagcatgccccgtcacgtacttaacaccagcagcagcagcacgcatttctccatggttagataatttacataattgtacttcttctctggtactgagtccttgcggaaatggcttgacggatggatggatcatggaacatggatggtgcaatctgagatggagtccaagtccaggacaatggagtcatctaggattgcaatgtccagctcatggaaaaataaacgaacaaaacggtggcgtcgcggtgccctttagctcccagcatgcgcaaagttgaggccatgttgccgtctgatatgatccggtatgagcctgtggatgagttctggagaggcgctggctagttcatgcttgaagttgaacagaggagggaatggacgaccatttggcaggcgtgcattgggctctcgtagctcatcaaagaaggaatgtgcacatgcgtcaagagcagtgcagcgtagacttggtgaatattggagaagacgggaagcaaggtctatggcttctggaggcattctcttgtggaaaatcttgtgccaaggatgagccttaatctgaggaaatttgaactcagtatagttggggttcatgcatcgtatttcctcacgggttggagtaccaagaaccttgattatctctactagctggtcaacagcactctctccaggaaacagtggctgaccaagaagtaactctgcaagaacgcatccagctgaccatatgtcaattgaagttgtatactcggttgcaccaaatatgagctcaggagcacgataatagcgagagcaaatgtatgatatgttcggttcaccaggaaccagaacctttgcacttccaaagtcacatagcttgacttgatgagtgagaggatcaaccaaaacattttgtggtttcacatccctgtggcagactcctggaacagtatgaatataagctaaccctctgaaaagctgatagatgtaaagcttcacatagatcaatggcatccgctggttagcattgctgtagtgcttgagcacacggtagagtgtctcagggacgtactccataacaagattcaggaacagctcatccctgcttgtggttgagaagaagcagtgcttcaggcagatgacattggggtgttccattgcgcgcataagctgcagttcacggttcttgtaacgccggtcctgcaacaccttcttgatggccaccgtttcccccgtctccaagcacttagcctggaacacaatcccgaaagaaccagttcctacaactcgctccgccatataactaattgtccgcttcggctcgccgttcttgccgccgatggtggtggagatgatgtgacccgtcacggcgtcgcccccgccctcctccttcttcttctcgctgatgccggcggtcgccgccgccgccgccacggcggcggggggcggtggcgcgtccagctccatgggctccggccccggcggcgcctccatgcgggggggagctgagctgagctggggagggaggcggctgctgctgctgagcgttggtgcttggctttgcggggggatggtggtggtgtgctttcctccggtcagggaggggaggcagcc

SEQ ID NO: 98580 - DNA, 480 bp, Oryza sativa
  Clone ID: PAT_MRT4530_96474C.1
atgacgacgacgacgaacaccggcggggttcggatggagggaaggcgatgccgaggacaaccttgccgctgcgacggagaagacggcgacgcggtcgaccggggaaattccggcgaggtggatggagaggccggcgcggcacggcggtgttccggcgaaatacgggcgacatcgtggcctggctggggaagaggacggcgtttcggtgccgggagaggtggtggcgacgtcggccggcgcacgggagacgcggcagaggcggccgggggtggaacagtggtggcaacgccactgttgccggcgggggcgcacctccaggggtctccgtgcgaaacggagggcaggccagtggagaggaggctgctgcgacgccggggaaggcggcggcacggccggacggcgcgtgggcgaggcggtaggggtggctggagggtggccggcaccgaggaaagagaaggaggaggcggggagaggtggtga

SEQ ID NO: 98581 - DNA, 384 bp, Oryza sativa
  Clone ID: PAT_MRT4530_96475C.1
cgagaaatatccgcggctaatctcctctgctcgccgcgcgccacttcctcactcctcgcaagcggcagctcagcgccgccgtctcctcctccgccatgatcgttgccaccgccaccatcccgttcttcccctcgttccaccgcccgcggttcaggcccggcggcctcccgcgccgggttgtggtcctccggtgctcggcgtcgtcgtgggaggagcgcgaggaggcgcggtggctgcgcgaggagcagcgctggctgcgggaggagcagcggtggctccgggaggagtcgcggtggcgcgccgagcgcgagtccctcctcgccgagattggcgcgctccgcctccgcctcggcacggtcgaggcgggcccgctccccctcccgt

SEQ ID NO: 98582 - DNA, 1146 bp, Oryza sativa
  Clone ID: PAT_MRT4530_96476C.1
atggacgcgagggggggggaaaggttgggcggcggcttaccgacgacggcgacggcaacggcggcgacagcgacggtggcggtgttggcgcaaggcgcggcgcggcggcttcgtgcgcggcggcgcggcggcgtggagacggcggcgcggtggcgtggaggagtggagtgttacacccgggccctgcctctctccggcctcggatttcgccgcctccgctcgacccgccgcccagcgccgtcgctgcccgggccgagcctctctcggcctcgcgcgtcgacggaggaggcggcggcggccgcgcacgtcgacggaggaggcggcggcgcgctgcacgcctgccgcctctccctcctcgcccgagcgccgtccggccgcgccgtcttctccctcggcctcgcaggtgcatcctcttccccggcgccgcctccgattcgtggggaaatcgccggagacgcgcccccgctggcaacagtggcgttgccgccactgttccgcctccggccgcctctgccgcgtctcccgtgcgccggccgacgtcgccaccacctctcccggcaccggaacgccgtcctcttccccggccaggccacggcgtcgcccgtatttcgccggaacaccgtcgtgccgcgccggcctctccatcctcctcgccggaatttccccggtcgaccgcgtcgtcgtcttctccggtatcgcagcggcaaggtcgtcctcggcatcgcttcccctccatccaaacccctccgcggtccatcgtcgtcgtctccattcgttctcgtcgtcgacgtcccgtcggtcgcccggctcgtcgtctcgctgcgccgccaccgtcatcgtcatcgcagcggcgtcttccacgccgtcctcgtctccgtgcagccgctgccggctgccctcgtcgcctcctcgccggccccggtcgtcgtcgtcgtcgtcctctcgtcgttcccggtcgtcgtggcccccgtcgtcgtcttcgtcctcgacttcgcgtcgtcaagcgttgcgccggctgcgtctcgccttcatccaaggatcgccgccgaagtcgttccctcgccgttcgcctccgtcgtccccgagccgtctccgccgcgcccgttcgtcgtcatcgttcccacgcctcgtcgcgtggcggcctga

SEQ ID NO: 98583 - DNA, 663 bp, Oryza sativa
  unsure (1)..(663): unsure at all n locations
  Clone ID: PAT_MRT4530_96477C.1
atgcgccggcggctgcagcgtgtgcatggtacaaacgtcgtggatgaggaggatgatcctctacacgtcgagcagctcgcctactgtgacgacgacggccgaatcaaacgtggctacgtaccgggcatgcatggtaaatttgctttcggctccgcggctaatatattcaagtgcaagtgtcctgacaaccttggtgttaaggtagtcccatccacagccattaaaaagatccaaagccggctgctgtccctcgtcggagcgtcggccgacgtcgtcgtctcgcggcgccgcctccgtcatcgtcatcgcagcggcgtgttccacgtcgtccccgtctccgtgcagccactgccggctgccctcgtcgcctcctcgccggacccggtcgtcgncgtcgtcgtcctctcgtcgtttccggtcgtcgtggcgttcatccctccgtcgagacattctcgtctgccgcccgcgtttcgtcaagtgtgcagcagccccgtcgtcatcttcgtcctcagctccgcgtcgtcaagccttgtgccggccgcgtctcgccttcgtccaaggatcgccgccgaagtcgttccctcgccgttcgcctccatcgtccctgagctgtctccgccgcgcccgttcgtcgttgtcgttcccacgcctcgtcgcgtggtg

SEQ ID NO: 98584 - DNA, 450 bp, Oryza sativa
  Clone ID: PAT_MRT4530_96478C.1
atgtacggcaagacgaccaagttcctcgggccgttactgccgtcgttcctcaagatcgacatcttgcccgaggctctccgcggaaacatcgatccaacaagttgtcaggaatatctgaacaatctctggagaaaaacagaacaagcagtcccgcctgagtccttcgtcggcaacctccagcttagcggcaagcctctgagccgcccatgcgagccgttcttcctgtctcctgatggcgcgccgacggatggacgaggcagcggaggcggttccgtgccagtggccgagaagaagaagaaaaagaagctgtccggcgcggtggtcgcgaccattgccgtaggcggcgggatggcggctctactggctctggtgctactcttgatcgaattgctacgtaagcgccacgtcaatgccacgtcagatgaagaccgagtcaaatttgccacgtag

SEQ ID NO: 98585 - DNA, 444 bp, Oryza sativa
  Clone ID: PAT_MRT4530_96479C.1
aagataccgatgagaccgtagtcgagttagttcgactagatctcccggcgagttggcttctgcaggctccggcttcctaggctatggtggatctgttggcggtgatattcgacgccttaggtcctgcccagggggtcccttatataccgtgggtccgctgatctccaagtagaactcggagatatcggaccccacacgatatggtaaagacccagtactgtccgagtagaactcttcccatccgtagattcttatccttaacccctcctgccttttagcgctcttcgtcttctccggcgatcctccagcggggatggatcttgagaggtccacctcaaacaccgcgtccctgaagaagctgcaagacgacagtgccctccccggtcgcgggaccttgtagagggaggctggaggtacagaatctgaacccatcttgagccgcat

SEQ ID NO: 98586 - DNA, 1070 bp, Oryza sativa
  Clone ID: PAT_MRT4530_9647C.1
gcctcacggagcttttcatttcatcagctacgctgacacaagatcatctatcagcactgatcactctgaacagacttctctacctcaaactgatttcagacaagcttgagaattttgaaatgaaacatggggcattcccgagcctgcgacgcctgtgctttgtggttaaaagtgtcacttcagatttgccaacaatcaagcaaggagctctgccaaaccttgtctcacttcatctgctctgtcgaggtttagtcggactatccggcatcgagatcagacacctgaaacatctcaaggaagtcgtgattgactctgacgtgactccacaaacaaagcaagactgggcacacgcagcaaaaaaccacccgaatagacctaaattttcatggcctcgaaaggttgatttagtggaaagcgaggaaccggcaaaacatcttaagacagagaagaggaaatattgttcaaattatgaactggattataatcttcaggagatgagactatcagagagtagagaccataagaggcagaaaattggagaaggtgatactagcaaaagttctgtgggtcttgtatatcctatgtatggagatgttgaaactgatagaacacaagttcacttatttaaccaagagacaagaaggtacgatcggactgaagttgatcagaagtgtcctgaaatgttgcaggaatacaaagataaacactccatggtggtggatgttgatttgagatcagatgaacaagtcaatcctccccatcccaagttgaagaatctgatgcctgggaaggaatatgatcgacaggagctgataccaacagagggagcaaaagtgggccaatgccaatcaggtggtgatgaagatcaaattgttcataacactaatggcaagaaggttgttgtgcaagccaatcatttctttgaacaagaggaccagggctctcaatggcatgctctttcgccacaacaagatattgcttcctttgatgactggtgggcaagtgcagaaattagggtggatgatcaggttagaaaagggtttaattctactgttgtcttgggagcctag

SEQ ID NO: 98587 - DNA, 489 bp, Oryza sativa
  Clone ID: PAT_MRT4530_96480C.1
atgtccggcgagacgaccaagttcctcgggctgctactaccgccgttcctcaagatcgacatcttgcccgaggctctccgcggaaacatcgatccaacaagttgtcaagcaagcagtcaagcagaatatcttaacaatctccggagaaaaacagaacaagcagtcccgcctgagtccttcgtcggcaacctccagctcagcggcaagcccctgagccgcccatgcgagccgttctttccgtctcctgatggcacgccgacggatggacgaggcagcggaggtggttccatgccagtggccgagaagaagaagaaaaagaagttgtccggcgtggcggtcgcggccattgccgtaggcggcgggacggcggccctactggctctggtgctactcttggtccggggcaccgctccacccgccgcctaccggctcttagctctgtcgccgcccgccaccgctcgccattctcggggagagagagagggatag

SEQ ID NO: 98588 - DNA, 480 bp, Oryza sativa
  Clone ID: PAT_MRT4530_96481C.1
agcaagacaataactagaattattaagggagaactgaaaatgataaagatacacattgctaccaatcatttacagctgccagagtaaccaggcgaactccaagtaagaaacaaatgattgattccaaaacttttaaccctaatagcagcagctaacgtttcaacgagtagctcgtcccagaaaatgcttggaacttgggctcttccttctttgcaagttcatcaactttaacaggaggagccttctctggttctttgctgctgctgctgcttttgtttgaaccaaaaacaagcttcccctttttctgacgtgtagagttgctaactcctgatgctgctgtctcctgattcaccttcttgttcgagtctgaaattgcagaacttgcagcagcaggattagaagagatccctgctgctagcggttttgaggccttaccatccaaacgattccctgaaccagtgaatgctctgaattctggct

SEQ ID NO: 98589 - DNA, 208 bp, Oryza sativa
  Clone ID: PAT_MRT4530_96482C.1
ggcccctgttttttttttttttttagtaaccaaaacctgtgaaatgtttcaaccatatagagaagctcaccctcacacgggtctcattgaatataactttagcaagaccgccaaaggtagacagttgttatagactacgcatgcgccccacacttatttcagggccatagaaagaatgactctattctttattatataggcacttggc

SEQ ID NO: 98590 - DNA, 1131 bp, Oryza sativa
  Clone ID: PAT_MRT4530_96483C.1
atggcaccacctcctccagcacccaccaattgtttgatagaatgccccaacaacaacatcaattgggtgacgacgaattcaagtcacattggtgaggtgcttgttccgacagctgaccaggagttaggagacagcgaggacaaggacgacaccccctatatcatcaccaaggacttttccgaagtcacgcatgacaagtgttcgacagtgggctttgtgatcaagtgtggcgccaaccaagccgatgacacgtttcaagccatgacgggtgcatccaaggtcgttccaacatatgctcaacctatggataacttctcgtcaaggatgaatgacgacaacaagttaatcacattgatttccacaaggtgttcggtgaaatggcatggagaagacaagaacgtatggagttttacaattgttagcaaggaagataacctggttgttgggtgctggttgatgaaatctattggaacagttcagagatgcaactgctatctagggccatcaaattaccatttagctacctacttgaaggcacaattatgtaagcaagaaaatatggcagtggttattgtacttccacagatattctatcaagttgccatggctagcaaagtgggaaaatgggatatgagagtaatttgcatggtaatgttaggaattgaatcatggcagccagcaaataacatggtcttgaatagtaaagaggaaatgttaaatgaaaatgcaagcttttatgccaaggtgatttgtgagaagcaattagctaagggctacagaagaacgagtagcactagagaaggtgctaattcaattcaagatgagatatatccttttgatctcgtttctgcaaacgtacttgaagaggtggtgtatattacttcagggtatacttggccatgcaaatgcttgatgggtggaatgagaatgccaagaaatgttctgaatcataacacgtggactcagcagttgagtaagctagaggttttggatcgggaaggaaatagagacgaccgcggcatgatggcgatggcgatggtcgtcgtctccacggccggcggtgagaatgagggtgacggagaggcagatggccttctccctcggcttgttcggctctgggttgaagagtga

SEQ ID NO: 98591 - DNA, 175 bp, Oryza sativa
  unsure (1)..(175): unsure at all n locations
  Clone ID: PAT_MRT4530_96484C.1
cttttctccctttcggtgaaggcnngtggcgccttttcttcattagccttcacgcctgccaaggtatcctcagccttcggttgttaagttcgtttcgcctccaagcttgggccctgtgtgccacgaaaccccccccgtttcaggccccgacccgctgcggccttatgccggtaaa

SEQ ID NO: 98592 - DNA, 1314 bp, Oryza sativa
  Clone ID: PAT_MRT4530_96485C.1
atggagaacaaagatacaacagaaaaggccagattactcagtggtgctctgagcaaagaaggctcgtctggtacttcaaatgaaggaaagaaaattcaagcaaacggcgtggatggttccaaagcaaaatccacctcttcaggtgagaaggtcacgcaaggcaatacactaagcaactatgagaagaaagaagagaaaccatggggaagggaagagatcgagttgcttaggaaagcaatacaaaagtatccaaagggaacctcccggaggtgggaggttgtctctgagtttattggaactggaagatctgttgaagaaattctgaaggctacaaagactgttcttttgcagaaaccggactctaccaaagcttttgactctttccttgagaaacgcaagccagcaccgtccattgcatcacctctttctgtaagaactgaaacagttggtttgcctactgagaaagcagctggaaatgcatcatccaaagcgcctgcacaacatgcaagcagtaaaacatccgacgagaaagctgctgctcctgctcctgctcctgtatcaaatggaacaccttctggaacagcagatccagaggcttggtcagaggcgcaagtgctggctcttgtacaagctttgaaggcatttcctaaggatgcaagccaaagatgggagcgtgtggctgccgctgtcccaggtaaaaccatggtgcagtgcaagaaaaaggttgcagagatgcaaaagaatttccggagcaagaaaagcgctgagtagaacaacatagtaccggcacaagtactttttgtggctagtggctgacaaaagcttctgtttgaacatcagtatcccttatatgttagagaatcatagctgcgtactcctgatgaattttgccagcatatcacggcctccagtggtagcaataattttggtttggagctctgtgagaactcgcattgggccttaaccggtgtcggcattctgcttacacaagttttttggtctaccaagaaagaagctgatctgctgttgttgatagctaatgttttggccttccccaacattaggtggactttctgctgacccttgggttgtttatgttcgagagccccttgaagagtattatttccttgcattggtggagtgatatgatctggtctggcacgacacagggagtgtagagaacagcatcggcatttatttatcaacttataagatagaaatatttgttacaacttgagaacttgctatatcaagaaaccatatttttgcctaatcagattcattattcatgtccaaaaaaaaaaaaaaaaaaaa

SEQ ID NO: 98593 - DNA, 1567 bp, Oryza sativa
  Clone ID: PAT_MRT4530_96486C.1
cttgagaaatcttctgacaatgttattttgttattttggtgccggtccatcactaccttcctgagaaaaatcttatacacaagctttctaagacccagacaagctggcaaaagacaaattggagagaagccaagtgattgcttggcggcccatttcacctcaagaagagataaacctgaatcttctagttaaattgcagctgtgtatgttgactcatgcagtcttagcctttggtttagcttttttgaacctagagtacaggaaaactccagctagagcaacgtcagttgaatttggttgtgaggttaccaagggcattaataggtgaaatcggagttctgaagaagagaacggatgagacgatgaccacaactcgtttgacacagttggcaacagaatgggtcacaggtgatactctagccaataaactataagaaacctgttggtaaaaatgaaaacaagtgccagcaagagcagctttcatacatagttcctgtagattaactccgttgctctgcaggtacgatggggaaaacttgatgccttccacagacagcatcagtggggcagataataaaaatgacataacagtcattatcgagaagaggtttatatcatccaatgtttcctctttatcagccagaagtttcttgctgaaaacatttcgcgattgattggtaagattggaagccatggcactccaaaatcctatccagttgaaagaaacttcggtcatcgatgctagcacgacgccaccaacaattggcacgagggaacctaagaccaagaaagagggtgtctccccaaggaacaacacggagagaaggacagagaagaagggctccatggccttgatggtgtgcgtgaaggaaacggcgaccttgcccaagctcatgttggtgaacacattgcccatcgtgtgcaccaatgccaatggcaggatctttgcatactgtccaagggagagccttggcttggggtgaagattaagcaaccacatgagggtgatgaagaatgatccggacgcgaattggaaggtggtgatggtgtacgggaagggcaccgatttcagaaccagcttgttgaagatgttgaagtagatgttgaggaggtaccagacgaggatcatggcgccgagctgcaccgtccgcgaaatgccgccggcgacggcgccgccgttcgccttcccgccgccttccgccggtggcgaggccgccgcggccgtcgccaccgccgccttcctcgccgcggcgccgctgttccacagaagtgggggcgcgagcagcatgcgccccccgcgaatgccgagcggcagcaccggcgcgcccgcgccggcgaccgggcatcgattgagagacgacgtagtcgtcgtcgccgtcgtcgtcggaggaggaggagaagaacacgaggcgacatgccgccgccgccgcggggaggccgcccaggctctagaggtcgccgccgccacggcctgcatctcgcctcgccacgccgcgttccacaaccacgcgtccacggtttcttggtcacaacaatggcgccgcctcaaatcaaatcggacgcgtgg

SEQ ID NO: 98594 - DNA, 1407 bp, Oryza sativa
  unsure (1)..(1407): unsure at all n locations
  Clone ID: PAT_MRT4530_96487C.1
aaagtatgtgccaaaattcatttctcttgaaaaatcttctgacaatgttattttgttattttggngccggcccatcactaccttcctgagaaaaatcttatacacaagcttctaagacccagacaagctggcaaaagacaaattggagagaagccaagtganngnntggcggcccatttcacctcaagaagagataaacctgaatcttctagttaaattgcagctgtgtatgttgactcatgcagtcttagcctttggtttagcntttttgaacctagagtacaggaatcattcgaatttggttgtgaggttaccaagggcattaataggtgaaatcggagttctgaagaagagaacggatgagacgatgaccacaactcgtttgacacagttggcaacagaatgggtcacaggtgatactctagccaataaactataagaaacctgttggtaaaaatgaaaacaagtgccagcaagagcagctttcatacatagttcctgtagattaactccgttgctctgcaggtacgatggggaaaacttgatgccttccacagacagcatcagtggggcagataataaaaatgacataacagtcattatcgagaagaggtttatatcatccaatgtttcctctttatcagccagaagtttcttgctgaaaacatttcgcgattgattggtaagattggaagccatggcactccaaaatcctatccagttgaaagaaacttcggtcatcgatgctagcacgacgccaccaacaattggcacgagggaacctaagaccaagaaagagggtgtctccccaaggaacaacacggagagaaggacagagaagaagggctccatggccttgatggtgtgcgtgaaggaaacggcgaccttgcccaagctcatgttggtgaacacattgcccatcgtgtgcaccaatgccaatggcaggatctttgcatactgtccaagggagagccttggcttggggtgaagattaagcaaccacatgagggtgatgaagaatgatccggacgcgaattggaaggtggtgatggtgtacgggaagggcaccgatttcagaacctgcaagccatggattccaacaagatccgccatgaacaaattagagacgaaaaagaacatgtcgagaaggagaaggaaattgacgaattgggggaaaaaaatatatgtgcagaccagcttgttgaagatgttgaagtagatgttgaggaggtaccagacgaggatcatggcgccgagctgcaccgtccgcgaaatgccgccggcgacggcgccgccgttcgccttcccgccgccttccgccggtggcgaggccgccgcggccgtcgccaccgccgccttcctcgccgcggcgccgctgttccacagaagtgggggcgcgagcagcat

SEQ ID NO: 98595 - DNA, 589 bp, Oryza sativa
  Clone ID: PAT_MRT4530_96488C.1
actagaggcagctaacagcagaatacaggaggcagaaaaaagaataaacaaggtggaggacagataagtaggagttacgggtgcagaaccgaaaagagaaaaaaggttgaaaacaaatgaagagagtctcagagaactctgggacaacattaaacacaacaacatatgtattataggggtgccagaaggagaagagatgaaaaagtggacaggaaaaatgttccaacagatgccggggccagctcagcaggatggggctgaagaacgggtgctgtggaacttaaggaaaaagagttaatataaaacaagacacagacacatttatcttaagtagaggtgggagcaggggactcaagatctccgggaccaagagcgggaccaagagcgctgcctcaagaaaccacactgcttttattgtgctctttagataagatcaagtgaggagtggctatgggtggaggatacagggtttgtttactattatataagttcttttactatttaaaaagccacttaggtagtacagggttaaactcttactctgacctctaggcacataacagttcttaagcttaagtcacttatgcct

SEQ ID NO: 98596 - DNA, 197 bp, Oryza sativa
  Clone ID: PAT_MRT4530_96489C.1
caccacatgggaggccactggcaactgcaaccaggcaagagcctgcaccgtgcctgctgggatgttgatgcaatgctggaactgctggatgggattgggttgctgcaaggatgtgtgatgcccacaaatgtgctggcaatgcatggatgttggcatgcgcagtgacaagctgtttgggttggatgagaactcgtaca

SEQ ID NO: 98597 - DNA, 304 bp, Oryza sativa
  Clone ID: PAT_MRT4530_9648C.1
ggctaccggggttcctgtggaccaacagcggttgatttttagaggaagagtcttaaaggacgatcacctgctatcagaatatcatttggaagatgggtacacattgcatttggttgctcggcgtgcagctgctgaaggccaacattcttctggtacttctgatgaaaacacccatgctaatgttaatgttgctggaaatggactgttaggagatatctccaggagtgttcggtatatccttgtctccctaggtcttgtgacgcctggaggcatgtaccacactacattttcggtgccttttacc

SEQ ID NO: 98598 - DNA, 138 bp, Oryza sativa
  Clone ID: PAT_MRT4530_96490C.1
atgaggcccagcggcccgtccgactatgcaagccgcgcggtggagaacaccggtggagtcgccgggaacattgaattttcgttggcgaacatcgaattgttcctggcggtcctctttaccaaccaccaacgaaaatag

SEQ ID NO: 98599 - DNA, 1236 bp, Oryza sativa
  Clone ID: PAT_MRT4530_96491C.1
atggcggccgccgccggggcgccaccggggttcttctccttcctcaagcacggcgtgctcgtcccggcgcgtggccgcggcgtgttcctgccgctgctcgcgctcaccgcggcgctcgcgggcgcgctcctcctcgcgaactcgctcgccgtgcagccgcgcgccgtcgccgcgctcctcgacgccgacgccctcagccgcgccgacccggccagcgccgcgtacccgaagctcgtccggaggttccgcgacgacctgcgggggctcctcgtcgacgccgccgcgtgcgtcgccgccgcggtggtcgccgggtcggcgatcaagatcgccaccgtgttcggcgccgtcgcggcgttctcccccgccggcggcgaggaccgccgcgccaccgtgtccgggctcatcggcgcggcgagggggaacgtgtgggggcccgtgctgaccatcgccttcgggtacgtcctcgaggtggtctgcgccgcggccatcgtcgccatggcgatgctcgtggtgcccctcctcgagtactccctgctgctcctcttcctcgacgccatggccgtgctcctcgcctcgctcttcctcgtctacctcaccgtcgtctgcgcggtggcgctcgccgtgtcggccgcggagcccggggggcgcggcgccggggcggtgtcgcgcgcgtggcgcctcatgagcggcaagaacgcgcaggccgtgctctacgtcgtcgccacgttcgcgctcgccgccgcggtctcgccggtgtacacgctcgcgctcaggtggtggcctcgcagcgcgccggccggcatcgccgccggcgtcgcgtacgtgctcctcctcggcgccgtcgaggtgttctccgtcgccgccgtcacggcgtactacttcgagtgcagggagatgaagcaggtggaagaagacatggcggcgggaaggagccaggaatatgccaatcttattggcaccaagaaagcatacaattctctgctaggcatcgccggcgcggtggagggcggaggcgtcggccgcggcgcggtggaggacggcggcggcggccgcgcggtggagggtggaggcggcggccgcgtgggggagggtggaggcggcggccgcgtggtggagggcggagccggcggcagcggcgcggtggaggctggaggaggcggtggcgcggtgggggcggagccggtggcggcggcgcgggaggggctggaggagtgcggcagacggcagtggtggtag

SEQ ID NO: 98600 - DNA, 693 bp, Oryza sativa
  Clone ID: PAT_MRT4530_96492C.1
ggacacaaaaggcagagcgcagcacgcgcgaagcttgacccaacgcgctttttttttttttttttttttttttttttttttttttttttttttttttttttttttttttttttttttttttttttttttttttttttttgggaaaaaaaaattttttaaggggaaaaataaaaattgaaaaaaaaaaaaaaaggcaagggaaaaaattttaaaaccccaaaaagggggaaaaaaccaaagggaatgggaaaaaaaagggaaaacccgggaaaaaggggaagggggggggcccttccaaaaaaccccggcttaaaaaactttaaaaaagggcttaaaaagggggccaccccaaatttcgggcccatttaaaaagcccagaaaaaaaaactggaaaaaggggtaaactgggggggcccccccaaaaggaaaaggggccccggggccctgaaaaaacctaaaccggaaaacgtccccaaaaaccctttgaaggggggggccaaaaacaaagggaaaccccgggccctggacccccaaaaaaaaaaacgttttttgaagaaaaacggggggggaaacaaccccccccccgttttaaaaaaacccgggaaaaaattgggccctttctttcctggaaaccacccaaaaaaattggaaaaaaacggcaaaaacaaagggggccccccagggggggggggg

SEQ ID NO: 98601 - DNA, 1488 bp, Oryza sativa
  Clone ID: PAT_MRT4530_96493C.1
atggaggtggcccgcaccggatctggaggtgcggcgccggttggaggtgcggcggctatgtacccagaagattgtgagatcgatgtgcagcagttgttaaggaggtggagagcagaagggttcatcaaggcaattgaagaaaactttgttacagttttcagtgatccaaattcgttagtgtcccaaggaaaagttggtcgacttttacttgactaccgtggccaagaaaatgtgatgccaatgtgttccatggtaacttgtaatgttagatcagtgagcatatttggatacagggaacagatgcttcctatttctgacttgaatgttttcagagtgcttcatatagagagtggtaataagatgatggagatttgtggaattgggaagctacttcagttgcggtacttacggattgatctagttacacatcttactgaagaaataggagaactgctgtttttggagatattggatctacctcgtggtattggtacagaggagctgcccaaaggcatagttaaactgcggcggttgaaatttttacacgttcatgatgcaagactgccggatggagtcgggaatatgcaagctctagaggaactagcagtatcaacaaaagaggacaatttgagctcaataaactccttggaacagttgggaacgctgaccaaacttaggatacttcacctaagtttgtccattactgacgagaacaatcataaatcaaaacacttggatacgttaacttcatcgctcaacaaactccttagttacaatcttagatatttgtattttgatagttactggcagttgggttctgcttatatcaatttggatttttcatcctcgccgtcttatctcctgcaagaattacacatccgtcctctccttctccatgggattcctgagaggccggcgtcactggccaacctgacctatctggacattagaatccaacaagtgacgcaagaaacccttgagatcctaggagacttacctgccttgctttctcttttgttagtgtccgcatttgacaacacaaaaaggtttagcatatacagaaataagttcagatgtctagagtctctaaacttggattgttcggctagtgatatgatgttccacgctggagccatgccaacgcttgtagacatcaactttacaatcaaggcacattccacaaagtatgcatgtgccaatcgaaatctgggcatccaccacctctcaacccttaaggcactcaatgtctatattgactgccaaggcgcgacagctaaggaggtggaggcagttgtggccgccatcaagaacgaagcaagcctacttcccaactgctacatacaacatatccgcatatcgcgggaggaaggattggaggatatcgacatatcgcgggaggaaggatgggaggaagggggccactcgattgagcaacaagaagagatcactaatccccataccgagcacacaataacccctgccacatag

SEQ ID NO: 98602 - DNA, 554 bp, Oryza sativa
  Clone ID: PAT_MRT4530_96494C.1
aaagggaaccccggggggggggggcatttaacaaccaaaatagggggaaaaaaattcccaggtaaaggggggggggggaccccccccgggggggggggccaaggtcccttgggggggggggaaccagggcaccaaagggaaggggggcccccaatttggggcccccctgggaaaagaaaaacgggtaaaagaaaaaaaaacccccaaaaaaattataacccggggcaaagtttaaaaattggaaagttttaaaaaaataagccccaacaacccaaaaggggggggaagggggaaatttcctttggggacccccaaaaacaaagccaagggggcggggcccccccccccggggaacccgggggggaaacaaaaaaaccaacaaaaaaaaggggggggccaaattttaaaaaaagcctggggggccgttaaaatttggcttttaatttttaaaggggcaccgggggccttttattgggggaaaggggaaacggcggtctaaatctgggaggaaacctgggagggttttgggcccgggaaccaaccaaaattttttt

SEQ ID NO: 98603 - DNA, 1633 bp, Oryza sativa
  Clone ID: PAT_MRT4530_96495C.1
tgctggtggtccccccgggctgcgctgccgcgccatgtccgagacggattcatcggcggcggcggcggagggtcggaagccgaggcggctgcgggggcacaagaagggcgccgtcacctgctgcgtcgcctcctcctcccgcccgggcgtcgtcgcctcctccggcgaggatggatgtctttgctggtttgatttgcgtacgaaggatgtgcttttcaccatggaggcgacaaatcaaccaatttcttctgtgtgtttcaaagcaggaaatgaagatcttgtgtatgcctctgctggaaatgaaattttatctttcgatgttcgaatgggacctcaagcaaagccattggacacttataactacaatagagatgaaatcaatcagattgctgtgagctctattcttgccatccctgctgcagatgacagtggggatgtcaagatttctgaactaccttgctttggtgcaatagaagcagtgtacaattcattccttggagaccttggacagctattactggaggccttgattcaaagcttgctgtgtgggatttctccaaagggcgaacactgttttctatagattatggatcacctgaaatgcagaatggaagttcaggtgggcaatgtttcaatcctccttttgttcactcaatagcagtttctgaagagggcatcttgggagggtcgtacaaagtttgtgctgttgcaagaggagatggtgctgttgatgtggttgatctagaatatgaacttgcccctgcaaaatcaaaagggcttcctcggatggcagatttgagtttaagctcgaaaagaactgatttaggagatggatgtggtagtcaaagtcaagggaacaggatccaccttgattacacagtgggtggtcatacttcatctgtttcttgcgttacattttcagcatttggcgagaaggggaagtttcttgtttctggtggcaatgattcatcaattaaattatgggattggtccaaagggttctcctctgaaacaaacaacagtgctgaattggtgttggatataaaggtaataaaaaggtgaactggttgtgtactactccgactgattcagataacctgattgtgtgtgacacatccaaggtggtcaaagtttacaatctaccttagactgacaatgtgcggcattatcaatgcccaagagcagccctgtaccagtcgatgggacaatttcttgaggacatttagcacaaaattgtgtgcccgaccatcagtgtcagcttggtcctgactagtcttttgacaatgatgaagctaggcccactgcagcaagttgtgtgacgtgagaaatcaagattgttagttctctgcagctagttgtgtgaagtgagagttcaagattgttaatacggtgaaatgaacgtatgttctctaagagtcagcgtgtttttgtgcttgcaaccagcttccttgtactaatggcgaaatccatttatgttttgtgttattttagctgttctttcttccaaagacaataccacaatgatgtagcgcatcatcttcaattcttcctcatgtaatgtaacgagtaaatcatagtcaatattcaagcttacatggtgctatatgtagcacatatgtacgctactatgaac

SEQ ID NO: 98604 - DNA, 414 bp, Oryza sativa
  Clone ID: PAT_MRT4530_96496C.1
ggttgttgggttaattagctagtatactgccaatgcatgatgggcttttgcattcgcctgttaattttgggcttcttgtggtggagtggagatttgctggagagattatgtgattgattgattaagttattatagatgtggcatgggctaagctgatgatgtgtgactgactgaataatatgtgtgtgccagcaatacgtatgtgtgtgagcgtgcaccgtataccaaggtatagttacaggtatatacatacaagatatatataggtatacatgcatgcgtgatagatatatgtgtgtatttgtgcgtgacccagcttgatttgtgttgtacatagctaccagtgcatccctgctattcctctgtatggatggaattatgggaattaattatttggtttaaaaaaaaaaaaaa

SEQ ID NO: 98605 - DNA, 1005 bp, Oryza sativa
  Clone ID: PAT_MRT4530_96497C.1
atgaaggttttcgtggtagtgtgcatgctggcggtggccttccggctagtcgccgcggtcgtggtgccgtcggcggcgccgggcgggttgacggtgggttactacaatggcaagtgcaacaacgtcaacgtcgagtccatcgtgtacaataccgtgaaggacttcctcgatgctgatagatccaagggcgccgccctcgtacgcttgttgttccatgactgcttcgtcaggggctgtgatggatcgatccttcttgataattcgaccgcaaatccttcaccggagaagatgtccggcgcgaacatcggcatcgcggggctcgacgtgatcgacgcgatcaaggccaagctcgagaccgcgtgccccggcgtcgtctcctgcgccgacatgtcgtgttcgcgggccgcgacgcgtcgagccggccgcctcgacggcgtcgtctcctcggccgcggacgccacgaataccctccccgactccaagaccggcgtcgccacgctgatctccaacttcgcgaaaaaggggttcaccccggaggagctggtcatcctctccggcgcgcactccatcggcaaggcgcactcctccaacttcgacgaccgcctcaccgcgccggactccgagatcaacgccgactaccgcgacaacgtcctgaacaagacctgcaagtcgtcctccgccgcggcgaacccgacgctggcgaacaacatccgcgacatcgacgcggcgacgctgggggacctggcgagctacgtcgtcccggccgtcggcggcgactacctggacaacagctactacaagaacaacaagaacaacctggtgctgttccactccgactgggcgctcgtcggaaccaactccacgctccagcacgtcaacgagtacgccgagaacggcacgctgtggaacatcgacttcgcgcaggcgctcgtcaagctcagcaagctggccatgccggcggggagcgtcggccagatcaggaagacgtgccgcgccatcaactaa

SEQ ID NO: 98606 - DNA, 817 bp, Oryza sativa
  Clone ID: PAT_MRT4530_96498C.1
atgggcgacgatggcggcggcgtgaaggtggcggcggcggcggcgacgacggcgacggggatgaagcagatcacgcggctgagggagctgctgcagaaatggcaggcgatggcgctgggggcgaataagggtgatgttgccaccgccggagacgaggaagacgaggaggtggtggaggtggctccggcggcggcggcggcggcggcgataccgccgttcgtgatgaggcggctgcagaggacggtgacggtggactccgacgacgagagctgccagagcccggagccgccggcggacgtgccgagggggtactgcccggtgtacgtggggccggagcagcggcggttcgtgatcccgacgaggtacctcggccacccggtgttccggctgctgctggagaaggcggaggaggagttcggcttctgccaccagggcgcgctcgccatcccctgcgagaccgaggccttcaagtacatcctccagtgcgtcgagcgccacgacaacggcctcgccgccggcgacgtcgtcgacggcgtcgtcgacgtcaacgaccgtgcgccgccgcgcgactagtagcagtttcttcgattgctttattaattaattacttaattaattaattagctcgcgatcgagacggagctagccgtcagaaatgattaatcgtaatccatgggggttgtaaacttgtaatggaactgcattttgttgtacgctgttgtaacacagtattcctagatgaaaaattaaaatgacatgtaatatttgattgttacgatctagccaatgcaatatctgtcgagctcttcgcgtgtta

SEQ ID NO: 98607 - DNA, 1305 bp, Oryza sativa
  Clone ID: PAT_MRT4530_96499C.1
ggttccacgaaacaaattggggagattaattaacctggggtcaaacaatccagactaaaaaacccggtgaatgatagacacccagccgtgccggacaccacacttggataaaccaaagaattgtgcaaccaaaatgtcggatcgatgcgatatcaactgtcaacaaaacgccagcgcacgacggtacagagagtggattaatagttgatggcgcggcacgtcttcctgatctggcggacgctgcccgccggcatggccagcttgctgagcttgacgagcgcctgcgcgaagtcgatgttccagagcgtgccgttctcggcgtactcgttgacgtgctggagcgtggcgttgctgccgacgagcgcccagtcggagttgaacagcaccaggttgttcttgttgttcttgtagtagctgttgtccaggtagtcgccgccgacggccggcacgacgtagctcgccaggtcccccagcgtcgccgcgtcgatgtcgcggatgttgttcgccagcgtcgggttcggggcggatttgcaggtcttgctcaggacgttgtcgcggtagtcggcgttgatctcggagtccggcgcggtgaggcggtcgtcgaagttggagcagtgcgccttgccgatggagtgcgcgccggagaggatgaccagctcctccggggtgaaccccttcgccgcgaagttggcgatgagcttgccaatgtcggccttggagtcagggagcgtattttgggcgtccacggaggacgagacgatgccgtcgaggcggccggccgggacgtcgaagttgacgccgccgttgctcatgtacctcgacgcgtcgcggccagcgaacacgacgatgtcggcgcaggagacgacgccggggcatgcggtctcgagcttggccttgaccgcgtcgatcacgtcgagcccggcgatgccgaggttcgcaccggcgaacttctccggtgaaggatttgtggtcgaattatcaagaaggatcgatccgtcacacccattgacgaagcagtcatggaacaacaggcgcacgagggcggcgcccttggatttgtcagcatcgaggaaggccttcacagtatcgtacacgacggactcgacgctgacgttgccgcacttgccattgtagaaacccaccgtcaacgcgcacggcgccgccgacggcaccacgatggcggcggctagccggacggccaccgccaacatgcacactgccatgaaaaccttcattttgacgtatactcgatcgatcgatctagcacaacagacttggatcgagtatgtggcgtctcttatacac

SEQ ID NO: 98608 - DNA, 5373 bp, Oryza sativa
  Clone ID: PAT_MRT4530_9649C.1
ccatcaaccttcatcggcctcttagaatcatcaaatttgattttgcctccttcgatagccgcttgtatctgctgcctgaagaccttgcaatcattggtagtatgagacccagaattgtgccacttgcaataccttttcttgcccaattcctcaaccgatggaattgtgtgaccggcaagaagttgaatctgcttctctcgtaagaataaatcaaaaatcttgtcagccttggtaatgtcaaatatcatccttctcctcttttccagaattcttcacccattggcatggtacaacctttttgctccttacccattcggctacagctatttcagaatcatcatcctcatcatccgatccacacaaataaggacagacatgattaaccttcctagaattcctcctagcttcagcaaaccactgctcgtgcaaagttaccttctgtgtaagatgcgacaagctttcaaagtcttcagatgagaatttctccatgattggagcaatcataccctacaaagccaaatcagctaactgagcatcagtcaaacttaaactgtagcacatattcctcatctctctgaacctctgaataatactcatgcacgggctcatcatgtctttgcttgattgctgtcaaatcggacaacttcatcttatgtaccccactatagaaatagctgtgaaactgcttctccagatcgccccaactgttaatcgatccatacggtaaagaagaaaaccaagtaaaagccgatccagacaaagacaatcggaacaacctaaccctcaaggcatccacagccgatgcttcaccgcactgagctaaaaattggctaatatgctcataagttgatgtactatcttgccctgagaacttcgaaaaatctgggactttaaaccggttagggagaggaactctctcaaaccattcaggatatggctgtcggtataaatttccagcatctttcggcctaagcccaaattgctccttcatgacgtcgtgccatctggtcgtaccgtgatgaatgaagtgctccgggacaacttgatttgcggtatgctgcacaggctgcacaggcaaacccagccgatgcattcacggctgcacaacctgctgccttggcggtgtttgctgaatcggctgttgctgggttggatcaatggcatgttgaggaggtaagaacatagatgcaacctggtcttgggttagccgattcacattctgtccactgtgttgtggttgttctctcaccaacaatcggggattaaccaattggcctggggccgaaggtggtacagcgggtgcaggagctggtaatggtgccgtcggctgaaccgatggtggattaatggccggctggacaactggttgattatcgatgattaatggccgataattcgggaacacccgtcctggtaagtagactagtcctgtagcttgatactcggccattgaaccatcaaccattgactttaccatgttcgctaaagttgttgaactgcaactgtgttgcatcgccgtcttgattagggccgtcaccttgaactccctgggcaccatcaccttgaactccttgagctccctgagagtggtcaccttgatttccttgagaatcatctgcagcacctttgttgcttggttgagccgagccatctggagcttgtttcactccccatccttggaagaaccggtcccggggacatcagccactactctcacctgatacttttgcaccactgtccccttgcgggtctgcataaatgagttcaaaaactggttccgtgcttgctgcatcattgcttcaaactccttcttctgattaggtgtcaatttgtctggagtaatggtcatgacgttgccctcattaacgtcagattggtctaattgctggacccgtcggaggacgtaatcaccgatcgaaagtgtgtgtgctctgatgcgcttctcgtggtatcggcgaagggcctgctggtagctggctgctttgacggcaactctttctcgatgttccacaagtaggtgcacatcgtcgcttcgctgctcctcctggtcctcatcggagtatttctgtactcgtgtgccctgatgtcgcaacttcgtggggagcatagcttctgagccatacacgaggaataagggtgtctccttgttggacgttgtcggtgtggtacgtatggcccaaaggacagaggggagttcttcgacccatttcttgtcgtgtgacatgagtcccatgggcgtcgcttcaatccacttggtgaacttgtcaatcgccacgaataggaacctgtagccgccctgtcctcgtgggaatggtccgagtgtgtcgagcccccagcacaagaacggccaagtaagagggatagtctggagcgcttgcactggtagccttgtgtgtttgctgtggaattgacaggcttcacaccgctgaaccatgtcacaggcatctttgagggcggttggccagaagaacccttgtcgaaaagcttttccgactaatgtccgaccggcggcatgtgacccacagatcccttcatgtatgtcgaggaggaggtgtctgccgtcatcggacgagacgcattttaggagtaccccgtttggtgccttcttgtatagatcgttgccgatcatacagtagacttttgctttacgggatattttctcggcttctgcgtcgtcctcgggcaactcttcgctgcctatgaatttaatgagtggggtgcgccagtcgtctgtggtctcgatatcggcaacggcgtgctctgcctctgtagcccccgagctgatgttgggggcgaccgggctattttcgccgcttgcctctttcactgatggcctggtcaggacgtccagaaaagtgccaggttcaagtggctctcgtctggacgcacgccgtgctagatcattcggttcgatgttgtctttgtggtatacatgtcggacctcgatcccatcgaaccttttctccagcttcctgacttctgcgagatacttggataactcggggctagagcacttgtaatctttatgcacctggttcgcgactagttcggaatcccctttcacaatcagtcgcctaaccccgagtgtagctgcagctcttatcccggcgagtagtccttcgtactcggctgtgttattagtcgccctgaagttgaggtgaattgcatgcttgaattgatctcccaaaagtgatgtcaagatgaatcctgcccctgctccttggctgttgagtgcgccgtcgaacgccattgtccacgtttcgttgttgatttggttgtctgacttgatgactgtttgtggcacaaagcggacatcaaattggcttagctcaactacccatttcgcaatgcggccgacaatgtctttatttctcactacttcaccgagagggaaggaggatacaactgtgaccctgtgggcttggatgtagtggcgtagctttcttgatgtcatgattaccgcgtagagcagtttttggatctgtggatatcttgtctttgcgtcgtggagagcttcgctgatgtagtagactggtcgttgcaccttctctctctcgacaacaataacagtgctaacggaatatggtctggcggcaatatagagaaataattcttcattaggttggggggcaacaagtacagggggatttgataggtagcgcttgagtgcaatgaatgcctcttcggcttcttccttgagtcttgtcggcgacttcatgttctcgattgccttgatcttcttgggatttgcttctattcctctgccagagacgaggaaaccgagcagcttgcccgatggtactccgaacgtgcacttctctggattgagcatgaggcaatatcgtcggaggttgtcgaacgtttcccgcagatcgtcaatcaatgagtcgcttgtcttggtcttgacaacaatgtcatcaacgtaggcctcgacattgtttccgagttggttgctaagtgcaccttggaccgtatgctggaaagtgtttcctgcggttattagttcgtacggcatcttaacgtagcagaatacgccgaacggcgtgatgaatgctttcttctcctcgtcctctttcgccatgctgatttggtggtagccggagtaagcgtcgagaaaactcaacaactcacaaccggctgttgagtccaccagttggtctattcgaggaagagggaagtgatccttgggacacgcctttctgatgaaaccagctttgagaagcttgtcgagttcttctcgtatggcttgttttcgatctggtgcaaatctccgcagtttttgctttactggcctggcatcgggtcgcaccatgagtttgtgctcaatcacctccctgggtaccctcggcatgtcggacggtttcttgggtggctcagctgtggcgggtggggtgggcgtgtgctcgaccatgtcgaggctctgcttgtcgcattgcactaccagcttagcatttccttgaatagtgattgttcccttcggtcccggcatcttgagcacttgatacgcgtagtgagatgcggccatgaacttcgcgagcgcagttctcccaatgatggcattgtatgctgtatcgaattcagcgacatcaaaagtgatctgctccgttcggaagttatttgcttgaccgaaagtcacaggcaacgtaattttgcctaatggtttggacgataactgaggagtgattccatggaagggttgatcggtgggtgtcaactcgcttcgtgggatccccatcgcgtccaaagtgctagcgaagagaaggttgattgagctgccgccgtcgatcagaactcgcgcgaccttgatattccgaatagtgggttcgaccacgatcggatatcgccctgggatgacagcagtcttggggtggtcctcttctgagaattctatcttctgctcagaccactttatcttgggcgcagctccctgccatgttgaacagacttcacgttccactttcttgtattctcgctttgaggagtatgctgtggaacctccgaagatgtgcgagacatggagatcagagtctgggtatgctgagtccgattcctgagtagccgccttagcgtccttctcggccacacgtactcgcttgcctttttccaatgccatgtgttttgcgagcgactttttgaagatgaggcaatcttctagagagtgtctgtccgacttgtgtatagggcaccatgttttcttcgtgtcgctgctttgtgggtctgggcgcttgggagggtccgcgtattctgttgcgagaacttccgcttgagctttccttttcccactcttgcgatttttcttcttgcttgactcaggagcgtccttggctggtttcttctctcctccggtctttggtttgtcgttcttgcgtctca

SEQ ID NO: 98609 - DNA, 300 bp, Oryza sativa
  Clone ID: PAT_MRT4530_964C.1
atgcccgtgactcagcacttaggcagtgaaggggatggagcgcaggtgcagtacgaggcgacgctggcgtactcgggtgcagtcgcgggggtgacgatcgaggaactagctggccggacatcgtcatggtcttcggtctcctacgtgctcgacctgggcaccaaggaggtttctgcgaccgcatttgaggatttaaatgaagcacattctagaaggccagaacaagttgggaccttgggagctggggttattgccgcgaggatggtgcttctctttgtgttgactgttgacaacgactag

SEQ ID NO: 98610 - DNA, 312 bp, Oryza sativa
  unsure (1)..(312): unsure at all n locations
  Clone ID: PAT_MRT4530_96500C.1
agcaagcagatgccaccgtcgtccaagtcggcgagaagaggacggcgaggaagaacagcttccgcatctgcaagccacagggaacgttcatgtggccacacatggcgtctggcacgagcatggcctaggtgggggggaggcannancanctgccctgtcgcctccgggccagagcagctccctcgcagcagcagctgccccagcattgggcctggtggcctcccgccgtcgtcacgagccccagccgaggtggtggtcgcgtcgccactggacaagcacgtggcgttcctgcggggcttcaacacgccgtcc

SEQ ID NO: 98611 - DNA, 846 bp, Oryza sativa
  Clone ID: PAT_MRT4530_96501C.1
gccgccgctgccgtgcgagctccggcaggcggcgacgtcgaacccctggatcctcaccgccggcgcgaacgacggggcaaaactgctgctgctgctgtacgcggggtggtggccgtggtgggtgctccggtggtcaaaaatcgagagctccggcgcggcggcggcggcggcggcgtgggggcgctggttgagcaggaagtgcgggtcgtggacgagcgggttgtccgccctggccggcggcgacccttcgaacatctcccacctgccctcctccttctgctgcttacttttcccttccctttgctaaaacttgagacatagaagatttctccattcatctgtacaaagcttgtttcagataatcagatgcaagctatcaccctgtcgtccatagttaacaaaaaggaaagaaatgttcagtggcactggctacaagcgcctagagtaaccagaacctgaacacttcttgcatagtattaaccctgctcctttgcatacacggcactcgactactccattttcaaccttcatcttgccgtcgttgcaaaagacacactttgtgcctccattcccggcgcacctttcgcacggcaccggatcaccctgaaacaaacaaacaaacacgaaaagccaaagaaaaattgcagcaaagcacatggtttggctaacgatatagtatatatatatatagagagagagaaaatttagagcagacagcgcgagcgagcgggcgacaaccttgaggccgaggacgagggagagggagacggcggagaccacgccggcggagatgaggagcgtctgcgtgtcgaagggcctcatcagcacgtcgccgccgcctcgtgc

SEQ ID NO: 98612 - DNA, 1722 bp, Oryza sativa
  Clone ID: PAT_MRT4530_96502C.1
ttgctagatctggaaggctgtcaatatcacttggacaagaaccacctcaaggacatctgcagcattttacatcttaagtatctaagcctaaggagaacagatgttgctgatctgcctcatgaaatcaacaacctccatgagcttgaggtattggatatccgtcaaaccaaagtgtctgagcatgcaacaaaaaatattgtgctcctaaagctgaggcgcctacttgctggtcaagttgatccaagcacaagtcatgaaatgggcaagccattgcgctcagctgtcttgatcccacgcaaaatcaacaaaatggaaaatatggaggtattgtccaatgtgaaggcttattcaaggaatggagctgagttaaaagaaattagaaagctagggcaactgaggaagcttggtgtggttatcgttaacaacgaaaatcacctcaagaatctgctctgggccatgagtgacctaaaagaatgcctccagtctctttccatcactatacttaaaaccagaaatgagggtgatactgccaacaagcaaaaggtgctaccacatgatctgtacaatcacttgatacagccccccaaggttcttgagagcctaagcattgatggacccccaaaaaatgttcggcttcaaacaatgttcgctaaaggtagcaacgaacttgccaagactccggcaaaatgcataccaagaaaagggagctcactttttagacggaagaattcccacatctcaagaattttcttgttgaagcagctcacgaagactgacatgatcaacttaaaaaaaggagcagctcctgagctcgagaagatcgtgctattccgcaccagcataaagcatctttgtggggtcggtgcccttccaaacctaaaggagctcgagttgaaggaaaacgagcagcttgttctatcacctgaagctggaacagtttccgctgatccagttatacttgaagattggacagactctactgatataattgtacataaagatggagcaacttctgctgaaaagagcgcactcaccttcaagaagaaagaattcaagcatctcaagtactttcttgttgagggtcaccacatgcagactgacatcaaatttgaaggtggagctcctgagctcgagaagattgtcttgtccaatacaaacatagagtctcttgatggagtcgacggccttgcaaaattgatggagattgacttgaagggtaataagaccattctttcattatttgccactgccaatcatattgccaaggtaactctttccgatacttgcctgaagcaaggtgatctacaaatcctcgcgaagaaaccaaaattgtgctggctactgctcttggacaaatcttatgacgaaagccatcttaccttcaacaaagatgagtttcccaagctcaaacatcttactatcacgtgctccaagatctcgggcatcaacttcgccaaggaatctgcctgtaagcttgagaagattacctggtccttcaccgagctagagtctctctctggaattgacaacctcccggaattgaaggagcttgagttagaaggcaaaagtgtccctcttcaagtgtggagagatatcaatgcacataacaagaaacttatacacaagagaacacaggttcaggatgaaccaaaaggaggaccgacactagctaacaagaaaaagtctgcattcttctccatctttccgtccactcatcgctga

SEQ ID NO: 98613 - DNA, 726 bp, Oryza sativa
  Clone ID: PAT_MRT4530_96503C.1
tgcaggttgaccaagcagagtgacttgatatattcatagtctgaacattccatatgctagaattcattaggtaaacagaggagtaaaactttgtgacttcactaccaaataccaaataggatactttcaactagttatccacaaacatgtcctaccaaatacaaaataaaaaaggtgaattttactaaggcacaaaccccttttggacacttgagattgctcatttgctttggcacaaaacattcatttatgtacaactgagttagacagagcatatctcaagtgaacaaaagcattaggcaatcctataaatttttttcatctatgaatgatagatgatctcatgtgcaacttgcacccaaaaaaacagaagagaaaaaaatccaaaccaaaacacaagtaccctttgttgtttcatattccttgtacactatggaaccaagcagaaacctgaccttggactgatggactctactgcagttgccactccatacaatcgtcgaagtcgagactactagagcaatccagcagtgcattctgttgctgctcataccggcagatgtaatttagcccgacaagcaattcgcatatcacggcctccgtcttctccctgtccgcgaaatacaatgtctgaagaagtagcacattccccttcaacacaatctgctgctgctcgaaattcctctcggcttgccaccggatcatgttgtgcgccatcggagcaag

SEQ ID NO: 98614 - DNA, 1163 bp, Oryza sativa
  Clone ID: PAT_MRT4530_96504C.1
actgaaaatgcgtaggcccaaaagtataccagttagttaataaaaatgtacaactctaatgctgcctccagatcacaatgtaacagatatcagcatagttgaatggaaacaaacagtgcagttaacatatccaaagggagatctagattagatagagacttccacatttgcacacatgggacaccttacatatgtcctctacaggcgggcttcttaattcactaaagattgcctttttttcctggttttctcctcttccatacaatagccagtgaagtagccaccaagaagaacggcggtaatggcccatgatcgaccgatgtttttgaagtgaacctctctccgaacaatttcaaagtttgaaatggttttgcccaccattaccaatggcacggaattgagcttcttccccttaatttcatccagcagtgcatttagcttggtggccgcctcagataggggaggatacggatccttgtggacgcatccgctccctgcctcgtgaacgccaggagctggcttgcgctggctgagatcgccgccgcggacctcggaagaaagggcgcggggacggcgagcgcccgcgcgtcctgccttgccgccgcagcccaagaaagatcgcgcaaacgaagccatgcccactcctctctttcgctgccagcgatcgcggctgcagggttaggttgggggttctggagtggagtgcgagaggtgcaatgtgtcgacgtttgatgtcgcgattctggtatttgcatagtatggggatcgttggtaccagggtatatgcgagataatacaatatatggggtagcctatctaattgttgtcgatttggcggtctgaagtgctgactcggagtcgacaacagggtagcctccctcctcaaatccgttctcggtgagatcagagatagcgctagacccctcccgacggcatccataggtaccgatgaggatcaactaggcttctctccgaagtcgatatccggcagcttgtcttggcgtatgttggcttgtatgttgatcttgtgtcttgatctattgttccgtttctcccctctcctcctagggggtcttgtatttatacccataggtgtccccttgtccaaatagaactaggaaaaccaatatggatataatccgagtagtccttgtcgtttccat

SEQ ID NO: 98615 - DNA, 981 bp, Oryza sativa
  Clone ID: PAT_MRT4530_96505C.1
ctatcctctccagcggatccaggtacccagaggagagggacgcaagccgctgccgcgacacttctcccccttcatctccatgccaccaccgcctccctcttcctcgccctccactcctcttggtgaggtgccagatcttgttcgagggtcgttggaatcgatggtatcggtctccccaacggtggatccggtcacccggagcgacggacccaagcggttgccaccgccctcttctcctctcccgctctgccctcttcctcttgccctttcagggaggtcaagctttgtagcgacgacggtgtggcattggcgtttctccgataagatgagcttcgacggctcaacagagccgaggttctgtgcaatgatgatgggggcggcgacgagcccgttcgtgttgtggaggcaatgtatgtcatggttgcgggagcgtaggttgtccagacgacatgcgaactgtggtgaaatgtcaaaagtgcccttaggcccacatgtcagctcggctattcccctctctccagccacaggaacgggcggcggcgtggacgaccccgtcgcgagtgagccctcaacgttggcctcgacgtcgtcgcttgtaatcaccggcgcctcggaaaacgcgcacagcgcctgggtctggcccccggaatggtctatggccgtcgccgtgattgggacagagcggcgccctgcatgatctgcgccgccgccgccgcatgccatcccggcgaggtggtcccggagggtggcgagcgcgatgagctgcggcagcgcggcgaagaagtcggtacgtggccggtgcgtcatggggtcgaatcccatctgtatgagacgcttcttgaggtgcgtgttctcgttgtccgtcctttccgaaaggtgcgtcgcgatcgccgccgctgttccctggtgctgctgcctagcagagtccgtgccgcgcagcccgtgccctgaggccttgctgccatgcccctgcatctccat

SEQ ID NO: 98616 - DNA, 196 bp, Oryza sativa
  unsure (1)..(196): unsure at all n locations
  Clone ID: PAT_MRT4530_96506C.1
nncgccacgccgtccgttgagaagtggtaggataggtggaggccttcggccccaggggaataccaattcctttaaccgtattttacttaattccgggggtcgaaaccggggccggccccctcttttggcttttaaggcccaggtccttgggcccgtcccggccggaaaccatggcaaggggggaggtttgcttggg

SEQ ID NO: 98617 - DNA, 1659 bp, Oryza sativa
  Clone ID: PAT_MRT4530_96507C.1
acatcctggtttgcgctgtgcgcccatccatcctccctcgtctcttactaccttccacgcttccatcccacgtcttctccacttttcttccatccatccatccatccatttgattcaagaaccccaatccaaacccccctcaactcgccccaaaatccctaactcccgaagaaatcgccgagaaatatctctcatcttgccgccggatcgagcccgattccctgcaccgagagagaggtgaggcgatccggatctatctgatctcctcgttcgtcgccattgttgcaagtgaagtgaagtgggagcagggatcatccatggcgggggtgggggtggaggaggaggaggcgttcgagcacacgctgctggtggtgcgggaggtgtcggtgtacaagatcccgccgcggacgacgagcggcgggtacaagtgcggtgagtggctgcagtccgacaggatctggtcggggcggctccgcgtggtgtcgtgcggcgaccgctgcgagatccgcctcgaggacccggcctccggcgacctcttcgccgcctgcttcgtcctcccaggccagcgcgaggccgccgtcgagaccgtgctcgactcctcccgatacttcgtgctccggatcgaggatggcagggggaagcacgccttcgtcgggctcgggttcggcgagcggaacgaggcgttcgacttcaacgtcgcgctgtcggatcacgagaagtacgtcaagagggagcacgagaaggaggcggccgacggcggcgccggcggcggcgaggagaacgacgacgggcagattgacatccacccggcggtcaatcgccggctcaaggaaggtgaaaccatcaggataaatgtaaaaaataagccatcaactggaagtggtatgctttcatcagctggtttatctggaggggccagtgcaaaacccaaggcaagcatgctccttgcgccgccaccgggttcagctgggaagcttcgatctcctcttccacctccaccaaatgaccctgctgccgcaaggatgaattctggctctaatgctggaatcagggctccaaaagaacccgccaagagaaatagcgacgccttttcagatctttctgctatgaagcaaaacctaccgtcatcgacagagtcggcgcaaacaaaaagcacaggtgctggttgggcagcattttgacaatgagtctgccatctgctgttgataaccttttctcaggaaaaggaaaagaaaattgtgtaactgaaaaaaaagaaatcccttggaggaagcctgtatccgctcgaatcacatggtgataatgacttgctagcatccacttggtactcgaaaaaataaaagatttacaggatgatgttgttattcatcgtgcgatgccacatggattcctggagctttggaagtctgaaaaatatgagtatggctttccttgtttgtcatatttgtgttgtcagatttttcgcatatgaaacaagaatcatactgacctcattgtgttgtacccttaaagatttgagaacactgttatgaatgcggcagcttatgtcactgatgccaaattttctgtaaaacacgagcactgcattcttgtctttgtgcattaatcaaaaggttttgagttgtactccaaaaaaaaaaaaaaaaatccactagtaaa

SEQ ID NO: 98618 - DNA, 681 bp, Oryza sativa
  Clone ID: PAT_MRT4530_96508C.1
tcacttcgcttctcttgtcccctcccccatctctgcgatccaaaggcggcggcggcggcgagctcggtggcatggcgatgcggctggcggcggcggcggcgttcgtgcgacgcctcgtgccggcgcgaaatccggtgatctcggcggaggcggaggcggtgacctgcgggcgcggggacaagaagaccaagcgcgggaagcggttcaagggctcctacggcaacgcgcggccgaagcgggagaagaagatcgagcgcatcaaggaccgcgtcgaggtgccccgctccaccccgtggccgctccccttcaagctcatctgagccaaagcccagcgcgagctcccccccgtcggttcgtgaggctacctagggttttcctttccctttttcgatttggtactcttgtccaactcttgcgcctgcgcccacgcttgcgtgggcacgcatcgtttttttagttcctcatattgggctgtgtcagatatgtattgtcgaatcaagctgccatatcgcaacattgtagaatgcagtccatatggacgaaaatatcatcaccatgtttgtttgtccagtgtccttttgctgggtgtcatctggatggtgataatacgcagtttatgataattggaaatggaatttacggttttggattgaaaaaaaaaaaaaaaaaaaaaaaaaaaaa

SEQ ID NO: 98619 - DNA, 896 bp, Oryza sativa
  Clone ID: PAT_MRT4530_96509C.1
aacaacaaagaacggaccaaaactatataaaaaaatggatcagaattctggcttggaatcctcctcgaagaggggtcacttgtgcgcactgtataatcatagtcgatcatctggggaaaggatcgtcacttccattcaaacaaacaattggacgagcaaaaactgtacagaaaaaaaaattacaaaaccacaaaaagtaaagttaaatattgcattctgtatggatcagatttctggcttgaatcctccgaaaagggattacatttgcgcacagtataatcgtagtcgatcatctggggaaaggatcttcacttccattcaaacaaacaaacaaacaaaaaagggtcgcgcaaaaaaacactgcaaaacaaaaatacaaagctgaaattgtgttgagaatagcagatggatcagatttctggcttgaatcctctgaagagggattacatttgcgcacagtataatcatagtcgatcagctggggaaaggatcctcacttccatcaagattatataatatctcaaccaaaacaacaggcgaaaatcagaacaccgcggatgaataactcagaaacagatctagtggatgaactcccagagaaacgaaaccaaatcagatgcaaatcaaatgtagcggtttgatcagaactactggcttagaagccttctccgaagagaagagcttgcaaaaatcgcacagtacaatcatagtcgataatttggggaaaggatcatcacttcaaaactgcatcagatttgcaaccgcgtaaaaccaatctgaaaaccaaacgcaacagatctatctagaaagaagagagaacagaaaagaaactcaaattaagattgaacaaacgcgagaagcgaaaaccacatattaccggtgcgcggacgcgtggg

SEQ ID NO: 98620 - DNA, 2517 bp, Oryza sativa
  Clone ID: PAT_MRT4530_9650C.1
atgaatagaagcgtttgccaccaccttctcacccagtgcaaaaccataagagagctccaaagaatccacgcccaggccctcacacacggcctccaccccaaccagcagtccatctcctgcaaaatcttccggtcctatgccgagtttggccgaccggctgacgcaggcaggttgtttgatgaaatcccccaccctgacattatctccttcaccagcctcatgtcccttcatctcaagttagatcaccactggaaagctatatccgtgttctctcacgccattgcttctggccaccgccctgatggctttgctgctgtcggtgccctctcggcctctggtggattaggggatcagcgtattggtagcgtggtgcatggcctgatttttcggtgtggattggactctgagttggtcgtttgtaatgctttggttgatatgtattgtcgatgtggcaagtttgagcctgcacggactgtatttgatagaatgcttgtaaaagatgaggtcacttggggtagcatgctgtatggttacatgaagtgtgttggtgtggattcagctttgtcattcttttatcagatgcctatgaagagcactgtttcttggacagcactgatcactggtcatgttcaagacaagcagcctatccaagctcttgagctatttggtaagatgcttttggagggccaccgtcctaaccatattacaattgtaggggtgctatcagcttgtgctgatattggtgctttggatcttggacgtgccattcatggatatggaagcaaatctaatgccaccaccaatataattgttacaaatgctctgatggatatgtatgcaaagagtggaagcattgctagtgcattttctgtatttgaagaagttcagatgaaggacgcattcacatggacaactatgatttcaagtttcactgtccagggtaatgggaggaaagctgttgagctcttttgggatatgctaaggtctgggatacttccaaacagtgtgacattcgtctcagttttgtcagcatgcagccatgctgggttaatacaagaaggcagagagttatttgataaaatgcgtgaagtctaccatattgatccccggcttgagcactatggatgcatggttgatctgttaggacggggtggacttctagaagaagcagaagctctgatagatcatatggatgtcgagcctgatattgttatttggaggtcacttcttagtgcatgcctagctcatggcaatgatagattagctgagattgctggaatggaaattataaagagagaacctggggatgatggggtttatgtgcttctttggaacatgaagttcagtataaaggcaaatatgcaaaggcatgtaaaggaaatccatgaggatgaaactgctactaaaagcaaccggcagtttgtttgcaaggaggagggctgtaacaaggttttcaagtatgcttcaaagatgaagaaacatgaagaatcacatgtgaaattggactacgtggaagtagtctgctgtgaaccaggctgcatgaagacattcacaaatgttgaatgtttgagggctcataatcaggcttgccatcaatatgttcagtgtgatatctgtggggaaaaacacctgaagaagaacattaaaaggcacctacgagcccatgaggaggtgccatctactgaaaggataaaatgcagttttgagggctgtgaatgctctttttccaatgcgtcccatgatcaagtaaaacctttcgcatgtcgattcacggggtgtgaaaaggtgtttccatacaagcatgtcagggacaaccatgagaaatccagcgctcatgtatacactcaggcaaacttcacggagatggacgagcagttactctcgtgtccgagaggtggacggaagaggaaagctgtgactgtcgaaactcttacgcgcaagagggtgaccatgcacggcgacgcttcgtcgttggacaatggaactgagtacctgcgctggttgctttctggtgaatccggaagctgcataggccgtagcagggcccatccaaactccatcacgcccacccttgcctggatgcgtcggctagaggaaagctacactacaagcccagccgttgcccacgctggcttgtgggctgacgtcagcacgggggaaagcggcgccgacatgcggggcccaccggtcagcggctcgggagagggaggaaggggcgccggcacgcggggcccaccggtcagcgactcaagggggagggcggttcaccgtggaccaggaccacgcgggtggtccaccgccggtccacggaaccgacggcccagatcgccctcggggccgatcggacgggcggcgatggaggcggccgccgggctcggctcggcatcaaagccgaccggccggccagggctagcggtgacggcacgcggccgacgacggcggcgaccggcggcatgggaggcggtggcggcggccgaaggcgacggcgcgcgacttgaagcggcggcgcggcactag

SEQ ID NO: 98621 - DNA, 459 bp, Oryza sativa
  Clone ID: PAT_MRT4530_96510C.1
gtctcagctggcacacagagattgcttgtctctatgagcattaaatgaccgaatatctgttgtacagcgagttatagaacctagagggtcttatactaccacattacattaaaggtgcatttatagtatatataatccaacggagatggataacaggtttcactttgcaaggctgccctgaatcctaccaacaacagttccatcagtcatgccaagcctcattgaccgaaagtcaaagccaaagtgaaaagttttagtatgaacatcaaaagatccaccgtctattacaaggagatggaattgcattgcctgctggagtagctcataggggctacaatgatcatgaagtgcctgttgctgtcttatatatcactgatctcaacagcgtagctagtaaacttgaccgtagacaaagggatttctagatagctggaactaagagaaaccctaatgcataca

SEQ ID NO: 98622 - DNA, 760 bp, Oryza sativa
  Clone ID: PAT_MRT4530_96511C.1
gccgaattcctccaatcttcttcgccgcctcgcgctctccgtttcactcgcgcacggtgctccgcggggactcgtcgggcggcggccatggaggaggtgacggaggcggtcggcaacctcaccatatccgcgggagaagccgccggggcgggcggcggcgcggcggaggcgcacaagaagaaccgggtgcaggtctccaacaccaagaagccgctcttcttctacgtcaacctcgccaagaggtacatgcagctgcataacgaagtggagctctcggcactcggcatggctattgcaactgtggtgactgttgctgaaattctgaaaaataatggccttgctgtcgagaagacttactccaaaatttgtgcagagattatgacatctactgttgacgtcaaagatgattcgaggagtcgccctatgcagaaagccaagattgaaatagtgctgggcaagacggacaaatttgacgaactgatggcagcagccgcggaagagagggaggccgcggcagcggaggctgaggccgaggagcaaagctaatattagaagccaaaaagcttcctgttgtagctttaattttagtattctgctgctaggtgttgtatttggaactccttgatacatcaagggcttgtgtaatcaattagtggcacagcttatttggtgtgcttttacttgattggttaagttttgatgccaacttatgacagtgaaggtgtatgagtacggtgctcatcttgatttgccccaattt

SEQ ID NO: 98623 - DNA, 3088 bp, Oryza sativa
  Clone ID: PAT_MRT4530_96512C.1
gcgtctagaactagtggatcccccgggctgaacttcactcttatagggtctcaaaaagttgaccaccaaacaaccgcttcttaaaatttaaactcgccaaacaggatctaaacgttggttgcaagcattcatgattcatgattcatctatgggttaattacaacagcggccaaatcacccactgtaaagaccaagaaatcacctggaacagcagcaagaccactcactcactcactcactcaggagtacgtgctactaccatacagctaatttacaccggaagaaaattcccttccattttacacccgacgacgcgaaaaggagaaaaaaaaacgttacgttagcccggcacgcaacgctaccggggagccaccgtgccggaggggatgccgctcttggagttggcgtggccgccgctgccggaggagatgaagagggcccccgtggtcgacgacgacgacagcggcccggtcgccgtcagggaggtggaggtggccgactgatcgccgtactccggcaggagctcctctccctccggcagcgcgctccggatggcgtccagctccctgacgacgtcggccatggacggcctcgcgtcggtctcgtccttgcagcacttgacggccagcgaggccaacctcgccacgcactccggcgagctggaggaggatatccgctcgtcgatcactccggcgatctcgcctgattggtatgccgtgttcacctctctgacaatgttcttgccatgctggattggcttcatcccagtcaatagctctagaagcacgacgccgaggctgtacacgtcgctcttgtctgtcagtttgtgagttaggaagtactctggatcaaggtagcctggggtccccttaacaacggtggagatatgagctggcatggttccatcgacatccggtactggcgcaagccttgaaagaccaaagtctgcgactttcgctacaaatttggagtccaggaggatgttgctggccttaacatcacggtgaaatataggaggatctgcttcggtgtgtagatagaggattccctttgcagcacccagggcaatatgtatcctctggctaaagttcagaggtcttcttgacttggcagaaaggtgatcacgcagagtaccattcggcatgaactcatacaccagcatctgttcatcttcttcatcacaatagccaaccagagaaactaaattacgatgatgtagtcttgatagcaattctatttctgtgcagaactcctttgaaccttgaagagaaccttcgtgtgcccgtttgattgcaacagctgttccatcagttagatttcctttataaacttttccataacccccttgaccaacttgagctgaatcagtaaaatcatttgtcgctgcagccatttcatcaaatgtgaagcatctcacaccatcaaccttgacagaataccttgagagtaatgaccgcctagatgtagttcgacgtttggaacgtcttctcattataaatattgtagtaaacacagacgctgcaatggaagcagtgattgtccctgccaaaataccagctaatgcgcccctctttagacctgatgacgccacagttgggaattcatcttcataggaaccaagcgtgaagttgagaagttcatacggaccaaacacatttgatagagtaatctcccatccagcaagtagatgtctgagccgcacaacctcggacgtattgaataaatttgtattgtttggaaataacttcaaatgcatattcagccttggaccgacctcccatatgtaccgttccatgtatatttggtaatcagccaggaccaacagatgggctaagtttttctgaaagtcttccttatagggacggaaatctgagatccctggactcttcaaccgaaatccaactcccagaggcacagcacagaaacaaggtaggggtgatgatggattgtattcataatttttatccgttgggcaaggagaacagtttatgctaacttgtgatccctgtccagatggagcttcagttacagatgtgggttggcaaagacgagcagctcgagctggagtagagtttgtgcatacagggttcccataaagcagaatagtgacttcttctggaggctcaaatgcagccggaatatttccaagagaattattttggaagtccaaatagccaaattgaggaatgccacttatatctggaatacctccttgcaaattgcaattcctaagactcagctttagaagtgttggtatgttttcgtatgcagcagggatggaacttccgctgaagttattgttatcagcctgaagtatttgtaaactgcgagtctctgctagttctggaggaagaggtccagacaaattgttactgtccacaaggagatggaggagttcaggcaatcttgacaattcagatgggatttgcccacttaatgagttattgttcatgtgaagatgtctcatgcttgttaaattagcaaatgatttaggtatgggtcctgatatttcattttggtctatctgtaatctgttcaagttttggagatagccaatctcatctggtaaagaaccagatagctgattaccgttcaaagttccgtggaaatatgcaaccactattaactgtctgcacatctctctgatagtactgtcaattagcaactgattgggatatttaatagaaaatgttccaataagcctgagtgtgtggatattccctatctctttcggtatgttaccagtcaagttgttccacatgaaatccaatgttttcaattgagatagaagaccgatctctggtgccaaagtcccagaaagattcatcttaaataactgcaattctgttacatgaagataattatttattggtatattgtcacagaagactcctttccaacttgatgtgcatggatctccactattccaattcttaagattattcatcggatcaattaatcttcctttgatagctctgagagcatttacttcagcagggtcagtgctctgtccccttacgacattcacatgacaaatgcacagaacaaccacgatcactgcgcgccgaaaacctctgaagttcgccat

SEQ ID NO: 98624 - DNA, 408 bp, Oryza sativa
  Clone ID: PAT_MRT4530_96513C.1
ttgcttcaaattgaagaagaattggagatttgttgaatcctcgatttgctacttatattgctcttgcgtcgaagggcgcgtctgaagcgagcaagacacggcacgggaccatagcacagctgacatctggggtactgctactgccttcattgtttttctactgtcacgatggggctgatatccaaggaagatccagtcaaggggctctttaacgcctcttcagctgaaagtcttcacattccttcggaacctccaagtgaagacgaactaccccctcctccccctgttgttcatcagcaccaccctccaggaccaaaacggagagtccgtcccatccccactgctttcttccaccttcgcaaggttctgggcaaaaagaaatcccgaagatatcaggatgtcaacgct

SEQ ID NO: 98625 - DNA, 248 bp, Oryza sativa
  Clone ID: PAT_MRT4530_96514C.1
acaagaaggccttccccgacttgtccgttctcgggtggtactccattgggaccaatgtgcacgccaccgacatgggaatccaccatggggactacgccgacatgcaaatccaccagacagaaaaacacaggaatgaccgtttgattgaaatacaggaaaaacgcaggaattggatgagagagatagactcaaaggaaagttaccaggaggttgaaactcttgctaaattttctccaaaatctctatag

SEQ ID NO: 98626 - DNA, 1275 bp, Oryza sativa
  Clone ID: PAT_MRT4530_96515C.1
atggcggcatccctggcttggttgcttgttgctatcgtcctcgcctctctctacctcgccatgcaccaccgagtagccgccgcgcgccgccgccgccttcctccgggaccaacgcctcttccgctcgtcggcaacctcctgtccgtatcgcggagcggcccccaccgctcgctcgcgcgcctcgccgagcgctactgcccgctcatgcgcgtccggctcggcgtcgtcgattacgtcgtcgcctcgtcgccggccgtcgcgggcgatatccaccaccacagccacaacgcgcaccttgcgtcccgcccgctgttcgacgtgtggcggggcgcggagcaccaccgcaactccgtcatcgtcctcccgctgcacggcgtgtggcgcgcgcagcggaggctcgctacggaggaggtcatgtcgcccaggaggctcgacgcgctggcgccgacgcggcgggagaagggcttgcggcgcaggatggggaagctagtagcgcgtgcctatgggatcatcgacgagcttcttgctcggcggaagggtggccgtgaagccggcgagccgcggaaggatgacatgctggacgtggcgctcgataacgaagacgaatggaagaacaacaatcctgtgattgaccgtaataacatcaagggactcatcgcggatttatttgtcgctggaactgactcgggctcaactgcaatagagtgggcaattgttgaattactgcaaaatccacaatcaatgcagaaggtgaaggacgagtttaggagagttttgggtactagaacagagatagaggagtctgacattagccagcttccttacctccaagctgtactaaaagaaacgctccggctccacccaagtgtcccaatgacgtactacaaagcagaggctacagtggaagtgcaaggctatattattcccaaaggcaccaacatcatactgaatatttgggcgatccatcgcaagcctgacgtgtgggctgatcctgataggtttatgccggagagattcatggagacggacaccaatttcttcggcaagcatcccgagttcatcccgtttggtggcggacggcggatctgccttggtttgccactggcgtacaggatggttcatatggttcttgcgtcactgttgtttcacttcgactggaagcttccagaaggagccgagaaagatggtgtggatatgagagagaagtatgggatggtgcttcacaaagagacaccactcaaagccttggctattgaaacgtataatcgcaagtaa

SEQ ID NO: 98627 - DNA, 1616 bp, Oryza sativa
  Clone ID: PAT_MRT4530_96516C.1
gggtggggctcgaaacaacacattttcaacatcaagctgtaccagaaaaaagaaagcagatgtctacaggtccaacaggcagtacaaaaaaggtgatgcatgcatcacgatccgatgcaacagcgccgactgtatcgcctttctaggcatctaagcacatccagatccacatagactgaatggcaactgacaactttcttgtataaatcacacccaactcaaaaagttcttgcagtgaagtcacacactagcacgctccattggcatccatggccgctgctactcaacctcatgtcatggtgctaccgttccctgcacaaggccatgtcatcccactcatggagttatctcataggcttgctgatcaaggcttcaagattgacttcgtaaacactgagttcaaccacgaccgtgtcctcaaggccttggcagagaaaggagcaatccctggtggaattcgcatgctctccattccagatggattggaccctgctgatgaccacacagacatcggcaagttggttcaggtcttaccagacgctatgctcagccccctggagaagatgattagatccgaaaagataaagtgggtaatagtagatgtatccatgagctgggcactagaactggctaccacaatgggtgtccgtattgccttgttctcaacttactccgcagctatctttgcactcaggatgaaccttcctaaactgatagaggatggtattcttgatgaaactgggaatgtaaagaagcatgagatggtccaactgatgccacctattgatgcagccgagatcccttgggtcagccttggcagcacccaagaaagacggagatataacatccaaaatgtctttaagaccaaccgactaatggcacttgctgaaatgatcatctgcaacactttcagggagatagaatccgaagcattggaactcctctcaaatgcactgcctgtcggcccacttttagcacctgcttcggggccaacaggccatttcttgcctgaagacatgacttgcctcacctggctcgacacacaggcccccggctccgttatctatgtggcctttgggagctccaccatctttgacatagctcagttccatgagcttgctaacgggcttgccgtctctgaccaaccatttctgtgggttgtccgacctaactttaccaatggaatccaagaagattggttcaatgaatataaagaccgtatcaagggcaaggggttggttattagctgggctccccagcaacgagtactatcacacccttcaatcgcttgcttcatgtcgcactgtgggtggaactcaacaatggaaggtgtactgcacggtgtcccgttcttatgctggccttatttttccgaccaattctgcaaccagagctacatatgcaatgtgtggaagacaggcattaagcttttccgagacaagcaaggggttgtcacacaggaggagatcaagaacaaggcggcgcagctcctagaagacaaggagatcaaagaaagagcggtgacactgaagaccacggcccgtgcaagcatccaagagggagggtcctcgcaccagaactttctcgagcttgtcaatttgctgagagaacaatga

SEQ ID NO: 98628 - DNA, 374 bp, Oryza sativa
  Clone ID: PAT_MRT4530_96517C.1
tctttgaggcgggttggcttttcctgaacctctttaccttctcctactgggacctgctccggggccggcaccacggctagtggggtgagatggcggcccccgatgtagtgcccctcgggctgtcgtcgcggtctccgctgggccaccgactaccgctccctcgagggctgcttcttcacctacggcgagatcctcctctacaagatcatcaacgacagggagacggcaaggtcacgtgggtttggctatagcaccttctactccgagcaggcgatgcgcaacgccatcgagggcatgaacggcaaggagctctacggtcgcaacatcaccgtcaatgatgcccagtccctccgctccggcggcggaggctgtgg

SEQ ID NO: 98629 - DNA, 142 bp, Oryza sativa
  Clone ID: PAT_MRT4530_96518C.1
taagttctttggagtttcaccaagtcaagctgtcaagctcgagtgggctcgaagctcgctcgagctcgaactcgagctcactcccaagctcgatcaatatccaagctcggctcgagttcatgtcaagctcaagcctacatag

SEQ ID NO: 98630 - DNA, 13422 bp, Oryza sativa
  Clone ID: PAT_MRT4530_96519C.1
atggatcccggcgggatgctgctcgaggacttcgggcagcgggtggacctcacgcggcgcatccgcgaggtgctcgccaactacccggagggcaccaccgcgctgcgggagctcatccagaacgccgacgacgcgggggcgtcccgcgtccgcctctgcctcgaccgccgcgcgcacggcgcaggctcgctgctcgcgcccgccctcgcgcaatggcagggcccggcgttgctcgcctacaacgacgccgtcttcaccgacgaggacttcgccagtatctcccgcatcggggacagcaggaaggtgtcccaggtctggaagaccggccgcttcggggttggttttaactcggtgtaccacttgactgacttgccatcatttgtgagtggcaagtacattgtcctgtttgatccccagggtgcttatcttccgaatgtgtcagctgcaaatcctggaaaacgtatagattttgtcagttcttcagcaattacactatacaacgaccagctttcaccctattgtgcatttggttgtgacatgaaagcaccatttcagggaactttgtttcgctttcctttaaggactgctgagcaagcatctcttagtcggttatcgagacaagtgtacacagaagatgatatcttatctctgtttgctcaactttacgaagaagctgtatataatttacttttccttaaaaatgtgctgtcacttgaaatgtatgtatgggaatctggtatgagtgaaccaaagatagtgtactcttgctccatagggtcacagcatgacaatttgcgctggcatcgacaagcccttgtcaggttttctggcactgctgctgagtcctctgagaaaaagatagattccttttcaatggattttgtatcaaagtcatttttgggtgagaagtttgagaagaagagctatacctattttattgtacagggaatggcatctgcattaagtaaaattggtatttttgcaacaactgctgccaaggattatgatcttcacctactaccttgggcttctgttgctgcttgcatctccaacgtgggacctgaggaagttattctcagacaaggccgcgcattctgttttcttcctttgccagtaaagacaggattatctgtgcatgtgaatggttactttgaagtatcatccaaccgacgtgacatttggtatggagctgatatggacaggggtggtaagcttcgctctgactggaatatgttattgttagaagatgttgttgctcctttgttcagagaactgctgctacagttgcgtacagttttggactccaaaatatcatattattccttatggccaactggtttgtacgaggagccctggagtattctcgtggaacaaatctgtaaatttatttacacctctccagtatttcactcggagatcaaaggtgggacttggataacaccagctgagagtttgcttcatgacgagggattttcaagaagtgatgatctcagtgaggctcttgtgatgttaggcatgcctgtcgttcgtctaccaggtgcgattgctgatatgtttcctaagttccattcgaagtatatgctcaaaatagtaactcctgctacagtgcgacatttcctcaaggattttgaaaatcttggtacattagaaaaatctcagaagctaatattattggaatattgccttgctgatctggacagtggtaatatcggcaaatgcatgaatggcctcccattgattccattagcaaataaacagtttgggattttttctggtatttcacaggagaatcaatattatgtctgtgatagcatagagtatgagcttctttctgctgttagcgatagaataattgaccgaagcattccccctgtaatactagacaagttgtatcagatagccagtagttctcaggttaacatttcacttattgaaggccgaatatttcttcagttctttccctggctatttcctcctggatggaaatgccgaaaccaagttccctgggatccagaatcgggtggatcatctcctacagcagcctggtttaaacttttctggcaatacattggggattgttcatatgaccttgatttgtttagtgattggcctatattaccttctacctcagggcacctttatagagcatctacagtctcaaaattaattaatacaggctcactgtctaatttgatgaaggaactcctgaccaaattaggttgcaagatactagacacaaagtatttgagtacgtgccagcatttgtctaattatgtgtatgatggtgatgcatctggagtactccattcaatctttggggttgcctcattggagggtgttgatttgcaagctttgtttcagcgcatcactcctgctgaaaaaaatgaactatatcagtttgttcttgatgcaaaatggtacttaggaccccacctttctgatatgagcataaatctatgcaaaaagttacccatttttagggtatttgatggagggtctcccagttcttatggtttctcggatttatccacttcaagaaagtatctgccacctcttggtgttgcagagcaattactgaatgatgactttgtcttctgcatatccccaagtgatgaagatataataatgagatattatggtattgagcgcatgccaaaatcaaacttctaccagaggtacgttctgaataggttagatgagttgcaaacagagtttcgtgattcagttctactaaccatcttgcaagatctgcctcagctgtccttggaaaatccaaggtttaaggaagccttgaaggtccttagatttgttcctacgaccaatggggtcttgaaaagtcctcaatctctttatgatcctcgggtggaagagctctatgctcttctccaggaatcagattgttttccccatggcttatttcaaaaccccgaagttcttgatatgttgctctgcttggggctaagaacatctgtatctattgataccataatacaaagtgctcggcacatcgactcactcgtgcacaaagatcaccacaaggcccattcaaggggtaaagtgctcctttcatatctcgaagttcatgctcacaaatggtatgtacataagccatttgatggccgtaagaaggtaaatatgctagctaaagttaccaccgtgctcagatctcgcgatacatcttgggaagctgatcttgaaaaattctggagtgatttgagaatgatttgttggtgtcctgtgttggttactgccccaagtccagctttgccatggccttcagtatcatcaatggttgctccacctaagcaagtaaggatgcaggacgacatgtggattgtttctgctagctcacgcatacttgatggtgaatgcacttcgtcagccttgtcgtatagcttaggttggttgtctcctccatctggaagtgtaattgcagctcaattgcttgagctgggtaaaaacaatgaaattgtgactgatcaagtactccggcaagagttagcgttggtgatgcctaagatttattcgctactgagtaatttgattggatctgatgaaatggatatagtgaaggtggtacttgaaggctgtagatggatatgggtgggggatggatttgcaaaaactgatgaagtagttttaactggacaccttcatctggcaccttacattcgcgtgattccaattgatttagcagtattcaaggacctgttcttagagcttggcataaaggagcaacttgaccctgtagattatgctagtattttgaccagaatggccacaaggaaagcttcgacttcactacaagctgaggaacttagaacagctgtcttggttgtgcagcatctagctgagtttcggtttcaggaccaccaaacacaaatatatcttcctgattcttcagctaggctctgtctgtcttctgaacttgtatttaatgatgccccttggcttcttgattttgatgaggacatcactgggaatgcaccaagcattgctttcaattcgaagaagtatgttcacaattttgtccatggcaacatttctaatgatgtggcggaaaggctaggtgtccgctctctccgccgtctcttgcttgctgagagttcggactcaatgaatttgagtttgtcaggggttgctgaggcttttggacagcatgaagatttgactacacgacttaagcacatcgttgagatgtatgcagatggaccagggattctgtttgagttggtacagaatgcagaagatgctaaggcttctgaggttgtgtttttactggataagacccattatggtacttcatctattctatcacctgaaatggctgaatggcaggggcctgctctctactgcttcaatgactcaatttttagtccccaggatctttatgccatctcacgaattggtcaagacagcaaacttgagaaaccttttgcaataggcaggtttggtcttggcttcaattgtgtatatcacttcacagacattcctgggtttgtttctggtgagaatattgttatgtttgatccgcatgcctcttatctgccaggaatatctccatctcatccaggtctaaggataaaatttgtaggaaggaggatcttagaacagttccctgatcaattcaccccattcttacactttggttgcaacttgcaacagccatttccaggcacactcttccgcttccctcttaggaacgaggctgctgcttctagaagccaaataaagcgagaacaatatacaccccaagatgtggaaatgcttttctcttccttctctgaagttgtatctgaggctttactttttctccgcaacgtaaagaatataactctgtatgtcaaggagagtgacagccaggagatgaaacttgtacatcgtgtctcgaagcataatagttatgagatggccaaagaacctcatgcgcttaatacgatgcttgcatttataaatggaaatcaaccatcaggaatggataggaatcaatttttcaataagttgaataagactaaagatagtgatttaccttggagttctcaaaaggtctctatctttgagcaaagccctgctgcttgcttggtgcattcatggatcttaacagagagtataggtgggggccatgctagaaagttgtcaactgcctctggtagtaagtcccacttctttgttccctgggcatctgttgctgcttatctgcattctgtgactgtggacaatacaaaagaactgtctggtgaagctgaagtcaaccttgatgatttggttctcaagcaactgtctcttggatcctctaaggacaggaaattttttgagggtcgagccttctgctttcttcctttaccaatcaacactagcatgccagtgcatgtgaatgcttattttgaactatcttcaaatcgaagggatatctggataggaaatgacatggctgggggaggaagagtacgatcagaatggaatcttgcactgcttgaagatgttgctgctcctgcttatggtcacctgcttgcagccattgcacaagagcttggtccctccgatctgtttctctcattttggcctactgctgtaggtgtggagccatggtcttccatggtgaggaagctttatgtatctatcgcagaacttggacttcatgttctgtatacaaaagcacgagggggacattgggtgtcaacaaggcaagctatctttcctgatttcagtttttcaaaggccattgaactggcagaagttctttctgaagctggtttgcctgtggtatctgtatccaaacaaatagttgacagtttcttgaacgcatatccttcagttcatctcttgaatcctcatctgctgaggaatttgttgatccgacggaagcgtggcttcagaaatagagaagaagcaatacttgttctggagtactgcttgagtgacatgggagatccttcctttcctgataaattgcaagggttagctcttcttcctttggcaaatggatcattcacaacatttaccaaccggggggagggtgaaagagtattcttttcttcacaaatggaatttgagcttctgaaggactctataccacatcttgttgttgataactctttaccggatgccattttgaagaagttatatgacatagcttgttctgcacggtcaaacatttacttattcacatgcaattttctccttgagttgttgcctaggatcttgccacctgaatggcagcatgctaagcagttattttggtctcctggacatcaaggtcagccaagtgtggaatggatggtgtcactctggaatttcttgcgacattcatgtgaagatctttcaatttttgcaaaatggcctatattaccactggtagatggcaagcttatgcaacttggcaatgcttcaaatgtaataatagatgatgggtggagtgaaaatatgtactcgttgcttcagaaactgggatgtttctttctgagatctgatctgcagatagaacatccgcagctggcaaattttgttcaggaagccactgcagttggtgttttgaatgctgtgcagtctgttgcttctaattttcaggatatcaaggaattgttcatgggtatttcactggcagaaacacatgagctacgcagttttattttccagtcaaagtggttttcaggaaatcacatgaactcttcccatatgaatacaatcaggaatcttcctatatttgaatcctataaatctagagagcttgttagcctgacaagtcctagaaaatggcttaaacctgaaggtgttcatgaggatctgttgaatgaaagttttataagaacagaatcggcaaaggagaagtcaattttggtatcatactttgctattacggaacctcaaaaggctgaattttacaaggaccacgtgcttcctcgaatatccgagtttctatcacaaccagctgttgtttcagcaattctccgtgatgtgaaactattggcagaaaatgatacttctgtgagagctgcattacatgaaacccctttcgtcctggcagcgagtggtgcatgggtacatccctccagactttatgatcctcgtgtgcctgagttacataagttgctgcacaaagaaaccttctttccttcagagaagttcatgacgactgaagtaattgaactgcttgcaagctttggacttaaaagtaaattgggttttagtactttgcttgacattgcgaggtcagtttcactgcaacaagatgatgcgcttgagcatgggaaaaggctacttacctatctaaattttcttgaattcaaggcttcaaacatggaggataaaaaaaccttccatggggatgacaaccaggaagcttctaagactgatggaagttttgaagcagaaaacgatggggatgggtatgacccagaagaaactattttatctttgttctcaaacttcgatcatgatctaccagaagacgaattttggtcagagctgaaaaatatatcttggtgtccagtccatgttgcaccattgctaaaaggacttccatggttcatatctgaagatcatgtggctcctccaatcacaacaaggccaaaatcacaaatgtggcttgtttcatcaaaaatgcggattcttagtgctgattcttgctccatgtatctgcaaagaaaacttggttggttagacccaccaaatgcaaacattttatcttcccagttagttgagatctccaagtcttatgatgaactcaagatgttttctgaagacagtaccaatgatgccgttccgcaaaaggaaattcaactgatctactcaaaattgcaagatattattgacacagccgataccaacattctaaaacggaatctggatggacacccatgggtttatataggtgataggttcgtgccacctcaggcacttgcttttgattcacctgtaaaatatcacccttacctttatgcagttccatctgaactgtcggaatataagaggttactgtcggttttgggtgtgaagcagacatttgatgcagcagattatctgaatgtacttcagtgtttacaaagcgatgccaaaggagagccattgtctacagagcaactaagttttgttcatcgtgttttggaagcatttgttgattgttatcctgataaccaagcacctgatatgatggtgaattcattgttgattcccgattcatttggtgttttgacacctgccagaaatcttgtctacaatgatgcaccctggatgaatgctgatcctacttcaaagagctttgtgcatcttagtattggtaatgatctagctaataggcttggggttcgatctcttcgtggatcatcattactggatgacgagctaatgacggatttgccatgcatggaatatgctaaaataagtgagttgctggctttatatggtgagagtgactttcttttgtttgaccttatagagctagctgatcattgcaatgcgaagaaagtgcaccttatctatgataaacgagatcatccaaagcagtccttgctgcagcagagtttaggtgacttccagggttcttcattgacagtcgtctttgaaggaacgataatgagcagagaagaagtttgcagcctccaacttcctcctccatggaaattgaagggaaacattcttaactatggacttggacttcttagcagttattttgtgtgtgataccttgagtattctttctggtggctatttctacatttttgatcccttgggcttgactggtggcacgacttccattgctacctcatccgctagattcttctcattgataggaaatgacctggtcgagaggtttcatgatcagttcacaccaatgcgtgttacacaggaggcttcactatcttcagcaaattccacagttattcgtatgcctttatcatctaagtgcctgaaagaacttgaagctggttgcaatagagtaaagcatatttttgatcgatttacacaaaatccatccagcactctcctattcttgaggtcaatcattcaggtatctttatcaacatgggaaggtggagcttctcagccaactttgaactactctgtacttgttgacccatcagtagccactttaaggaatccattttcagaaaagaaatggagaaaatttcaactatccagaatatttgcaagtacaagtgctgctattaaaatgcaagctattgatgtgcatgtgattgacaatggctgcaattatattgacaaatggtttgttgccctttgccttggatcagggcaaacacgaaacatggctcttgacaggcggtatctcgcctataacttaacccctgttgctggagtagcggcacacatagctcgaaatggagtatcaaccaatatacatgcatccagttgtatattatctcccttaccactatctgggtctataagcatgccagtcacaactctaggccattttattgtgaggcataatggtgggcggtacatttttggcagctcacatgataaatctctgtcagaccttgaaatgcataaaaacaaattggttgaggcatggaataaggaacttatgctatgtgtgcgtgattcatatgttgagatggtcctggaatttcaaaagcttaggaaggatcctctgtcttctgctattgaatcaagatcgaagcagcatcctgcttcactcactgggtatggctctactgtaactaatgtgaattcaccaagagcatctaaagcagattggcaatccttggtagagcaagtgataagacctttctatgtacgcttggctgatcttcctgtttggcaactttatggtgggaatcttgttaaagtggatgtgggtatgttcttatcccattcagggagtggagatgatgataatctgccatctgctagtgtctgtagtttcattaaagagcactaccctgtattttctgtaccctgggagctggttagggaaattcaagcagttggagttaatgtaagagagatcaggcccaagatggttagggatctactaaaagcttcttcatccattttactccgatctattgaaacatatatggatgttcttgaatattgcttctcagatatggacccataccgtttctcagattttcatatacatgaggaatcacgagttagcaatcaacaatctgaaataatgaattcttcaatatcaaattctatgccatcttcaagcagctctgtgtcttaccatagaaatacacaaaggcagggtgcttctgggggcgacgcgcttgaaattgtgacatactttggaaaagctctctatgactttggtcggggggttgttgaggatatcagcaagactggtggctcagcatcccataggacccaagctgctgaaaataatgtgctgtcatctatcatcacagagctcaaaggagtcccgtttccgacatcgacaaaatgtctaacaaggctgggatctaccgaactttggatagcaagtgaggagcagcagctattgatgcgcccattcttgcatcactttatccatcatcaatgtttacaaaagcccttcttggagctattgctcaccactcaagttattcatagacctctaaagctaagaagtttttctcctcacttgttgtcaggccatttgaagcacatatttgatgaacgttgggtgcaccttgcagtagagaagaagtctccatggattccttgggataataatgctaattcatcaactgctggaccaagtcctgaatggattaggctcttctggaaaatatttagttcaatgagtggtgacctttcacttttatctgactggcccttaattccagcatatctagacagacctgttctctgccgtgtgaaagaatgccatctaatatttgtaccaccagcagatgattcaaatcctgatagtggagatagtgcagctagagtagttgacacgtctgcccacccaggagatgagactggagaagctgaactgaacagcatacttgatactgcatttcagtcaatgaactcagcatttccatggttacctgctctgctttacaagttgaatataccagtttttgatttatcttttccagagtgtggtacaatatgcaatttgtttccttcacgtgaccggactcttggacaaattattgcttctaaactggttgcaataaaaaatggtggccatttacctttgccacttagtctatcaagtgaagactgtgataaactgtttgcattgtttgtctcagagttcagattgtccagtaaccacttatatcagagagaagaattggatgtcctgagagagcttccaatgtataaaacagttacaggaacatacactagtctgtcagggtccgatcattgcattctttctcccacagcattctttcaccctgctgattctcggtgcctttctagtacagctaatgcagatctatttcttcaggctttgggggttgaacaattgagtgaccaagaaatactagtaagagttgttcaaaccagggaattacttgacccttcagatgctttgcttacttcagtattctctggggagagacacaagttcccagctgaaaggttcttgtcagatggttggcttgttatactcagaaaagcaggtcttcgaacatctacagaggctgatatgatagtacagtgtgcaacaaaaatagagtccatgggaaatgatattgtgtcatcttcagaagatcctagtgactttgaggcagacttttcaggcagcaaaaacgaaattccttttgagctttggtctttggcagaatctgttgttaatgtgattcttgctaattttgctactttgtatgacagttctttttgcgaaaatattggcaaaatcgcatttattcctgccgaaaaaggttttccaagtattggtgggaagagagggggtagaagggtacttgcctcatatagtgaatcaattttatcaaaagactggccattagcatggagttctgctcctattcttaccaatcaagcaattatccctcctgaatattcttggggagcatttcgactaaggagtcctcctgccttcacaacagttctgaagcacttgcagagtgttgggagaggcaatggtgaggacacactggcacactggccaacttcatcaggaataatgacggtggaagatgcctttctacggatcttgcaatacttggataaaatatggggaacaatatcttcttcagagaaaaatgagttgcagaccctggcttttataccagttgcaaacgggactcgcttagtcacagtgaaatcactttttgctcgtctgacaatcaacatgtcgccttttgcttttgaacttccaagtctttatcttccatttgtcaccatcctcagagaaattgggatgcaggaaacccttacaaacacttatgcaagggaacttcttttggatatacaaaaagcatgtggttaccaacgcctgaatccaaatgaactccgcgctgtgatggaaattttagacttcatgtgttctggtgtcaaccaagccacagatggatcagaagacatatttgattcagtaataccggacgatggttgcaggctggtatcagctgtatcgtgtgtatatattgacccatatggttctcatttactgagtaacatagatacatccaggataagatttgctcacccagatcttccccagaatatttgcaacacgttgggcataaagaagctttctgatgtcattgtagaggaactggatggaaaagaagaactaaagatggtgaatagcatttgctctgttactctggacaaaataaaagagaagctgcttagtaaatcgttgcaagatgcgttaaggattgttatgattggtgtatccaatcattttccttcatttgaagcactcaatctggcgcagatagaaagtgtactaaaggatatatcacagaacctgcagtttgttcagcgtctccatactcgctttctattactccccatgctccaagacgttacaagaagcagccagcgtcctccatttcctgaatggtcaagcaatggaaagcacagaagtgtttgctttgtgaacaaatccacgggtcaaattctagttgcagagcccccaaactttttgacaatacacgatgctattgctattgttgttagttacagattaggggcacccgtgatcttgccgattgcttcagtatttgcatgcccagatggcacagagaaagaggtgcttaaaatactccgtctgggcactgacattggagtttcaaaacgtgaaggaaggtacaatggttccctgggagcagagttgttgtcccaagatgctcgccaggttcaattccttcctttaagaccattctatagtggagaaatcgtggcatggaagacggggaaagagggtgaaaatggtgatctagaggatcccataagatataatctcacttacagtatatga

SEQ ID NO: 98631 - DNA, 273 bp, Oryza sativa
  Clone ID: PAT_MRT4530_9651C.1
attttttttctcccctaggtttgttcatctacaaggtgggaaaatgcacacaatattatgcatcaaagatatatggaacatcacttattgcctatactttaggttttgtttggcctaagacaccaaggtaaaattgcacaataatttgttttcgtagtttcagggtattggatgacacgacataaagagatgtaatttcttttaccctagcgttgttcatctacaagctggaaaaatgcacacaaatattatgcattaaaaaaaaaaaaaaaa

SEQ ID NO: 98632 - DNA, 2896 bp, Oryza sativa
  Clone ID: PAT_MRT4530_96520C.1
atggatcccggcgggatgctgctcgaggacttcgggcagcgggtggacctcacgcggcgcatccgcgaggtgctcgccaactacccggagggcaccaccgcgctgcgggagctcatccagaacgccgacgacgcgggggcgtcccgcgtccgcctctgcctcgaccgccgcgcgcacggcgcaggctcgctgctcgcgcccgccctcgcgcaatggcagggcccggcgttgctcgcctacaacgacgccgtcttcaccgacgaggacttcgccagtatctcccgcatcggggacagcaggaaggtgtcccaggtctggaagaccggccgcttcggggttggttttaactcggtgtaccacttgactgacttgccatcatttgtgagtggcaagtacattgtcctgtttgatccccagggtgcttatcttccgaatggaatggcatctgcattaagtaaaattggtatttttgcaacaactgctgccaaggattatgatcttcacctactaccttgggcttctgttgctgcttgcatctccaacgtgggacctgaggagaatcaatattatgtctgtgatagcatagagtatgagcttctttctgctgccgaacatttcttcagttctttccctggctatttcctcctggatggaaatgccgaaaccaagttccctgggatccagaatcgggtggatcatctcctacagcagcctgagcaattactgaatgatgactttgtcttctgcatatccccaagtgatgaagatataataatgagatattatggtattgagcgcatgccaaaatcaaacttctaccagaggtacgttctgaataggttagatgagttgcaaacagagtttcgtgattcagttctactaaccatcttgcaagatctgcctcagctgtccttggaaaatccaaggtttaaggaagccttgaaggtccttagatttgttcctacgaccaatggggtcttgaaaagtcctcaatctctttatgatcctcgggaccaccaaacacaaatatatcttcctgattcttcagctaggctctgtctgtcttctgaacttgtatttaatgatgccccttggcttcttgattttgatgaggacatcactgggaatgcaccaagcattgctttcaattcgaagaagtatgttcacaattttgtccatggcaacatttctaatgatgtggcggaaaggctaggtgtccgctctctccgccgtctcttgcttgctgagagttcggactcaatgaatttgagtttgtcaggggttgctgaggcttttggacagcatgaagatttgactacacgacttaagcacatcgttgagatgtatgcagatggaccagggattctgtttgagttggtacagaatgcagaagatgctaaggcttctgaggttgtgtttttactggataagacccattatggtacttcatctattctatcacctgaaatggctgaatggcaggggcctgctctctactgcttcaatgactcaatttttagtccccaggatctttatgccatctcacgaattggtcaagacagcaaacttgagaaaccttttgcaataggcaggtttggtcttggcttcaattgtgtatatcacttcacagacattcctgggtttgtttctggtgagaatattgttatgtttgatccgcatgcctcttatctgccaggaatatctccatctcatccaggtctaaggataaaatttgtaggaaggaggatcttagaacagttccctgatcaattcaccccattcttacactttggttgcaacttgcaacagccatttccaggcacactcttccgcttccctcttaggaacgaggctgctgcttctagaagccaaataaagcgagaacaatatacaccccaagatgtggaaatgcttttctcttccttctctgaagttgtatctgaggctctactttttctccgcaacgtaaagaatataactctgtatgtcaaggagagtgacagccaggagatgaaacttgtacatcgtgtctcgaagcataatagttatgagatggccaaagaacctcatgcgcttaatacgatgcttgcatttataaatggaaatcaaccatcaggaatggataggaatcaatttttcaataagttgaataagactaaagatagtgatttaccttggagttctcaaaaggtctctatctttgagcaaagccctgctgcttgcttggtgcattcatggatcttaacagagagtataggtgggggccatgctagaaagttgtcaactgcctctggtagtaagtcccacttctttgttccctgggcatctgttgctgcttatctgcattctgtgactgtggacaatacaaaagaactgtctggtgaagctgaagtcaaccttgatgatttggttctcaagcaactgtctcttggatcctctaaggacaggaaattttttgagggtcgagccttctgctttcttcctttaccaatcaacactagcatgccagtgcatgtgaatgcttattttgaactatcttcaaatcgaagggatatctggataggaaatgacatggctgggggaggaagagtacgatcagaatggaatcttgcactgcttgaagatgttgctgctcctgcttatggtcacctgcttgcagccattgcacaagagcttggtccctccgatctgtttctctcattttggcctactgctgtaggtgtggagccatggtcttccatggtgaggaagctttatgtatctatcgcagaacttggacttcatgttctgtatacaaaagcacgagggggacattgggtgtcaacaaggcaagctatctttcctgatttcagtttttcaaaggccattgaactggcagaagttctttctgaagctg

SEQ ID NO: 98633 - DNA, 14410 bp, Oryza sativa
  Clone ID: PAT_MRT4530_96521C.1
tttttgcatcgcctcaaactggaaccgaatacttcgattttccaaagaatcggcacagtaaaatgcaccgtagctgtacatggactataatgtatatttacaccctcgatttacagccctatagttttacagctaaaaaactaacgtgtctaatattatacatactaatagaaagcgaaagttgtagaaagagaaattaaggcctgaatattttcatcatcctagatacttgcgtccgacaaaatgggcatcgtgaaaccgaacttgagcatcgattacaaagaacatgaccgcatggtattatagtcatgttgacctccgcattcaggcagacacgacatgaccatgctgacttggcaacatcagcttctctaactgctgcctccgctttctcctgctccacgagtagagccacttgagattctttaagctggtcttgcaaggaaagagtagtctgtagaagcgtttcctttgtagcatccatccttacccctgcagctgaaagcatatcgtggactgcctgtaccagctcggttgaagataccttcccatattcaaggccagtagccacatcatctgcagcttcagttcctgtgttgatgggtgagaagccctgctgtccacctgcagctctaccactatccagttgcaatggtgcaggagagagatcagccattgaaacgcttttaaatgagtaaacctgactggaaagtagcatgcaagtttcaccagcagaagtctccactggaaacctgtaaagagcttggccagctgatggccttacatcttcagggaccctgccatatctgagcttttcaccctctttccccgtcttccatgccacaatttctccactatagaatggtcttaaaggaaggaattgaacctggcgagcatcttgggacaacaactctgctcccagggaaccattgtaccttccttcacgttttgaaactccaatgtcagtgcccagacggagtattttaagcacctctttctctgtgccatctgggcatgcaaatactgaagcaatcggcaagatcacgggtgcccctaatctgtaactaacaacaatagcaatagcatcgtgtattgtcaaaaagtttgggggctctgcaactagaatttgacccgtggatttgttcacaaagcaaacacttctgtgctttccattgcttgaccattcaggaaatggaggacgctggctgcttcttgtaacgtcttggagcatggggagtaatagaaagcgagtatggagacgctgaacaaactgcaggttctgtgatatatcctttagtacactttctatctgcgccagattgagtgcttcaaatgaaggaaaatgattggatacaccaatcataacaatccttaacgcatcttgcaacgatttactaagcagcttctcttttattttgtccagagtaacagagcaaatgctattcaccatctttagttcttcttttccatccagttcctctacaatgacatcagaaagcttctttatgcccaacgtgttgcaaatattctggggaagatctgggtgagcaaatcttatcctggatgtatctatgttactcagtaaatgagaaccatatgggtcaatatatacacacgatacagctgataccagcctgcaaccatcgtccggtattactgaatcaaatatgtcttctgatccatctgtggcttggttgacaccagaacacatgaagtctaaaatttccatcacagcgcggagttcatttggattcaggcgttggtaaccacatgctttttgtatatccaaaagaagttcccttgcataagtgtttgtaagggtttcctgcatcccaatttctctgaggatggtgacaaatggaagataaagacttggaagttcaaaagcaaaaggcgacatgttgattgtcagacgagcaaaaagtgatttcactgtgactaagcgagtcccgtttgcaactggtataaaagccagggtctgcaactcatttttctctgaagaagatattgttccccatattttatccaagtattgcaagatccgtagaaaggcatcttccaccgtcattattcctgatgaagttggccagtgtgccagtgtgtcctcaccattgcctctcccaacactctgcaagtgcttcagaactgttgtgaaggcaggaggactccttagtcgaaatgctccccaagaatattcaggagggataattgcttgattggtaagaataggagcagaactccatgctaatggccagtcttttgataaaattgattcactatatgaggcaagtacccttctaccccctctcttcccaccaatacttggaaaacctttttcggcaggaataaatgcgattttgccaatcttttcgcaaaaagaactgtcatacaaagtagcaaaattagcaagaatcacattaacaacagattctgccaaagaccaaagctcaaaaggaatttcgtttttgctgcctgaaaagtctgcctcaaagtcactaggatcttctgaagatgacacaatatcatttcccatggactctatttttgttgcacactgtactatcatatcagcctctgtagatgttcgaagacctgcttttctgagtataacaagccaaccatctgacaagaacctttcagctgggaacttgtgtctctccccagagaatactgaagtaagcaaagcatctgaagggtcaagtaattcccttggtttgaacaactctgtacaaaactcatttgcacttgtcagaaaattagtctctttcaaggtgtttacaacagaagagttcagctgcagatctttccagttagaatacaagtaggctagaatgtcttcttgctcttgagctgatttatttccaaagccaggcaaagcaaaccttactagtatttcttggtcactcaattgttcaacccccaaagcctgaagaaatagatctgcattagctgtactagaaaggcaccgagaatcagcagggtgaaagaatgctgtgggagaaagaatgcaatgatcggaccctgacagactagtgtatgttcctgtaactgttttatacattggaagctctctcaggacatccaattcttctctctgatataagtggttactggacaatctgaactctgagacaaacaatgcaaacagtttatcacagtcttcacttgatagactaagtggcaaaggtaaatggccaccattttttattgcaaccagtttagaagcaataatttgtccaagagtccggtcacgtgaaggaaacaaattgcatattgtaccacactctggaaaagataaatcaaaaactggtatattcaacttgtaaagcagagcaggtaaccatggaaatgctgagttcattgactgaaatgcagtatcaagtatgctgttctgttcagcttctccagtctcatctcctgggtgggcagacgtgtcaactactctagctgcactatctccactatcaggatttgaatcatctgctggtggtacaaatattagatggcattctttcacacggcagagaacaggtctgtctagatatgctggaattaagggccagtcagataaaagtgaaaggtcaccactcattgaactaaatattttccagaagagcctaatccattcaggacttggtccagcagttgatgaattagcattattatcccaaggaatccatggagacttcttctctactgcaaggtgcacccaacgttcatcaaatatgtgcttcaaatggcctgacaacaagtgaggagaaaaacttcttagctttagaggtctatgaataacttgagtggtgagcaatagctccaagaagggcttttgtaaacattgatgatggataaagtgatgcaagaatgggcgcatcaatagctgctgctcctcacttgctatccaaagttcggtagatcccagccttgttagacattttgtcgatgtcggaaacgggactcctttgagctctgtgatgatagatgacagcacattattttcagcagcttgggtcctatgggatgctgagccaccagtcttgctgatatcctcgacaaccccccgaccaaagtcatagagagcttttccaaagtatgtcacaatttcaagcgcgtcacccccagaagcaccctgcctttgtgtatttctatggtaagacacagagctgcttgaagatggcatagaatttgatattgaagaattcattatttcagattgttgattgctaactcgtgattcctcatgtatatgaagatctgagaaacggtatgggtccatatctgagaagcaatattcaagaacatccatatatgtttcaatagatcggagtaaaatggatgaagaagcttttagtagatccctaaccatcttgggcctgatctctcttacattaactccaactgcttgaatttccctaaccagctcccagggtacagaaaatacagggtagtgctctttaatgaaactacagacactagcagatggcagattatcatcatctccactccctgaatgggataagaacataccctcatccactttaacaagattcccaccataaagttgccaaacaggaagatcagccaagcgtacatagaaaggtcttatcacttgctctaccaaggattgccaatctgctttagatgctcttggtgaattcacattagttacagtagagccatacccagtgagtgaagcaggatgctgcttcgatctgggccagaaagagtacaccctatcaccataagcctgtaaaattgtactcaccgagtgtgcagaccttgattcaatagcagaagacagaggatccttcctaagcttttgaaattccaggaccatctcaacatatgaatcacgcacacatagcataagttccttattccatgcctcaaccaatttgtttttatgcatttcaaggtctgacagagatttatcatgtgagctgccaaaaatgtaccgcccaccattatgcctcacaataaaatggcctagagttgtgactggcatgcttatagacccagatagtggtaagggagataatatgcaactggatgcatgtatattggttgatactccatttcgagctatgtgtgccgctactccagcaacaggggttaagttataggcgagataccgcctgtcaagagccatgtttcgtgtttgccctgatccaaggcaaagggcaacaaaccatttgtcaatataattgcagccattgtcaatcacatgcacatcaatagcttgcattttaatagcagcacttgtacttgcaaatattctggatagttgaaattttctccatttcttttctgaaaatggattccttaaagtggctactgatgggtcaacaagtacagagtagttcaaagttggctgagaagctccaccttcccatgttgataaagatacctgaatgattgacctcaagaataggagagtgctggatggattttgtgtaaatcgatcaaaaatatgctttactctattgcaaccagcttcaagttctttcaggcactttgatgataaaggcatacgaataactgtggagtttgctgaagatagtgaagcctcctgtgtaacacgcattggtgtgaactgatcatgaaacctctcgaccaggtcatttcctatcaatgagaagaatctagcggatgaggtagcagtggaagtcgtgccaccagtcaagcccaagggatcaaaaatgtagaaatagccaccagaaagaatactcaaggtatcgcacacaaaataactgctaagaagtccaagtccatagttaagaatgtttcccttcaatttccatggaggaggaagttggaggctgcaaacttcttctctgctcattatcgttccttcaaagacgactgtcaatgaagaaccctggaagtcacctaaactctgctgcagcaaggactgctttggatgatctcgtttatcatagataaggtgcactttcttcgcattgcaatgatcagctagctctataaggtcaaacaaaagaaagtcactctcaccatataaagccagcaactcacttattttagcatattccatgcaaggcaaatccgtcattagctcgttatccagtaatgatgatccacgaagagatcgaaccccaagcctattagctagatcattaccaatactaagatgcacaaagctctttgaagtaggatcagcattcatccagggtgcatcattgtagacaagatttctggcaggtgtcaaaacaccaaatgaatcgggaatcaacaatgaattcaccatcatatcaggtgcttggttatcaggataacaatcaacaaatgcttccaaaacacgatgaacaaaacttagttgctctgtagacaatggctctcctttggcatcgctttgtaaacactgaagtacattcagataatctgctgcatcaaatgtctgcttcacacccaaaaccgacagtaacctcttatattccgacagttcagatggaactgcataaaggtaagggtgatattttacaggtgaatcaaaagcaagtgcctgaggtggcacgaacctatcacctatataaacccatgggtgtccatccagattccgttttagaatgttggtatcggctgtgtcaataatatcttgcaattttgagtagatcagttgaatttccttttgcggaacagcatcattggtactgtcttcagaaaacatcttgagttcatcataagacttggagatctcaactaactgggaagataaaatgtttgcatttggtgggtctaaccaaccaagttttctttgcagatacatggagcaagaatcagcactaagaatccgcatttttgatgaaacaagccacatttgtgattttggccttgttgtgattggaggagccacatgatcttcagatatgaaccatggaagtccttttagcaatggtgcaacatggactggacaccaagatatatttttcagctctgaccaaaattcgtcttctggtagatcatgatcgaagtttgagaacaaagataaaatagtttcttctggatcatacccatccccatcgttttctgcttcaaaacttccatcagtcttagaagcttcctgattgtcatccccatggaaggtttttttatcctccatgtttgaagccttgaattcaagaaaatttagataggtaagtagccttttcccatgctcaagcgcatcatcttgttgcagtgaaactgacctcgcaatgtcaagcaaagtactaaaacccaatttacttttaagtccaaagcttgcaagcagttcaattacttcagtcgtcatgaacttctctgaaggaaagaaggtttctttgtgcagcaacttatgtaactcaggcacacgaggatcataaagtctggagggatgtacccatgcaccactcgctgccaggacgaaaggggtttcatgtaatgcagctctcacagaagtatcattttctgccaatagtttcacatcacggagaattgctgaaacaacagctggttgtgatagaaactcggatattcgaggaagcacgtggtccttgtaaaattcagccttttgaggttccctaatagcaaagtatgataccaaaattgacttctcctttgccgattctgttcttataaaactttcattcaacagatcctcatgaacaccttcaggtttaagccattttctaggacttgtcaggctaacaagctctctagatttataggattcaaatataggaagattcctgattgtattcatatgggaagagttcatgtgatttcctgaaaaccactttgactggaaaataaaactgcgtagctcatgtgtttctgccagtgaaatacccatgaacaattccttgatatcctgaaaattagaagcaacagactgcacagcattcaaaacaccaactgcagtggcttcctgaacaaaatttgccagctgcggatgttctatctgcagatcagatctcagaaagaaacatcccagtttctgaagcaacgagtacatattttcactccacccatcatctattattacatttgaagcattgccaagttgcataagcttgccatctaccagtggtaatataggccattttgcaaaaattgaaagatcttcacatgaatgtcgcaagaaattccagagtgacaccatccattccacacttggctgaccttgatgtccaggagaccaaaataactgcttagcatgctgccattcaggtggcaagatcctaggcaacaactcaaggagaaaattgcatgtgaataagtaaatgtttgaccgtgcagaacaagctatgtcatataacttcttcaaaatggcatccggtaaagagttatcaacaacaagatgtggtatagagtccttcagaagctcaaattccatttgtgaagaaaagaatactctttcaccctccccccggttggtaaatgttgtgaatgatccatttgccaaaggaagaagagctaacccttgcaatttatcaggaaaggaaggatctcccatgtcactcaagcagtactccagaacaagtattgcttcttctctatttctgaagccacgcttccgtcggatcaacaaattcctcagcagatgaggattcaagagatgaactgaaggatatacgttcaagaaactgtcaactatttgtttggatacagataccacaggcaaaccagcttcagaaagaacttctgccagttcaatggcctttgaaaaactgaaatcaggaaagatagcttgccttgttgacacccaatgtccccctcgtgcttttgtatacagaacatgaagtccaagttctgcgatagatacataaagcttcctcaccatggaagaccatggctccacacctacagcagtaggccaaaatgagagaaacagatcggagggaccaagctcttgtgcaatggctgcaagcaggtgaccataagcaggagcagcaacatcttcaagcagtgcaagattccattctgatcgtactcttcctcccccagccatgtcatttcctatccagatatcccttcgatttgaagatagttcaaaataagcattcacatgcactggcatgctagtgttgattggtaaaggaagaaagcagaaggctcgaccctcaaaaaatttcctgtccttagaggatccaagagacagttgcttgagaaccaaatcatcaaggttgacttcagcttcaccagacagttcttttgtattgtccacagtcacagaatgcagataagcagcaacagatgcccagggaacaaagaagtgggacttactaccagaggcagttgacaactttctagcatggcccccacctatactctctgttaagatccatgaatgcaccaagcaagcagcagggctttgctcaaagatagagaccttttgagaactccaaggtaaatcactatctttagtcttattcaacttattgaaaaattgattcctatccattcctgatggttgatttccatttataaatgcaagcatcgtattaagcgcatgaggttctttggccatctcataactattatgcttcgagacacgatgtacaagtttcatctcctggctgtcactctccttgacatacagagttatattctttacgttgcggagaaaaagtagagcctcagatacaacttcagagaaggaagagaaaagcatttccacatcttggggtgtatattgttctcgctttatttggcttctagaagcagcagcctcgttcctaagagggaagcggaagagtgtgcctggaaatggctgttgcaagttgcaaccaaagtgtaagaatggggtgaattgatcagggaactgttctaagatcctccttcctacaaattttatccttagacctggatgagatggagatattcctggcagataagaggcatgcggatcaaacataacaatattctcaccagaaacaaacccaggaatgtctgtgaagtgatatacacaattgaagccaagaccaaacctgcctattgcaaaaggtttctcaagtttgctgtcttgaccaattcgtgagatggcataaagatcctggggactaaaaattgagtcattgaagcagtagagagcaggcccctgccattcagccatttcaggtgatagaatagatgaagtaccataatgggtcttatccagtaaaaacacaacctcagaagccttagcatcttctgcattctgtaccaactcaaacagaatccctggtccatctgcatacatctcaacgatgtgcttaagtcgtgtagtcaaatcttcatgctgtccaaaagcctcagcaacccctgacaaactcaaattcattgagtccgaactctcagcaagcaagagacggcggagagagcggacacctagcctttccgccacatcattagaaatgttgccatggacaaaattgtgaacatacttcttcgaattgaaagcaatgcttggtgcattcccagtgatgtcctcatcaaaatcaagaagccaaggggcatcattaaatacaagttcagaagacagacagagcctagctgaagaatcaggaagatatatttgtgtttggtggtcctgaaaccgaaactcagctagatgctgcacaaccaagacagctgttctaagttcctcagcttgtagtgaagtcgaagctttccttgtggccattctggtcaaaatactagcataatctacagggtcaagttgctcctttatgccaagctctaagaacaggtccttgaatactgctaaatcaattggaatcacgcgaatgtaaggtgccagatgaaggtgtccagttaaaactacttcatcagtttttgcaaatccatcccccacccatatccatctacagccttcaagtaccaccttcactatatccatttcatcagatccaatcaaattactcagtagcgaataaatcttaggcatcaccaacgctaactcttgccggagtacttgatcagtcacaatttcattgtttttacccagctcaagcaattgagctgcaattacacttccagatggaggagacaaccaacctaagctatatgacaaggctgacgaagtgcattcaccatcaagtatgcgtgagctagcagaaacaatccacatgtcgtcctgcatccttacttgcttaggtggagcaaccattgatgatactgaaggccatggcaaagctggacttggggcagtaaccaacacaggacaccaacaaatcattctcaaatcactccagaatttttcaagatcagcttcccaagatgtatcgcgagatctgagcacggtggtaactttagctagcatatttaccttcttacggccatcaaatggcttatgtacataccatttgtgagcatgaacttcgagataagaaaggagcactttaccccttgaatgggccttgtggtgatctttgtgcacgagtgagtcgatgtgccgagcactttgtattatggtatcaatagatacagatgttcttagccccaagcagagcaacatatcaagaacttcggggttttgaaataagccatggggaaaacaatctgattcctggagaagagcatagagctcttccacccgaggatcataaagagattgaggacttttcaagaccccattggtcgtaggaacaaatctaaggaccttcaaggcttccttaaaccttggattttccaaggacagctgaggcagatcttgcaagatggttagtagaactgaatcacgaaactctgtttgcaactcatctaacctattcagaacgtacctctggtagaagtttgattttggcatgcgctcaataccataatatctcattattatatcttcatcacttggggatatgcagaagacaaagtcatcattcagtaattgctctgcaacaccaagaggtggcagatactttcttgaagtggataaatccgagaaaccataagaactgggagaccctccatcaaataccctaaaaatgggtaactttttgcatagatttatgctcatatcagaaaggtggggtcctaagtaccattttgcatcaagaacaaactgatatagttcatttttttcagcaggagtgatgcgctgaaacaaagcttgcaaatcaacaccctccaatgaggcaaccccaaagattgaatggagtactccagatgcatcaccatcatacacataattagacaaatgctggcacgtactcaaatactttgtgtctagtatcttgcaacctaatttggtcaggagttccttcatcaaattagacagtgagcctgtattaattaattttgagactgtagatgctctataaaggtgccctgaggtagaaggtaatataggccaatcactaaacaaatcaaggtcatatgaacaatccccaatgtattgccagaaaagtttaaaccaggctgctgtaggagatgatccacccgattctggatcccagggaacttggtttcggcatttccatccaggaggaaatagccagggaaagaactgaagaaatgttcggccttcaataagtgaaatgttaacctgagaactactggctatctgatacaacttgtctagtattacagggggaatgcttcggtcaattattctatcgctaacagcagaaagaagctcatactctatgctatcacagacataatattgattctcctgtgaaataccagaaaaaatcccaaactgtttatttgctaatggaatcaatgggaggccattcatgcatttgccgatattaccactgtccagatcagcaaggcaatattccaataatattagcttctgagatttttctaatgtaccaagattttcaaaatccttgaggaaatgtcgcactgtagcaggagttactattttgagcatatacttcgaatggaacttaggaaacatatcagcaatcgcacctggtagacgaacgacaggcatgcctaacatcacaagagcctcactgagatcatcacttcttgaaaatccctcgtcatgaagcaaactctcagctggtgttatccaagtcccacctttgatctccgagtgaaatactggagaggtgtaaataaatttacagatttgttccacgagaatactccagggctcctcgtacaaaccagttggccataaggaataatatgatattttggagtccaaaactgtacgcaactgtagcagcagttctctgaacaaaggagcaacaacatcttctaacaataacatattccagtcagagcgaagcttaccacccctgtccatatcagctccataccaaatgtcacgtcggttggatgatacttcaaagtaaccattcacatgcacagataatcctgtctttactggcaaaggaagaaaacagaatgcgcggccttgtctgagaataacttcctcaggtcccacgttggagatgcaagcagcaacagaagcccaaggtagtaggtgaagatcataatccttggcagcagttgttgcaaaaataccaattttacttaatgcagatgccattccctgtacaataaaataggtatagctcttcttctcaaacttctcacccaaaaatgactttgatacaaaatccattgaaaaggaatctatcttttgctcagaggactcagcagcagtgccagaaaacctgacaagggcttgtcgatgccagcgcaaattgtcatgctgtgaccctatggagcaagagtacactatctttggttcactcataccagattcccatacatacatttcaagtgacagcacatttttaaggaaaagtaaattatatacagcttcttcgtaaagttgagcaaacagagataagatatcatcttctgtgtacacttgtctcgataaccgactaagagatgcttgctcagcagtccttaaaggaaagcgaaacaaagttccctgaaatggtgctttcatgtcacaaccaaatgcacgatagggtgaaagctggtcgttgtacagtgtaattgctgaagaactgacaaaatctatacgttttccaggatttgcagctgacacattcggaagataagcaccctggggatcaaacaggacaatgtacttgccactcacaaatgatggcaagtcagtcaagtggtacaccgagttaaaaccaaccccgaagcggccggtcttccagacctgggacaccttcctgctgtccccgatgcgggagatactggcgaagtcctcgtcggtgaagacggcgtcgttgtaggcgagcaacgccgggccctgccattgcgcgagggcgggcgcgagcagcgagcctgcgccgtgcgcgcggcggtcgaggcagaggcggacgcgggacgcccccgcgtcgtcggcgttctggatgagctcccgcagcgcggtggtgccctccgggtagttggcgagcacctcgcggatgcgccgcgtgaggtccacccgctgcccgaagtcctcgagcagcatcccgccgggatccat

SEQ ID NO: 98634 - DNA, 395 bp, Oryza sativa
  Clone ID: PAT_MRT4530_96522C.1
cagacgcgtgggcagacgcatgggcggacgcgtgggctcctcatcccaaagcaagaagctgagctgctcctgctcttggatggcatacatggccaccaccgggtccaggctccttaagacctccttcggtggcgcgcgcctccccggcgccgggcgcaaccccaccgtctccgtcgcgccgtgcaccggcagcaccatctgcaactccatctcgtcgttcggatacagtccccaactacgacctcaacgccatgagggtcaggcccatcaaggagtgcatcgtgtcttgcgagatgacccggctgtacatgacgcgcatgatcacctacgccgacaccgacgtattagtcgtacggcgccggctccgcggggctcttctgcgcgtacgagctctc

SEQ ID NO: 98635 - DNA, 603 bp, Oryza sativa
  Clone ID: PAT_MRT4530_96523C.1
ctgcaggaattcggcacgaggagaaaagaaaggattagaaagtagcagctggctccatgctcatcatatcatgatgaaaagaaaaccacaatgacaatctgccataaattgctaacgttaggagtagagatcatgtagatgggtgaaatttgtagacaaaattgaatttattctatgctagaaggtttgcatgggtgcagaagttgtaaatattctcaatatgaaaatgttcgttctgcttccacgtggatcaacaaagtgagaaatcattgatcaaatttcctttacacggagagtgatcaaccaggaggaagaaaacaatagctagccaccgactccaagtcatgaaattagttcttgatgagtattagtagatcggctggattagctagcttgctcccctattataattagtaatatatcccaaagctatacatataaactgaagtagggctattatctatttcagaggcttgaaccaatataaaaatctttctctcctatctactttactgcaatctcgcgtataacttagtattaacgtcccccatgaaatacaaataccgttgtcgagtatagccatttgacacattcgtatcacat

SEQ ID NO: 98636 - DNA, 505 bp, Oryza sativa
  Clone ID: PAT_MRT4530_96524C.1
cccacgcgtccgccgaaaattctctgtcgcgcgcgctccttcctcccgtctcctctcctctcctccgctcctcgcgcgcgccatctcgcggaggggatcctgatctgcaagaagttcttctcttaatttcagagccttaataacagtttgagtttgtttgttcccccgcaaaaaagagtttgggggggttcaattgaagttggatccgccgcccctgcagatttggtcgcctagcttccttacctatggcggttcaatctgcagagcgcggcgtggaggctccacctctgacgctgtcgatattcgagttcaacagtaaggtgatgcaggacgagctgcagaagctggcgctcaaggtgaaccaccacgaggagaacatcaggtttctcaagtcggagctcaatgccgtcgaggactcgtgcgctgacctgagcattaaaataggcaattattattcatcgatggcggcaattgcaaataatgacacatctgttgaagaagctga

SEQ ID NO: 98637 - DNA, 274 bp, Oryza sativa
  Clone ID: PAT_MRT4530_96525C.1
ctcgacccacccatccagaattttttctccaaacgtcaacaacacccatcccaaggggggaccatatataaaataacacggcagcgcacctcacaccaccaccgttccgacctcccccagagaccggatccctttcctgtcattataaaatgaaacccacctcacaccgtactttcgttaaagacaactcccaaaatctaccttagcccctaaacaccttcccaccgtcgcccttctttttcccccacaccggtcgcttcaaaaccaacttccc

SEQ ID NO: 98638 - DNA, 2920 bp, Oryza sativa
  Clone ID: PAT_MRT4530_96526C.1
tcagcttcttccatccttaaatcgtgtagccttttggaggtatatcgctgaagtgacagtaagaaacacattcaatctgtcatactgcctatcaaagtggtgaaagtaagaaaacctccaactcttcttgaacaaaagtgacgcaagaaccatccaaactccaatcacaaaccccacactgagaccagcacagaacgaaccatcgtgatgacttttaacggtttgaccttgagatgtcccattttcaggacaattctttgcaaggggataaccacaaagacctgggttgccgatgtacatcaaagatggatcatctgcattgagtgtgtccagttgatgtccccgaggaatccttcccgataaattgttgtaagacaagttcagatagctcaagaatgtcaaatttgataggcttgaagggatttctccagaaaattgattatatgataggtcaagggaggttaattggtgcagctcaccaatctgatccggaatgtttcctgctaactggttccaggacagattcaaatttaccaattcgacaagagaaccaatctcctttggaatatggccagacaatttgttgctagaaaaatcaaggcccaccaagtacacaagtcccttgctgtattcaagttgttgaccttgcagaacacatgatatgctataatggaacaggccgaatacatcgaaagctccgaatccgttttccagtgcctctccaaataggaaccatgtttctaaattttctggttcgttgatcattcctttcaagcacggaagggattgtgggatagtaccagaaaaactattattagctatatccaaataccgcagatgatcaagtttggtaaaaccacctatccactccggcaactttccagaatatttgttccatgctagatcaagaatggtgatgctttggcacgattgcaatagcatagggaactctccagaaagctgatttttgcttagtaaaaggatatgaatgttcagacttgtggaatgtataaaactaccaccagtcgatggtttcagttctgtcggcaaacagtgaggaagttctcctaccagaaaattgtctgctaaatccaaggcacccaaattgtgcatcttgcaaagggactgtggaatgctgccattgatatggttggaaaagagaatgagtttaccaagatttgcgccaccaaaatgaaatggcagcggaccagacaataagtttctggaaatgtccaaataatagagattttcctgtaacgatggcaggcgaccagtcagctggttcgaagctagaatgagcttttcagttgacataccttgaaaactgtctggtaacttccctctgatctgattatgagatatatttacgtttgcaacgtcagaaactaaattccagaaccaattaggaagctcatcttttatgcctgaacttgaaacatcaattgagtaacaattattcaacgatttgatccacacaggaaattctggacccagttggcaagatgcaaaataaacatcgaacaatccaaagggagggctccaactttcgtccagcactacctttaaaggattataagacataatgattctctccaaactctcaaggcctgaaagatgctggtttgagatcacaccactgatattattgttatgtagaattagagttgtcaaattagccatttctctgattagcaagggcaaatgaccactgaatttgttccaagataggtaaaggcttgttaagctagtttggctccccagccaatccaggtttccagtaatgtcattataagacaaatcaagctcctccaatttattccaagtacagcttggaagcttatccatcagatctttgatttccacgccgatcaaattctcattgaggtataggaccctcagattgcaagtgttgtttaatgttgatggcagcgtcccttcgaagctattacttccatggtagctatcacctccaaggttaaggccttccaacaaagttaagttgcctaatccatcaggaaatgaaccagacaactggcatgaggccaggttaagcatcttaaccgtcttcatgctccacacccagttgggaattaccgtgccaaacaaagtgttctcagagaggtcaagtgtttcaaggcttgtcagattggtgagtcctgttgatgatgaactcatgatccaacaccctgtaaggcgtagaacctcaagacgggaaagcatattcactggacggacccaatcaaccactgagcttagattcacataactcatatcaagatacttcaatgaaggaaggcgtgccaaccatgagatgtcagctgtgtgcataggaggatggtcataaatttcagatgttatgtcaagaaactgcaaattagacagattaccaagctgatgaggtactctgccgtaaaaacccatacgtgctaggttgagatgggtcaaactttgaaaggagcccaagaactctggcatactttctccaaggacgttcccactaagatctaggcgtttcagttgtcgtagacttaccaaagacgaacttatgtacccatacagcggaaaatcaacatgggcgcacttgtaataatgcggatcatcataatataagtaagtgttgctgaggttgaggatgataacatgccccgtcctgttgctacacctcacaccgctccactggcagcaattctcacctagccatgagctgaggcgtttcttggggtctcttgtgatgccagccttgaacgagagcagggcatccctctcggctgcaatgcagccattggtggatgccggagctttgggagatgcagctgcggtggtgatggcgtctcggaagaggactagcaaaaggtaagtgaatgcagctacaatcgaggacgatcgtggatgaactggagttctagccattctagccatg

SEQ ID NO: 98639 - DNA, 238 bp, Oryza sativa
  Clone ID: PAT_MRT4530_96527C.1
aaccccctaccaccccggttaattcctgtttttcaccccaggggtttgggctttttttttttttgggggggggaaaattgggttttcttggaaccaggattcctgggaccacccggggatttttttttaggctttcccggggttttggggggggcgctgttcagtccttaagggggttggttctaaaatgggccttggggtcccctggggaaccggccgcgggggtcccccggggatt

SEQ ID NO: 98640 - DNA, 213 bp, Oryza sativa
  Clone ID: PAT_MRT4530_96528C.1
atgggtggtgtcgtgcgttggcgcgaaatggacgacgttgtcacggccccaagatgtcatagtgttggcacgcaagagacaggcgtggtcgcgcggaaccgttatgcaatatcgatgccccactccgccacactgttcgcctgcactcctccatgtgagaccagggcgatgaactcaggtcagtcaagcgagaccactcaaacatctaattaa

SEQ ID NO: 98641 - DNA, 393 bp, Oryza sativa
  Clone ID: PAT_MRT4530_96529C.1
atggctaagtccgcgcgcggccggatccgtctcggatcagcgctgtccatggcgatgcctgcgtcggccgggcacacgcagccgcgcccaatgccgtcccctgtagatgaggacggcgacggcaacggcggcggcaggggacgggcgcggcggcggtggcgagggacggcgacggcggcggtgggtgcgggtgtggtggcggcggcaggggatggggatggcggcggcgggggacgggcgcggcggcgagggacgttgacggcggcggtgggggacgggcgtggtgacggtgggggacgggcgcgcattgatggcttcggccacgtcgcatgggtgagaatcgcgtttgcggaggaggagcatcctgttggggaacggtatcacgtcccctag

SEQ ID NO: 98642 - DNA, 1073 bp, Oryza sativa
  Clone ID: PAT_MRT4530_9652C.1
actaacttgggtacattgctcagcatgcccataaccgagggtgcggctattcgaataggttatactctgatcagaggtgtacatcgacccaaccccacctacggccggaacccccgggacaggtaggcaggactgagtccctagcagcaggacaccggccctgtgccatgacatctcgactaccgggccgcagctcgtgtagccttcatttgccccactagacatgtggaagtacggtagtgctttgtaacagaggcccgaagaccggtccttatatggccgaggtgggtccacggtggaccgggtgcacccgggctcacaccggccggcgccgtcggtcccacgcgtcagccgcacccaagggcgcgggcggctgatggcctggccccacgcggcagctacacggcgcgcccgagggcggccatgccggcacggtcagcgggagacggtgcgcccgtgccccgatggtcgccgccggcgaccaccggcgcggcggagcggccgccgagagagggaagggaagggggaaaggaggcgacggtccacggctcaccccggggcgacggcggcgacggaggaggcggccggagcggagggaggcggcggcgcggctcgggtcgacggggtcgacggcattccggcggtcggcgaccgaaacggagaggtggacgaggttggcgaggatgcggcgaacccgaaggaggcggcgccgaggtgggaggcggtccggggcgacgacggcggcggaccggagctcggcggcgacggcggagagagagagcgacgtcgcgagctcgaatccggcgaggaggaagggcggcgagaggcggaaacggacggaggagcacaccctttgtcacccaacctccctgccgtcaccgcgtcaacctcccgccatcggccatgccgacctccctgccgtcgcccgcaccgacatcccggcggcacctgcgtcaaccttcctccgttgccggcaccacccgcactggccacgatatatgcttagaccacgtgtggtggtagtgagtgtgcgcatgtggggtgtgggtattttgcgagttgaaccagtatag

SEQ ID NO: 98643 - DNA, 509 bp, Oryza sativa
  Clone ID: PAT_MRT4530_96530C.1
ccaagcccattgcaggtggaagtttccgtaaagggcaaacaggtaatagcaatatgtgggcaacccccttctggcaaccagctgacgtgttcaatgtgataaacagaccaagtcatgcagcagcagtggtttgccatacaagctcaggctggtagcacaacaatgctgcactgaccaggccattgagtgattggtgtcaagcagattgtgcaacagctgacaactggcagcaatttagtggtgtgctactgttgatgcaagactgcaagctgcaagcccaactctgttgaccttgcaacttgccatgccatatgtggtatctaccctaactactgatagggctcccaggagcattgccactgttggtgggtctgggtaactggaatgtgtgaacaatgataatagttcgtatgttaaaaataaagtcatacatcatcatgtgtgactgtttgaaacttagggtcatataaatcgaaataaaatcatcttacctatttaaataaaaaaaa

SEQ ID NO: 98644 - DNA, 906 bp, Oryza sativa
  Clone ID: PAT_MRT4530_96531C.1
atgaagagggttgaccgggtcgggtttgacttgggaaaaattaaactagactttgacagggatatatggatcaatggaagctgcgaaaacagcaggcagctcatggtttcgagctcgaacgattcgcagagagcgagcagaggcaaaaactcttgtcagcccacaggaaaatttgctgccatgccggcgatcagtgaaagtttcagggttgttttttttagtttggaggtttacccgctgatcgccgccatgaccttcgtcacggggctgtgcaccttccagctcacaaggaacgtgttcatgaacccggacgtcagggtgaacaagaacaaccgtaaaagtgcggtgctggagaacgcggaggagggtgagaagtaccaccagcacgcgttccggcgattcctcgccacgcagcggccggaggtcttcccggcgctcaaccgcttcttcgccggcccggcgacggtggcgagaagtgatcgccacgactgatcaatcgacgacgacgaagacgaagacgatgatctcgatcacctacgtgttggctaatcaatgtatccaccaattgtaaaagtatggtgtacaagaacgtgtgtagaagtgaatgggcgggggaatctaatcttcttttagggaaccggaaagataaaaaaatggaaatgagaagttaatgcgggcgggtgtttacacgtagtactaggggtattggatgtttggggggtgtactgtacatttgggccaaaatgtgagtccagatcacccccattttgggccggataaaatggctttggccctgcccaattgggccttgggttaacgttacgccagtgatggcagtttcagccccaaaaaaaaaaaaaaaaaaaaaaaaaaaaaaaaaaaaaaaaaaaaaaaaaaaaaaaaaaa

SEQ ID NO: 98645 - DNA, 240 bp, Oryza sativa
  Clone ID: PAT_MRT4530_96532C.1
atggcgaaccttccggtggagcgaccaactccaccggccgcggcagcaaagctgtccagggatttccagaagagccctcctcgtcctccacgattctggaaccccagcccgtgggccacggcttgctcggcaagctggttgcggctgcaccatgtgtgtgcagcactgttggtgctggctgcgccgcaggccgcagccatagcacatgtagccgaacaggcccatagtcagctacagtag

SEQ ID NO: 98646 - DNA, 962 bp, Oryza sativa
  unsure (1)..(962): unsure at all n locations
  Clone ID: PAT_MRT4530_96533C.1
gagagagaacacagatacaacacaagacagagcacgacacacacgacagagatagagagacacacagacaaaacgtaccctaacagatagagaggataaataagacaacgactagagacagataaatacatggaacataagcagtaaacctgtgtagaaatagtaatccgcaacacaataccacacaacatacaagacacaggaagcataaagtagtaaaagcctaggaggtagcacaaaatagagatagaaaccataaaacaacaaacaataaaaaaataaagacaataaagacaaacgaacaaacanagacacccaggcataaatacccagataacagagagaaaaacccaagatacaatagcccaaacaagacataaaaatagaaatattaccaacaacacaagaaaaaggcaagaaaaccatataagaacaacacaatcccactaaccaacgaccatcaccaagaaacatccacacaaagcaaacccaacaaaaaggataacaaattaccccgaaggccctagggccaaaggcccagaaaaaaccccgaggaataaatttcaaaaaacccctcccaacccctcccaaaaaaaaaggccaggattaaaatttanccgggatttaaatcccanacccaaaaaaattccaagggaggaaataaaacacccaaaaagaaaaaaaaaaaccaaatagataaaaaacccaaaaaaaaaggggccccaaaccaaaaaaaaaaggccccaaaaaaaaaacccccattaaaaaaaaaaagagggccccgcccctttaggccctgggccccttttataaataaacccaatataaagggccccancccccaccccccccccccctaaaaaacaaaaaccccatattcacccaaaaaaaaaaatatcaaaaaccccccccaaaaattataaaaaaaagggtggaaaaccccaacaagggaacctaattaa

SEQ ID NO: 98647 - DNA, 496 bp, Oryza sativa
  Clone ID: PAT_MRT4530_96534C.1
ttcttgccggagaggtcgagcgtatgatgcctgggtcggagatttggccttggagacaaacccgcaaatctcagtgacccttgtggaacaactcgtggcactatagattgcagtccgtggcatgcagctggatgaagaagaaccggaccaaatcacttggaagttcacaactcatgggcagtactcggcttcgtcagcctacaaagctcagtgcattggcgcgccaggcacgacctatgacccgttaatttggagagcttgggcgcatgggaaatgtaagcttcacgcctggctcatcatccagaatagagtatggacctctgaccgtctcacaaacagggaatggcagaacaacgggcagtgccccctctgtaggagagaggatgaaacggccttgcaccttgttgcggaatgtcgatattccaaaaggatttggagcatggtagcgaactgggtgggatatcttcacctcgaccctcggctttgggagacgact

SEQ ID NO: 98648 - DNA, 582 bp, Oryza sativa
  Clone ID: PAT_MRT4530_96535C.1
atggtggccgacctcccgcgccggtttccttcccctccggccgctctttcccccttccaactctatttaaaccctccccgcacctcctccgtccgtttccgcctctcgccgcccttcctcctcgccggaatcgagctcgcgctgtcgctctctctctcctccgtcggcgacgacctccggccggctttcttcgctcgccgggaccgtctcccgcctcggcgccgcctccttcggcttcgccgcatcctcgccgacctcgtccacctctccgttttggtcgccgaccgattgagcgctgctgtccccgtcgacctgagccgcgccaccgcctccctccgctccggccgcctcctccgtcgccgccgtcaccccggggtgagccgtggaccgtcgcctcctttcccccttccctcccctctctcggccgccgctccgccgcgtctatggccgccgccggtgaccatcggggcgcgggcgcgccgccttccgccgaccgtgccggcgtggccgccctcgggcgcgcccgagtggctgccacgtggagcccggccgtcagccgcccgcgccctcaggtgcggctga

SEQ ID NO: 98649 - DNA, 4424 bp, Oryza sativa
  Clone ID: PAT_MRT4530_96536C.1
atggcgtgcgtgctggcgtcggaggtcgccacggtgctcgccatcatgcgccgcaacgtccgctgggccggcgtccgctacggcggcgacgacggcgcggacgacgagcacctcgaccacccgctcatcgcggggctcaagtccctgcgccgccgcgccgcctcgtgggacacgcgccagtggcgggacgtcgagccgctcctctacctccgccccttcctcgacgtcgtccgctccgacgagaccggcgcgcctatcacgggcgccgcgctctcgtccttgcacaagatactcacgctcgacctcgtcggccccgacgcgcccaacgtcgccgaggccatgggcgccgtcgtggaggccgtcacggggtgccgcttcgaggtcactgacccggcgtccgaggagacggtgctggctcgggtcctccaagtgcttctcgcgtgcgtgcgtggccgcgctgcgccagctctggccaaccgccatgtctgcaacatcgtcagcacttgcttccgcgtcgtgcagcaagccggcactaagggggagctgctgcagcgcgtctcccgccagaccatgcaggaggttatccgctgtgtcttcgctcgcctgcctgatgttgatgccaccgtggttgccgacgggcagactgcttgtagcaagaaccaaggtttgagtgatggagagatagggaacgggaagagtgattttgtgtgcttgaatagctctggagatgaggtgggaggtggatttggtgttgttcaagaccaggctatgagtgagctgtttggggttccttgcatggtagagatattgcaattcttgtgctcccttttgaacatagcagaagacattgaggtgaatccaaggattaatccaattgactttgatgaggatgtgccactatttgccctcgggttgattagttctgctattgagttgtcagcttcatccataaacaaacaccccgaattgctggcatttgtacaagatgaactgttccgcaatctaatgcaatttggcttgtcaatgagccctttgattctgtcaaccgtgtgcagcattgtttttactctcttctaccatttgcgtcaggaacttaagctacaacttgaggctttcttctcatgtgttatcataagacttgggcagagtagatatggtgctagttatcagcaacaggaagttgctctggaggctctagtggatttctgtcggcagaaagagtttatggcggagatgtatgcgaatatggattgtgatttacagtccagtaatatttttgaagaccttgctaaccttctgtctaaaagtgcatttcctgtgaaaagtcctttgtccaccctgaatgtgcttgctctagatggtttggttttggtcattcaggcaatagcagagaggactgataatgcacctcagcatcatgaacaaacagtgcctgaaataagtgaatattttcctttttggcagttgaaatgtgagaacactaatgatcctgatcaatgggttagatttgttcaccagcaaaagagcatcaagagaaagctaatggttggtgttgaacatttcaacagggacaaaaagaagggctttgagtacctgcaaggggctcatctcctgcctgaaagacttgatccacgcagtgtggcgttgtttttccggtacacacctgggttagataagaatcttcttggggactacctgggaaatcatgatgagttttccattctggtccttcatgagtttgctaaaacctttgacttcaaggagatgaatttggatgctgccttaaggctcttcttggaaacttttcggctgcctggtgagtcacagaagatacaaaggattcttgaggccttttctgagagatattatgaacaatcaccacaaatgtttgttaaccgggatgctgctctggtgttgtcatattcagtaatcatgctcaacacagatcagcacaatataagggttaagaagaagatgacggaagaagactttattaagaacaatcgccgtatcaatggtgggaacgatcttccaagggaattcttgtcggaattgtattattctatttgtcggaatgaaatcagaaccattccggagcaaggagctggatgctctgagatgtctttcagccggtgggttgatctgatgtggaagtcaaagaggacatcagcatacattgcttgtgactccttcccttttcttgatcatgacatgtttactatcatggctggaccaacggttgctgctatctcagtggtttttgataatgttgagcatgaagagttccttacaggatgcattaatggttttctatcagtggcgaagttggcggcattctatcatcttgatgatgtgttgaatgatcttgttgtggcactatgtaagttcaccaccttgctgaacacttcctatattaatgatcctgtaacaactttcggtgaggacaccaaggctagaatggcaaccgaggctgtttttactatagcaactactcatggtgatcacatacgcagtgggtggaggaacatagtagattgcattttaagattgcataaaataagcctacttcctggttgcctcaccggtgacacagctgatgatcaggagtcctcatcagatatgttgcctagcaagcttgcctcatctcgagctgcacctcaagttgtgccaatcagcactcctaaaaaatcatatgggctcatggggaggtttagtcagctattgtatttagatgctgaagaatctaggttccagccaactgaggagcaacttgctgctcagaggaatgcttcagagaccataaagaagtgccaaataggtaccatcttcactgagagcaaattcttacaagctgactctctcttaaatctggcaagagccctcacccaggcggcaggtcgaccacaaaggatcaccagctcacttgatgatgaaagcacatcagtcttttgcttagagcttctaattactgtcactttaaacaacagagacaggattgtccttttgtggcagggtgtttttgagcacataactcatattgttcagtctacagtgatgccctgtaatctggtggagaaggctgtttttgggctgctgcacatctgtcagcgcttgcttccttataaggagaatcttgtggatgatttactgaggtctcttcagttaattttgaagctcgatgctcgtgtggctgatgcttattgtgagaacattacccaggaggttacgcgcctggttaagggcaatgcaactcatataaagtcccagatgggttggcgaactatcatttcattactctgcatcactgctcgtcatccagatgcttctgatgttggttttgaagccctagtttttatcatgtctgagggagcacacctctcccctgctaactttgtcctttctgtggaggcctcaaggcagtttgcagagtctcggcttggctctgcagaaagatctatccatgctttgaaccttatggcagaatcagtgaattgtcttacacgctggtcacgtgaggttaaggaagctggtggggaggctgacaggatattggaaggaattgctgagatgtggctgcgactagtgcaggcactacggaaggtgtgcacagaccagagggaggaagtaaggaatcatgcgctattatcattgcacagatgcttagtagttgatgggatatcagtgccatcttcagcatggttgatgtcatttgatattattttccagttgcttgatgaattactggagattgcacaaaattactcaccgaaggatttcagaaacatggaggtgtccctcttgcatgctgtaaaacttctatgcaaagtgttcttgcagtcacttaatgacatttcatcacagagcagcttcagtaagctgtggttggaagtacttgacatgatagagaagcttatgaaagtcaaagtgagagggaggaggactgagaagctacaagaggttatcccagagctactgaagaacatactgctggtgctaaaagcaaatcgggttttatcaaagacaagcaccagtgaagagaacagtttgtgggaagcaacatggcttcaagttaacaagattgcaccttcactgcagccagaagtttttcctgacagtgagggtgatgtagcaacacaaagtgcaaaaaacaagtcagatagtccagcacaatctgaaggcgtgaatgtttagctccacataataactccagtaaattggttatattatgccagaacttcctaaaatttgaaatgtggatgtatattgtgtccttacattctttagctgccactctttgagaaaccaaacatacacttccgtgcatgtgtaatttccattgatctcaatggtgaaattaaacattagaatgtgataaaaaaaaaaaaaaaaaaaaaaaaaaaaaaaaaaagcctgcagcccggggg

SEQ ID NO: 98650 - DNA, 1951 bp, Oryza sativa
  Clone ID: PAT_MRT4530_96537C.1
aaaaaagggagggagtgtattgataagcaagttgcattcatcattggtccacaccagttcttattacaatacagaaggtgaaaatataaacacatgtgctaccaaaaagaaactagtgatgagaagaacgtgttcctcgatcaaggaactaatccaagctgccaattacttccatctccatgcatccactacttaaatattatgcccattcccctgtcgctgtattcccattaacatcacaaacataacatagttacagatttacagtacatgcctatcagtgtgcaaccatgcgccgatatttctgtgctctccaaccaatgtcatgcctgaaaaatccttctggccagtcgacaacgtcgagagcgtcatatgcttttgcccttgcttcctcaatgtccttacctttcgcggttacaccaagaacacggcctcctgccgcgacgaagtttccatctcgatctagggcagttccagcatgaaagatcttaactgcaggagagacctgctcagcttcatcgatattttttattactgtccccttcttgtaaacaccagggtaaccttcacttgccatcacaaccacagttgccaattcaggcgaccaggttagtgagactgaccccagttctcccctacatgcagcaagcaagacctgtgcgaggtcggattgtaaccgcatcatcagaacctgacattctggatcaccaaatcgcacattgtattcaataagctttggcagtcccgatttcttctcaatcatgatcccagcatacaacacaccgacgaacttgcatccttcagttgccatacctttaacagtcgggacaatgatgctctccatcactttgcacttgagtttttccgtcactattggtgcaggggagtatgcacccataccacctgtatttggaccaacatcgccatcaccaactcttttatggtcctgggctgattcaagaggcaaagcagtttctccatccactagagcaaagaaagaaacctcctccccctctaaatattcttcaactattacccgtgacccagcagaaccgaatgaaccttcaaccagcatagagtctattgcttcaaatgccttttccaaagtcatagcaacaactacacctttcccagctgccaatccatcggctttaacaacaataggggctccttgctcctcaacatatttcttagcatctgaaggatctgtgaaagattggtactttgcggtgggaatgtggtacttatcacacaacttcttcatgaagtcttttgacccttctaacgctgcagcctctgatgaaggaccaaaagtaggtatcccagctttgacaagctcatttgcaaggccagcaacaaggggtgcttcaggcccaactacaaccaacccgactccccagttgcgacagaacgagatgaccgcgtcgctgttcgatatgtccaggtccggtatacatgtagcatctccagattgagcaatgccagagttaccaggggcacagaagactgcatcacaggatggagagcgctccaaggcataacaaagagcatgctcccttcctcctccaccaatgaccaatacagttaccctctcttcagaaatcttcgagctgccgtttgtcgatgcgagcttcgagctaaagtccctgctcttagaacccctaacaatgagattcgaaccatatgctacatgttgcgctctgatgggagaagaaatctctgaaacgggataagacaccgaagatttcaagtaatcacgaaacaaattattgctgaatgccttagctcctccaacgttgagagaaccttttacactcgaagcagcacatgccatgattctttcttcaccaaccaggccatacgccacccggagtcctggacgcccgccaagtgttcgacgaaacgccgacgtcgctcccgccgctcctccgctcggcacgccgacggccat

SEQ ID NO: 98651 - DNA, 255 bp, Oryza sativa
  unsure (1)..(255): unsure at all n locations
  Clone ID: PAT_MRT4530_96538C.1
ttacagcgaaagcataacaactagaatcccaccacaatgaagatcattttcttctttgctctccttgctattgctgcatgcagcgcctctgcgcagttttgatgctcttactcaagtttaccggcaatatcagctgcagccgcagctcatgctgsagscmacagatgcttagcccatgccgttgagttccgtaaggcagcagttscagcaccagttggcawncccctttytttccaatymaccagtgtgtcaggc

SEQ ID NO: 98652 - DNA, 326 bp, Oryza sativa
  Clone ID: PAT_MRT4530_96539C.1
ctcacgcggcggttctgggcgcggagaacgcggccgaggcataggtgggcgaggctatggtcactaccgagactactgaggtgatgatatgtatggcttgcaatgaggatattgaggaggcggcgagtagcagaacttgaagtctaaaaggcgctcatgacaggtatgggtgccttgctgcacactgctacacactatgtcgacgaggctgttatggtgatgactatgcacggacgtgtatgaggacttttgcgcaccatatcagtgctgcccgttatattcatatgaagcgtgtacattcggagcgtgggaactggggaactacc

SEQ ID NO: 98653 - DNA, 1149 bp, Oryza sativa
  Clone ID: PAT_MRT4530_9653C.1
atgagtagattgttcactagttggggttttgtttattctagggttaaccagccgggagaaaggagcgcgcggaccggttccacgggagtggggcccacgcggcagcctctcggtccacggtggaccgggtgcacgcggcttacgccggccggcgccgtgggtcccacgcgtcagccgcacccgagggcgcgggcggctgacggccgggccccacatggcagccgcggggcgcgcccgaaggcggcctcgccggcacagccgacgggaggcgacgcgcccgcgcccctatggtcgccggcggcggccataggcacggcggagcggcggccgagagaggggagggaagggggaaacgaaatgggcggtccacggctcaccccgggtcgacgacgacgacgggaacggcgaccggagcggaagaaggcggcggcgcggcacgggtcgacggggacggcggcgttccggcggtcggcgggcgaaacggaggggtggacgaggtcggcgaggacgcggcggagccgaaggaggcgacgccgaggcgggagaaggtccgaggcgacgacggcggcggaccggagctcggcggtgacggcggagagagagagcgacggcgcgagcttgattccggcggagagagagagcggcgagtggcggaaacggtggagggaggcacggggagcgtttatatagtgttgggagtgagagagggcggccgggggagaaggaaaccggcgcggcgctctcgggctccatcaatggcgccggcgagatttgcgggggcaaatccgcccgtttgaatgcgagagagagagggaaaaatggggggaaagggagagggaatcacggggaatgattcccctcactttattgcacgcgggggcggcgggatgcggcggaatccgcggcggcggcggcgctagggcacgggcgaggcggcgggagcggcgggaggtaggggatgacgggtgggccctacccgtcagcgagggtggcgggcgggcccgcccgtcagcggcacgcgcgcggggaggaggccgattgggccgcggggggaagaggagagagagggagggaggtgggccgagccggcccaagaggggaagggggggaaaaggactttttagggtttttctttttataaaacctttt

SEQ ID NO: 98654 - DNA, 1371 bp, Oryza sativa
  Clone ID: PAT_MRT4530_96540C.1
atgtcggcgacggaagtgatggaggagtgcacggagacggcgagggagcggcgggaggaggagcggctgaggaatgtgaacctcgacgactggctccccatcacctcgtcccgcaccgccaagtggtactactccgcgttccacaacgtcaccgccatggtcggcgccggcgtcctcggcctccccttcgccatgtcccagctcggctggcccaccggcgtcgccgccatcgcctcctccttcgccatcacgctctacacgctgtggcagctggtggagctccacgagccggcgcccggcggcgggaagcggttcgaccggtaccacgagctcggccaggcggcgttcggccggcgcctcggcgtctgcctcatcgtgccgctccagctcatcgtccaggtcggcaccgacatcgtctacatggtcaccggcggccagacgctgaagaagttcgtcgagctcgcctgcgacggccgctgcgccgacatccgcctcacgttctacatcatgatgttcgcgtcggcgcagttcgtgctctcgcagtgccccaacttcaactccatctccgccgtctccgccgccgccgccgccatgtcgctctgctactccatgatcgcgttcttcgcctcggtcctcaaggcccacccggccgccgccgccgccgtggactacgggttcaaggcgacgacggcggcggggcgggtgttcggcgcgttcaacgcgctgggcgcggtgtcgttcgcgttcgcggggcacaacgtggtgctggagatccaggccaccatcccgtcgacgccggagcggccgtcgaagaggcccatgtggcggggcgtcgtcgtcgcctacgccgtcgtggcgctctgctacttcaccgtggcgttcggcggctaccacgcgttcggcaacgccgtggcgcccaacgtgctcatctcgctggagaagccgcggtggctggtggcggcggcgaacctgatggtggtcgtgcacgtcatcggcgcgtaccaggtgtacgccatgccggtgttcgacatgatcgagacggtgctcgccaagaagctccacctccgccccggcctgccgctccgcgtcaccgcccgctccgcctacgtcgcattgaccatgttcatcgggataaccttccccttcttcgacggcctcctcggcttcttcggaggtttcggattcgcgccaacaacttacttcatcccctgcatcatatggctcataatgcgcaagcccgccaagtacagcctctcatggttaatgaactggtgtttcatcatcatcggaatgctgctcatgctggtttcacccatcggaggattacggcagatcatccttgacgctagcaaatacaagttttactcttag

SEQ ID NO: 98655 - DNA, 603 bp, Oryza sativa
  Clone ID: PAT_MRT4530_96541C.1
aactagtggatccccgtggctgcaggagccccgggttgtgggcagtgacacaagcaggcgggatcatgccgccatggccgtgcgggaggtcctcgccggcgacaggaaggtgggcaccgtgtccaggtcggcgaggaggaggaggcttgagctccggaggctcgggcggacggcgtcggcggtggcggaggatgacgccgcgaagagggtgcggccggcgtcggacagctcctccgactcgtcggagtcggctaaggtagcgcccgagcccaccgcggaggtggcgagatggccggcgtgcgtgtcgcacggggcggtgtcggtgatcgggcgccggagggagatggaagacgccatcttcgtcgcggcgccgttcttggccgcctcgaaggaggcggcggtggaggggagcggcgtcgcggaagaggaaggcaaggaggaggatgaggggttcttcgcggtgtacgacgggcacggcgggtcccgcgtggcggaggcgtgccgggagcggatgcacgtggtgctcgcggaggaggtgcgggtgcggaggctgctgcagggcgggggcggcggcgccgacgtcgaggacgaggaccgcgcccg

SEQ ID NO: 98656 - DNA, 1122 bp, Oryza sativa
  Clone ID: PAT_MRT4530_96542C.1
ctaaagcccaaaggaaagctgtgctgtgcccctcacagcctcgcttccctcccttattaatccccctcttccacgcaacacaaccgcgggtgttcttctccatgccgcgccccgcctcgcctcgccgaccaccggcgccacctcctcctcctccacgccgcgctccgcctcgctgaccaccggatccaccgccgcctcctcctcctccatgccacgctcagactcacttaccaccggcgccacctcctcctccaagctgtgggcgcccccgacaatcacccacgagaacgcctccccctcctgctccgccacgcgggcaccactccggccaccggcagctgcctcctcctcctcctccaagctgcgcagttgcacctgccggattgataaggtgacagagagctcacgcatctcctccccattcacgttaatgatatctaactctatcggcttcgggaggccgacgacgatgtcgtcgatctcgccgccggtgaccctgaacccaccgccggcggctctgccggtgcggcgccgactgttgggccccgcctccccgccgtcctcgccggcctccgcgagaaacaacgtccggttgaagagctcaccaacgatctcctggcggccatagacgccggcgagccggtctccggccagctggcccggctcgaagagatgaacgccgaagaggattagatccaccgccgccgttgtcgccacaacgacctccatggcggcgacgacctcctgcgccgcggaggtgtagaagccgtccgcccgtcggcgccgcatcgtccactcccgccgctcccaccgtcggcgtcgcgccgtccaggcggcggcttccccggcgtccgccgcgagggaggagagggaggagaggaaggagaacttgagggaggagaaggcgaggcgaagggggaggagaaggcgatgcgccgcggcgtcggggaaggaggagtcgacgtggatgtcgaaggggacgttgcacatgcggaggtagaggaggacggggaggcaggtcgggcaggcggtgggcagcccgaaggcggccttcctcgccaccagcaccttccgctcagcctcctcccactccgccgccgccgccgccgccgccgatgccat

SEQ ID NO: 98657 - DNA, 1026 bp, Oryza sativa
  Clone ID: PAT_MRT4530_96543C.1
atgtcgtcgatctcgccgccggtgaccctgaacccaccgccggcggctctgccgctcactgatgtagtcgccggcatcagcgagaaacaacgtccggttgaagagctcaccaacgatctcctggcggccatagacgccggcgagccggtctccggccagctggcccggctcgaagagatgaacgccgaagaggattctgtgcattttaatttagtgagcaacgcaaaacctcgcgaaatcgagggcacgcagcgtggagaagacccgggtcgcgcgcgctgtgggcggcgtagcctcgccctggcatgccctagcgccgaaaccgtagcgcgaaatccccgattcgccctcccaaaacccattcccgctgcaccaatttctctctcccgccaccgattcctccgctcccgcgccgagaatcctcaaaatcagcaagcaaaaccaagaacacagattgcagcggcgacgttacaagaagaatcacacaaaatcacaaaagaaaaatcaagacacaaaatcatacaagaaaaatcaagaacgccgtcgccaagaacgccgaggaggagcgcgccctcctcccggctgccgtccgttcccgccgcccccgccgtcggcctccgcggatccgtccccggaggcagaagcggtcgaagcaagggagtgggggagggagaggggaggggcggcagacagatccaccgccgccgttgtcgccacaacgacctccatggcggcgacgacctcctgcgccgcggaggtgtagaagccgtccgcccgtcggcgccgcatcgtccactcccgccgctcccaccgtcggcgtcgcgccgtccactacaaccgcccccatcgctcccgagtccgagcggaaggagaagcgagcggcgcatgcggcgcggtcgacggcgaggcgacgcgcacggcggcggcttccccggcgtccgccgcgagggaggagagggaggagaggaaggagaacttgagggaggagaaggcgaggcgaagggggaggagaaggcgatgcgccgc

SEQ ID NO: 98658 - DNA, 830 bp, Oryza sativa
  Clone ID: PAT_MRT4530_96544C.1
ctggcccagcaactttatgcgccagttcagaaggatcagaatgaaaattctgtggagagtgatgagcagatatggccgggttgcgagaatgtgttggcccattttgaggctcttatgacagcaaagtctgctgaggttgaatctcccaaggataagatgcttatagatgagactgatgaatttggtaatgaagttcctctaggaaaaattgtgaaaattttaaaatctcaaggagcaaaaaaggctgggagaaagcagaagacaaaatctggttcaataaacatggaaaaagatgatgatgtcttgggactggttagagaaataaacttggacaatcaagaaaatttgggggaatcagaaaagagcaaaccaaagaaaaagcggatggatgcaaaagagagtaatgacaagcctgtagatttttcaacaccaaaacgcaagagatcagtttctaagagtagaccacattcaacgaaaggcaacaaaaacagtgatgagcttctactgcagtctgttgacccagatgaaactatcaactcatttgaaaataaggttgagggggccaaaaaaagagatgactcggttgatactgagttggtaacatcgcctgctagtgttaaaacccctgtatccaaagggaaaaagggtgctaaaaagccccaccctgaaatcttgagtagtagtccaaagaagtctgatgaggcaggcagtagtaagcgaactgttgattcgggaagtttaaatgggtcgatcaaaaggcagaagccaaaattggtttctggtctagcaaagtgcacaacacatgacacaggcagtgaggacctgattgg

SEQ ID NO: 98659 - DNA, 611 bp, Oryza sativa
  unsure (1)..(611): unsure at all n locations
  Clone ID: PAT_MRT4530_96545C.1
cccagcgtccggngaatatgctgagagggggtgattaaagtcattcagcaggagcagcacagctacaaggatcccattactgaatttctggaatgcttgtttgttaactatgattttgatggcgcacaacagaaactcatagagtgtgaggaggtatattagcgcgtcttgaaccttttgtccatccccatgattaatctgttttttacttaatgcattattgttgaaatataaaatattgaaagataatttcccctctttttctttgtttggaaaaaaaagttatatgttcacacactactgctatatgatgcctaacttttttttttgcgatcaaagttcagctttcacatccttatatcagaaaggcctgtctgagggtgtctgacggtgtcctggcctgtaaaatttccagagttgaacgttaggtcattagctcattgttgttacttttctattttccctccttaaattaaatgagaaccacttctctgggcataccggtgattttgcactaccaaattctaggctatttctatacgatatctaatagcactgtcttctcaatggtgatcatattgcagtcttgcatttctttgtcctaatggctg

SEQ ID NO: 98660 - DNA, 582 bp, Oryza sativa
  unsure (1)..(582): unsure at all n locations
  Clone ID: PAT_MRT4530_96546C.1
tttttggtttttttttttttttttgttttttttttttttgcagggttaatttttttttccttgttatacacacaaaacctgaattaatgggttattatgcatttatgctttacaatttcctgtgaatcaaagaaagaaacaactcgatccaaaaaacgaaaaaagaaaagaaattaatgatcaaaccacattactggggcagctgacgcttggtttccactgcacctgcctcgtctccatccaagccaagaacttgtacaccttaccaaaaatgcacaggaacaccaggccggccacgagagcgtacgccgcgacgctcgccggggcgccctccgcgaacgcccacccggcgaggtacacggcgtcgccggcgacgaacacccagctcgnggcctccagcgccgaccgcgtccacgcgctgacccgntcctcgccgtagatccggcacaccatccgggagcagacgcgaagatgatggcgagagcgtcttggacaggccccggtagagcaccgtccggccgccgacgacgagcgggtccatccggcagaggcatgtngcgcactcgccggagaaccgcganc

SEQ ID NO: 98661 - DNA, 296 bp, Oryza sativa
  Clone ID: PAT_MRT4530_96547C.1
gataattcacattacacgttctcataacacgctgatctgatgacatgacatattgagctttactatgctactactactgacatcaacctgtaaaaacctccaaggagggaatttacatgctttaagagaccaatgcacgccacggccggcttaaccgacctgggtcgcgccacatggaactcgctcccacacacacaaacatcggctggatgccgaatagctgacatgcgggggggctgaacacccacctgccgtagcatctacagatgaatcgagtgctgagcgagatcgatcta

SEQ ID NO: 98662 - DNA, 1863 bp, Oryza sativa
  Clone ID: PAT_MRT4530_96548C.1
atgcggatcaccaacggcctggccatggtctccctcgtgctctcctcctgcgacctgctccgcctctgcagcgacagggagcggcccctcggcggccgggagttcgccaccgtcgtctacctcgtcagcctcttcgcccaccctgacgcccccgccaccaccaccggcgacgacgacgacggccaggggggctcccgccgcgcgcgccccgccgccgcggagcccgcgccaatgcatgggcatggtggcgggatgatggaggccgacgacgaggagatcgtcgccgcggtggcgtccggcgcgctgccgtcgcaccgcctggagtcgcggctcggggactgccgccgcgcggcgaggctgaggcgggaggcgctgcggcgggtgacggggcggggagtggagggcctccccttcgatgggatggactaccaggccatcctggggcaatgctgcgagatgcccgtcgggtacgtgcagctccccgtgggggtcgccggcccgctgctcctggacggccgcgagtaccatgtccccatggctaccaccgagggatgcctcgtcgccagcgtcaaccgcgggtgcagggccatctccgcttccggcggcgccttcagcgttctgctccgggacgccatgtcccgcgctcctgctgtcaagctgccttccgcaatgcgggcagcggagctcaaggcgtttgctgaggcgcctgcgaattttgagttgctggctgctgtcttcaataggtcctccgggtctcgggggcctcacgtcttccgttgtgcactcgctgggaggaacctatatatgagatttagctgtatcactggagatgctatgggaatgaacatggtgtcaaaaggtgttgagaatgtcttgggctatctgcagaatgtcttccctgacatggatgtcatcagcgtatctggtaactattgctcagacaagaagccgacagctgtaaactggatagaaggccgggggaaatctgttgtttgtgaggctattattaaaggagatgttgtgcagaaagttcttaagacgactgtagaaaaacttgttgagcttaacattatcaaaaatcttgctggatcagctgtagctggggctcttgggggttttaatgcccatgcgagtaatattgttactgcattattcattgctacaggacaggatcctgcacaaaatgttgaaagctcacaatgcatcaccatgttggaagaagtaaatgatggagatgatcttcatatctctgtcaccatgccgtccattgaggtaggtacaatcggaggtggtacatgtctggcctcacaggcggcttgtttgaacctgcttggtgtcaagggttcaaatcatggctcacctggtgcaaatgctaaacgtttggctaccatagtagctggcagcgtgctcgctggcgagctctcgctccttgccgctcttgcctctggtcaccttgtcaagagccacatgatgtacaatcgatcaagtaaggatgtcgccaaggctgcttcttgagcagcccttcgcatcattcaaatgctggacatatttagacagggattgccctgagcttgtggagaagcgaatgagccatgggcttgtacatactgctgataagggagcgattctttagttcccaactcaacctgtattatactagcataatgtgtgaggaggcattaacctatagtgcagcttctgactgtaattttacccttcagttttttttttcattcttctgtaaccaatcaaacttatttttccatttttttctggatagcagcagggcaggttaacttatgcttttgtccagtataccccctcagtaatttttgtttacagcaaaaaaaaaaaaaaaaaaaa

SEQ ID NO: 98663 - DNA, 240 bp, Oryza sativa
  Clone ID: PAT_MRT4530_96549C.1
tttgataaacacaaagcaacacaacccaacggggggatctttaataccacatgggggccacaaacgcaaaaaacgcacgaggaaagcgaatacaaatcaccaaaaaccaccatacgccagcgatacatgaagaacgagaagtgcaaccgacacggcaccaccaagctcaactaccctacacaggcactgaataacaccccaacgctagagacaccacgaataggactcctgatcccactg

SEQ ID NO: 98664 - DNA, 360 bp, Oryza sativa
  Clone ID: PAT_MRT4530_9654C.1
atgatgagtgaagcctcgatgctatcctccccggcggcaacctactctggcctctggctgtcctcgccctcgtcggtagctgagaaggcgcggaaggagaggaactcttttggtaaggaggatgttgccgatgtcgccgttgcgccgaacacggatgcagatctgagggagccggatgtggtgaagcttagagggagcacgctgccgaagactaccaagctgagaggagagcaacatgcaacagacagtaatcctgtgggtctagggttcagcacttcaaaactgacgaccattgaaatcgtgcctagggtggaaaatggcatctccctcaccacatacacagaccacatatatggatga

SEQ ID NO: 98665 - DNA, 201 bp, Oryza sativa
  unsure (1)..(201): unsure at all n locations
  Clone ID: PAT_MRT4530_96550C.1
cctatatgcccctnggaaaattatagccagacncttgtttctgttcattgttcaancncgaggctagttacncattttagctgaancnatggaatctncgaccncggattgtacacncttctttgcttcactttctgtggcaancgattgcttttcttcnnggaaaaaaaaaaaaaaaaaaaaaaaaaaaaaaaaaaaaaa

SEQ ID NO: 98666 - DNA, 2256 bp, Oryza sativa
  Clone ID: PAT_MRT4530_96551C.1
atgggcaccgcccgcggcagggtcgccctggagggcggcggccggcgccggaggaagctggacgaagaggatgatgaggagtatgtggcggacgacgacgaggagaaagacgaagacgaagacgaggaggagtaccaacaggccgccgccccctccgacgacggcgaggaggggggcgacgacgaaggggagcaggaggacgaatcaggtgcggatttcgtcggggacgaggaggaggaggaggaggacctcgaagacgcatatgatttggaggaggtcaaggcgccgcgccccaagcgcccgcccaaggggaagccgccgccgagatctcgccgtcggaggcaaaaggacgacgacgatgactacgaagaggaggaggaggaggacgccgacttcgatccggacgtggacgaagacgacgaggaagagaaagacagcaccaagaaccacgtggccaagcggcaacgaccacccgctcgtaagaagaacaagaggaaccctgctagggtttttaagacaaagcataagaagcacagctcagggcgtcgacggagggagcgctgggatacagatgacgacgaggaacaagaggaggatgcggatcacatcttgaaggacgatcaggaagtagagccggacgcccgccacccaaagaagaaggcctaggctgctaggaagaccagggatgtcacgccggagccggatgtcgaggcaagcgcatggccggccgtcgaatcagacacttcagaattcgaattcgtgacatctgatgaagaagctgctgacaaggaagcaccagccgctgaaccagcaaaaaccaaggggaagaagggcaggaagaggtggggatctgggtcagagtcatcatctgattctgattatgtcatatcagagcaggaactgaaggatctggaagtctccatgcctccagatgcagctctgcaatcacctgcaaccctgccgcgccggacctttctttcaaggagggtgggggagaaggggaaagagcctgaagaggcttggaaacagacatgtgggatatgcctctcggaagaacagagagccacgatacagggtgtgcttaattgctgcgcacattacttctgcttcgcttgcatcatggagtggtcaaaggtggagtccaggtgcccattgtgcaaacgccgattcacaacaattaccaagtcatcaatggcagatctagggcttggatcaaggaaagctgtcattagggtagaaaaacgtgatcaggtgtatcagcccacagaagaggaaatgagacgttggttggatccgtatgaaaatgttgtatgcatagagtgcaatcgtggtggtgatgacaacctcatgctactatgtgatatttgtgattcctcagcacatacctattgtgttggtctaggaagacaagtaccagaaggaaactggtactgcggaggatgtagatccggtggggagggcccctctgcacaggatacggtggttcactgcagagaaagtaataccaaccctgccaacagtagttctggatcatttggctcagccacaccaagtggagtgttccagagaccaccaccaatcaacacccaaccttctctacaaggattcgatctaaatctctcaccaagagaaacccctgatgaagataagcgagaagagtcacatgtttcagctgatgctgtttcgactcctactggaaggcatgccactctcgataggaggcgggcctttaaccgacgaattcgcatccttctatttagaccaagggtcacacctaatgggtggcagaatccgattcagtctgacaggacaataccagagaatgaacaaaatccacagagcacgtccactccaactgaagtgaacccatcatgttccagggatagttctatgcagaaccagcagagtagctcatcttttgttcagccagcaaggggtcttattgaacgcacctatgggggtggaagcaatttccaacaaacagaaggtgctaaggaacagctgattcctattgtcaagaggaacctcaaactaatgtgtgctcagtccccattgggtcaatctgatttcaagaatgttgcacggagagcaacacacactatcttagcactgtctgggattgcacacaacgaggattttgttgtcactatattggatgagcgagagatggaaatgaacattgtgcaatcaaatgttatgttgagaaatggttgcagtacagagtacagaccatgtctaagttgccttagaagttag

SEQ ID NO: 98667 - DNA, 891 bp, Oryza sativa
  Clone ID: PAT_MRT4530_96552C.1
atctcttggccaaacaacttgacgaccatgtcatcaaggagagcaatcgcataatcttttccaaagcatgttggggattcaaagaaaacaaaaggtgaaaaggaaaaaatattctggtaaacctcgctgcttcagtagcttgaatcatcgtgcatgcaaccaaaaaatgacggggtaatcccaaaataaaccccaccgaacatccacaacagtaaagagggcaccgtcttatgatgaaaaggcaccgaccgtttctttatccgacaaaaactatacagaccaaaaaaggatttatattctggaaattgtttcctatttttggtgtatttgcccccttgcaatgcctttaatatgcctttccgagcagccaacaagtctgacctaaacaaacaaaatcttcttactccgaaatgacccactgtacaaccatgattcatcacgaaacctaagtccgtgatcaaatgagcaaccctttcaaatcggctatccaggatagcaaccagccgtatatcaccatctcaatctgcatttggcctgatttgcaggatgggggcttaaaggagtaaccattctgcccaattattgcgccttcggacggtatttccctgcacttctactagctctgagccacgaacagcatctagtatatagttggtgtctaccaagtttgtaaatctcctcatccggttaaattttgtgattacgtcaatgtgtacccatccctgatcatccatttgtctcctcaagaatgtgtcatggcacagattattagtgctaaaatagaattctatctgcgtgcggatatcctcttgaagattctgttgatcctggggaacccataatggctgcatttgtggccggacaaggtgcatgttctggaactgctccata

SEQ ID NO: 98668 - DNA, 471 bp, Oryza sativa
  Clone ID: PAT_MRT4530_96553C.1
ctaattactcctaccctggtaaaccacgtccccaactcccaaggacccatccgtgcacagtccacaaaataaaaaacattccgaggagttctcatttccactctcctcctcctccacctcccccctcgcctcgatccccgcggccaccgcgcctctcctcccgctgccgccggcgggcgccgcggccctcgcccccgccggaatccgccggctcgcggcgagcattccgagctccgggtcgcccgaaacctcgccggatccggcggtgctcgacgcggctcccgcgagagcagctgcctgtttcgccgccgggacgccgcgggcgcggatctgagggtgtttggtgggaatttggtgggggggttgagttgatttggccttgggttggggttgggttgggttaggctggttggcgggggaagctgagggggataggaggaggttggggctttgtggctgcgcctggtacat

SEQ ID NO: 98669 - DNA, 213 bp, Oryza sativa
  Clone ID: PAT_MRT4530_96554C.1
ttatcctgatcgtcgccgtccttgaattgccggctcccatcccacgaattccggccctcccaccctcctgagatctctctctctgcctcacctccgtatttaggtaggcggcgggcgcatcacgtactattgacctctgctgcccgccgccgccgccgtacagtcggctgattgagcggaattcccattccttttcgcccggtttccggcgct

SEQ ID NO: 98670 - DNA, 165 bp, Oryza sativa
  Clone ID: PAT_MRT4530_96555C.1
aaggaactataagtttggttaaatggttatttatacatgttttgaatcaatttacaagcaaaggattcagaataagtggaggtttgactattttttttgtcctctaatattatttaaatcgagaaaattctttgctttttatttgtgcattcatttttatttatt

SEQ ID NO: 98671 - DNA, 231 bp, Oryza sativa
  Clone ID: PAT_MRT4530_96556C.1
atggcggtactattgctggttattgtacctgttctaatgccgcttggctggcatgcagaaaacatcggtcactcggacaccaccaaggagctcactgggatcctctgtgcctgccaggattttcgtcaaagagatgcaagtgctaagtatatcatggttatccctctaagaccaggctgcagcacggacttaaagacgcaatgtgtgcatgacaggtgcgaccatatataa

SEQ ID NO: 98672 - DNA, 717 bp, Oryza sativa
  Clone ID: PAT_MRT4530_96557C.1
gctgtttttttttttatcgtatcttattagacaaaaaaatgatcgtattataatttatatttctcagcatcagtttgtcacgtacttattagaaaagcaacaataaatcttgtataataactcattgttcattgcgactacaaactattatagatacaaaattcacaggtaaatgatcttctcgatgactttattgaaaaagaaaacatatatctaatcaacactatgagaaaaagtaaagttgtggttccagccaatgtacagttgaacatacgatgattccatccctcaatcagaacccatgcactttcttatttgtcagttgactatggatgatgacttcagaatatcacaagtagatgtagatttgcgcttcggtttaacagcaaaactaggccagatccatgtcatgaatgtaattgccgttcaaactcacaggcatcaagaaccgaaactggcaactagatcaaagtatttgtttctagatttggattggccctccacggcaaactatttcaaactttagatgtatcaacacgagtacagttgcctcaactgtaaattctgtagagatatcaaatagctgttcagtatttcaccatcagctcgattcattttgatattattaaggatgtctgtgaatgctctgatgtgccttgccaaattcctcagcttctgcaatttagaaaggagatccaagtgactcatcccaaacat

SEQ ID NO: 98673 - DNA, 7001 bp, Oryza sativa
  Clone ID: PAT_MRT4530_96558C.1
ttttttttttttttttttttttttttttttttttttttttttttttttttaaaaaggtaaccaggattttttttccatagacaaacatgtagtatttctaaattgtaaccctgggagtggggtggtaaacggactatctaaatcatacacgcataaataaatgaatacttgtccatgtccaaggtaccatgtctgaaaatatacacttcatgtatatagaggctttcgagagtttgctcccgctggactagagggctaaactactagtccctggatttttactctatctggattctgggctaagcatacaaacacaaaaggcaggtacctgatacctccacacactggaaaccattgggaaagggaaaatcccagcgctaaatggaagaaaaataagcatttgagctcattgctcaaaagttctaatgctcatctgtgatcatctcgtccaccttatcttcgtcagctgtctgagctgccgaaactggatttgccgcacctgaattttcgctctcatcagggggcgtccgtttctcctggtcgccggtgcttacggctttgcctggtacaccctcttgggttgactcctcgtcgctggatacgggcactacagcaggttcgctgctcgtcccaggtgcatcaaccaacggtaatacagaaagttcagtaggtgtattacctgatccagacaattcgctcttctgattgtcagggtcaggagtatccctcacaggtgatctacaagatccagtatccatgtcatctaccgcggagaactcgattctgtgagtaccagtctcaggaggctctggcctggacgggcaagtggcagcagcgacagaagcaggttctgaaacttccatggttctttctggttcttcaaaagtggaaggggttgacgcatcctgcccccgactgccagctgatgatgaagatggtgagttcaagttgagcgagggggtatcactgcttttaataactgcaggagaggcaggtgcggcttccatggatagtggtgctgacggagtagagttgtggtcaccttgcccaactgtagttttggaatgatctaccagggaggaagcttgctgaactttgtgaactctcctcttctttggagcactccttgggtccttggggagagagagacgaggtcctggaatcgggaatggaggtattgctggtttttgctctccaagtagtaggcacacagactgagcaatagctgaaacagttgctggtagctcacattcaggtggcttggatggaggtgcacgcacagcctcctgaagccagtgcggtagcttgttcggttttgaactttcaaaatcaccagagttctcagctagaggatctgacagctttgtgtgattcagattcatctcaatgggtaatttccctaacttcacacgccgttgcatctcatggaataatttggcctgtccgtccgaaaaaccatgaagtatgctctcatgagaacttgatccaacttcattctgctgaatggaattactgctgtgtctgtttatgggcagtgacccaatgctttccttcataaaaggattcggcataaatggtgggatcaaccccatatcaggtttctcccacttgtcaagtgggccaggaaaatctccactgtgtcctgatctatttttgaaatcctgccacggtgtcagtgatggaccaccctcacttaaattcatgtaattagtgggctcaacatgagaaaatctggttggtatatcattgcaacctaactgaatgtcagttaggtgggactgcaactttggcggctccatcctcagtttggaaaagctacttccattaagtgcccgagacatcattgcatccgatatgccaggaaatgatgtagagttggagcttctggtggctgtaggcattggttcctctataattttctgctcctccaaaatccatcttgaggccagctcttcatgagatcggtggctcaaaaacttcagctttggatctctaagcatggcctcccaatttcctcttccatgcctgcgaaccccaatccacaaagcatcgagttcatcttctgaccaatagtctggttttaaactcttcttcaggaatttatttgaggcattcttcaagaacttgcttgaggagtactgagcacgcatcattaatttgtccaagaccttcttatgattttcaggcatggacgaatggatttgttgaactgggttgattgccaaacctggaagaaggccagacatatctgccatgaacttgttcttctgctttgaagttccagcaatatctgccataaagcttggtagaaatgaactatttggcaattctgggacacaattacgaagatattcattgctagtgcccaaagacaagttgggaaatagatccggtactgacttcaaatgcttaagtggaatactgtcttccagactaaaattaggaagacccagtttcccttgaaatgaaggaatggacgatacaggattttctacatgatcaccaatccccttcccggatataggaggaataggttggaaggggaagtaactgtctggaatgatattattcagccttcgcaaagtctcctcggaggaaccaggaaacataggcttacaaggagttggttggccatcatgtttttgttcgctagaatgatcaacagcaggagtcaacagcggtttgttggctagttcaccactagctcttttttgctcctttgtgcttggcccacaaactgaccctttatatgagttcatctgatcagcatttggagcacaaaggccaagaacaggtaaaaggtgatgtggagttcctgaattggagatatctgctgcctttgggtgatgttttgatgaagcagcattgccagtaagcttggcataaagctcttgaggaatttcaggatatctcttggttttcttcgaggattgcttcatttctgcagttgattcaccgagacgtttagccccagatggctgcacaggattgggatcttctacaattctcaagggatttgcactggaatcatatagtttcatgaattcttcaagtctgtcatcagcataattcttaatcacatggcgctgagcaatcctttccttttgtctagctcggagtttttcatatttttccttcaaagccagtccagctgcagtgtattctcgctttggttcatcctcctcatcagagtcctcgcttaaagcttcattaggaatggttgcaaatgtttccctgtaagaaacagccttccttaaacgcttacctcgaccaagagatgcttcctcctcagtttgatactgctcccatctgacacgtaagagtttatcccattcattttcttcaacacgattagctgcatcctgctttgcttcagatgcctgctcgcaaccatcattatcaatatttgggatgtcctcggtggcaccagggtcatcattcagctcatcgttccaatctattgactttacagtgccaagcatatcattgtccaagtccccatcagtgctttcagctactgttgatggaacgttggatctgtcaagaagctttgtgatagcattttcatcccaaataaatttagcagaaccatcagcacatctgtcttcataaacatcgcctagtccaccagtttttcttttatgcttaaactcaacctctgctacatcatttttagcaccagaagcttcattattatctttaactgcaacatcgctattcctgaagagttcctctgttccccagcgaatgatatcttccacttccttctgtgattctgatttgttaacaaaaagttgatcaagcatcaattttttcttcgcaaggtgcaagatacgctcctcaacactagcacgcacgacaagcctgtaaactaaaagtctgtttgactgtccaattctgtgtgctctgttcattgcctgtatatcagcatgtggattgaaatcagaatcatatatgataacagtatctgcagttgccaaattaattccaagcccacatgaccgcgtagatagcaggaatacaaaacgactcttgtcctgattaaaacgagcaattgctgcctggcgttctgccacagatactgaaccatccactctttcaaatgttttcggaccaaactcccaagtcaggtaatcttcaaggatgtcaagaagctttgtcatctgagaaaaaataagaactcgatgaccatccttgtgtaggattttaagcatagagtgcaacaaagttaactttgctgaggcctttattcgcatttcatgcaagaactctggtgatcctgattcaggttcagttccaggaataagatacggatgattgcagactttccgaagttgcattactatgttcaacaatgactggtgagcaccacctttcccaatattgcgcaatacttggtagttctttgtaagcatagcacggtagtattcagcctggattgatgtcaattcaacaggcaccattcgttcagtctttggagggatattttgcattgcatcctttttcagtcttcgaagcatatgtggagctacaaggttcttcagctcctccactttctctgttgttgtaaggtcattgaatttctcctcaaatgaagctagagaagggaaagaagcaggttgtaagaagttcaataagttatacatttcaccaatgttattctgtaacggagttccagtcagcaaaactctatgctgaaatgataatgtattgagtaaactgaaaagtttgctgctagaattcttcagacgatgaccctcatcgactataagaacctcccatgacacagaccgaagatatgcagcatcaacaagcaccatttcataagtagtgagcaatacattgaacttatgagatttcttgattttacccatctggcttgcatcaccctcatgccactcatattgacgaataatagatcttgcccgtgcagaaccatgatactccacaacatttaaatgaggtgcccatgatgcaaattcagccatccagttgggcatagtagaaagaggaaccaagacaagacatggcaagttaatcttatattcacaacatagggatgatagaaaagcacaggcagacacagtctttccaagacccatctcatcagcaaggataacattttttgacttgtaccagcatttgcgtagccagttcaatgcttccagttgatgagggaagagcatgcctccctggagttcttttggctgctcaaccagcatattaaactcttggtgttcccttggctttgcatggctacctcccttatccttatccaaagcctgggattcaaattttttgaactgagtgaccaaatgtgcatacttcaccattgtaggttcatctaatctttcccacgtgcattcgtcatatggaagggcacaccatttgatcaaagcctcttctatttcatctgttccgtactttgctttgtagttttctagtttcctttttgctaatgctttcagctcagattcagaaatccagctgttatggatattcgatttgccaacccatttaactaaaaactcataagtagttccgtcgtgctccttcaattcagtttcttgtattttcccatgcaatttactatcaggtgtatgttcttgtttagtgtggacttctgtgtcagctttggaaactggatgtttggtgtcattcttttcttctggaatatcagttactgtctcatattcaccatttactgaagctgttacatatgtctgtactgctccagcatccttaacagtgacgatttgatcagcggaacatgctgatgctgtattcatgatttcttttgcgttaagtgattccttgtgtccatgggatctaacattactctccttttgagcatcagaacaatccaaattattttccccaccatcgtttgctaattcatcagcacatgcatcctctgtcacattagtatcactattagaagactgaatttcttcatgaagtccttttaaaagggcttgactaggttctggtgcaccggatgcactaggaggggccatatcaatctgctctgatgaagcatgggcaggtgaaatgatttggcttgtctgaagtcgacagcctaggatgcgatcaacctgcagatccccctgagttgttattttgtctcctgcaccaccatgctccttttcagttatatgaacagcattctcagggtgctttttatcaacaaatttcactttcttttttcctttcttggtacttgatgcaggtgttcttccatccaacgattttctttttgggggcggcgattcgctgtgctcaagagaagtagatggttccattgaagaatcactgtccacatctgatgccaaatattggaccttttttgcttcggatctcttactgtctctgtgattgtgttgcttcttgttcttatatttctttggagataattccatgggatgcagatgtttcttcactttcaaagcacttccgtgtttctcctgtttctcttctgaagactttccaagtaaccctgactttgatgatgtggtatctgtagatagttccttggttgaacgcttcttcaaatgtaatatcaatggtttccttttctcaacttcattgtcttttgcacctggttcatcatccctaaatgcagcaccacgtgatgtgttaaaagaggctttgttttgtggagatggggatgggctatctgatgtggtgcttgtgcgcattctccttgttctttcacgtttagaggtgtcagcatcagcattgtctaagagcttcaagctaactttttttgtacgacatcttgggcattgccaatttccaggtggtgcacgcttgagaggaggattaagacattccaagtggtatgttcgtggacagctatcacagcacagcaaattgccaccgagatcacattctacacactcgtagaagtacctccctttgtaaccaccaacacaattagcctgcactagatacatccttgctactttacttccaaccctaacatcattcaaatgtttcat

SEQ ID NO: 98674 - DNA, 532 bp, Oryza sativa
  Clone ID: PAT_MRT4530_96559C.1
cccacctatttatgaatctgttttatatcttcacaggtcacactttcttacttaagagtaccccatgtgcaaagtgtccttgcctttctattgtttgaactgcactaacaggacctgtcccataaaatgtgtagttactactttggagaaaatattttaaatttttgtctctgttgcgcctgattggatgaaatcagaacacatagatgcagtattcatgtcaactgacagcaggaaaacttttggtgttagattgcattcacaaatggaaggtttctacagctgtagaaagtggtttctatcttctaaacctctctttttttctcttaattttttaaaatattttttcaactataataagtgcactaatagtatgcaaatttgttccataagtaagcattcaattacaattggggtcttcagatactgaaattctcctgaacagtatatgatgtatttattgttcttccctgtccagacatagatgttgatatctgaattagacagaagcatcatcagttcggacataata

SEQ ID NO: 98675 - DNA, 1090 bp, Oryza sativa
  Clone ID: PAT_MRT4530_9655C.1
aaaaagttttataaaaagaaaaaccctaaaagtcccccttccttcccttgggccggcccggcgcatctctcctccccccactctctctctcctctccccgctgcccactcggcctctccccgcgcgcgcgccgctgacgggcgggcccgcccgccaccctcgctgacgggtggggcccacccgtcatccccttcctcccgccgctcccgccgcctcccccgcgccctagcgccgccgccgctgcaaatcctgccgcctccagccgtccccgcgtgcaataaagtggggggaataactccccgtgatcccctctccctttccccccatttttccctctctctctcgcgttcaaacgggcggatttgcccccgcaaatctcgccggcgccattgatggcggccggacctcccgcgccggtttccttcccctccggccgctctctcccccttccaaccctatttaaaccctccccgcacttccttcgcccgtttccaccctttgccgtgccttctcctcgccggaatcgagctcgcgccatcgcctctctctccgccgtcgccgccgagctccggttcaccgccgtcgtcgccccggaccgcctcccacctcggcgccgcctccttcggcttcaccgcatcctcgccgacctcgtccacctctctgtttcggttgccgaccgccggagcgccgctgtccccgtcgacctgagccgcgccaccgcctccctccgctccggccgcctcctccgtcgccgccgtcgccccggggtgagccgtggaccgtcgcctcctttcccccttccctcccctctctcggccgccgctccgccgcgccggtggtcgccggcggcgatcatcggggcacaggcgcgccgtctcccgccgaccgcgccggcgtggccgccctcgggtgcggctgacgtgtggggcccacggcgccggccggtgtgagcccgggtgcacctggtccaccgtggactgtgaggctgccgcgtgggccccactcccgtggacccggtccgcgcgcccctccccctcggcttgttcaccctagattaaacaaaaccccaactagtggacactctactcat

SEQ ID NO: 98676 - DNA, 144 bp, Oryza sativa
  Clone ID: PAT_MRT4530_96560C.1
aaagaagaacattgtggttttttattaattcaccatttgttaataggcttcctgacaaaggaaagccctagttttttaccacccccatagaggtatacacagggttagttttagtagcctagggaccagttttggggggcctag

SEQ ID NO: 98677 - DNA, 1305 bp, Oryza sativa
  unsure (1)..(1305): unsure at all n locations
  Clone ID: PAT_MRT4530_96561C.1
cccgtatctctcgcgtttctggtctaagttccaggccacttgttgccgcattccttctccctccctgcaaatccaatccaatccaatcccaccccaagctcgcggaggaggagatggggagaggagggatcggcggcgcggggctggtggcggcggtcgcgaaggcggacgtggagaacaccgactccacccgcggcttcgtcaaggacgtgaagcgcatcatcatcaaggtcggcaccgctgttgtgactgggccgaatggccggttggctatgggcaggctcggtgctctgtgtgaacaggtgaagcagctaaattttgaggggtacgaggtgattctggtcacctctggtgctgttggtgttgggaggcagaggctcaagtaccggaagctcgtcaatagcagtttcgctgatctgcagaacccacagatggacatggacgggaaggcctgcgctgccgtcggtcagagtgtgctgatggcgatctgtgacacgttatttagccagcttgacgtaacatcatctcagcttcttgttacggaccgtcgtccgatggatccaagttttgggaaccagctccgcgagactgttaattctctgttagatctcaaggttataccagtatttaatgagaatgacgccatcagtaccaggaggcaaccatacgaggattcatctggcatattctgggataacgatagtttggccagactgttagcgcaagaacttaaagctgatctccttatcatgctcagtgatgtggaggggctctatagcggtccacctagcgatccacaatcgaagattatccacacatacgtccatgaacaacatgggaagttaattagctttggggagaaatctcgtgtgggaagaggtggaatgcaagctaaagtagcagctgcttttactgcttcatcaaaaggaatacctgttgtaattgccagtggatttgcaatcgatagcattattaaggtcatgcgaggagagaaaatcggtacgcttttccatagggaagcaaaccagtgggggttgttccaaggaagcaacagcgcgtgagatggccgttgctgcaagagattgctccagacatctacagaaattgtcgtctgaggagcgtaagaagattttgctagacatcgccgatgctctagaagcaaatgaagatctaattacatccgagaaccaagctgantctggatttggcgcaagatattggttacgataaatcattggttgctcggatgaccataaagccaggaaagataaaaagcctcgcaggatcaattcgtgaaatcgctga

SEQ ID NO: 98678 - DNA, 422 bp, Oryza sativa
  Clone ID: PAT_MRT4530_96562C.1
gaggcgtcgcgcgtggcggcgccgtgcgggaggtgctgctcacgcagtgggaggggcgggacgaccagttgctggtgtacggtctcctcccggcaggggtggaccacggcgagctcatgggcagagcgcggttctgcctgtggccgaccggcgacgatgagggcgcggccgtggcgagccgccgcgtcgtggaggccatcacggccgggtgctgcgccgtggacatcgccgtctccttcctgcgccgccgtcgccgcaccacctgcacaccatcccagagccccgtgccgcgccaccgggttcgcctccatctcctcttgcctgacgccgacgctcgtggtggcagccatgcgctgtcactgacaaacaccaccgcactgccgccatggcagagcacgggcagggggccatggctgctctga

SEQ ID NO: 98679 - DNA, 1362 bp, Oryza sativa
  Clone ID: PAT_MRT4530_96563C.1
atgggcgtcgctgcaagcaactgcggcttgcagcgccgccgccgccgctgcccctcgtcggacgaccgtctcgaaggcgagctcgggcgcaaccttgtcggagaagttgttgcggtgcctcccgccggcgccggcgacgacgacgacggacggggatcgccatggtcggacctgccgccggagctcgccgggttggtgttctgccggctgctgtcccacggcgaccgccgccgcttccgggccgtctgcagcgactggcgcctcgccgcgcgggagcaggtagcggtaacgacgggcccgagctcgtcgtcgctgcagctgccgccgtctctgccgtggctcgccctcgaccgccgcacctaccagagcctccccgacggcgaggtgcaccggttcgccgacgggcccgggatcatggtgtgccgcggctcgttcgacggctggctcctctaccaccggaacggctaccgcgacatcaggagcagcttcctctggaaccccttctccggcgccgtgctagacctgccgtctcgctgcgacgacgccgccggcggcgagcccatgtgcttcgtcaacgccatcaagcgcaagatcgtcgtctgctcgccggacctcgtcgccgccgccgtcgagtacacctcgctgatctttcacctgccgaacaagcactcgtcgtgggcgaggaccaacccgaatatttgctgccatgacatcgccttccaccacgggaagctctactccatcaacaacaacgacgcgctctttgtccatgaattcttcaccaccaccgccgccgatcgcggcggcggttcggcgagggtcacggcatcatcggattgggcggcagtgaccgacgcgcggcctccgagggagcacctcggcaaccacgggtaccacctgaggttcacctcctacctcgtcgcgtcgctcgccggcaagctgctgctggtccggtggagcctccccgacgagctgttctccggcgagggggggcgcctcgccttctccctgctgagcaaccttatcacggtcagggtgttcgaggcggacatggaggcgcggcggtggacggaggtgacggacataggcgacgaccaggctctcttcgtcagcgcgacctgctccagggcactccgattgccggacaacaatggcggcggccgccatggatttctccgaggcaaccgcgtgttcatcgtgggatccgatttgggccgacgctgcggcggcggcggcggtggcattggctgctgctgctgctcatgcggtgtgtatgacatgagcaatggcaggttcagcacggtgtcactgaagagatggcgagctggacatgagcagaggtcgagggacacgagtgaatga

SEQ ID NO: 98680 - DNA, 3999 bp, Oryza sativa
  Clone ID: PAT_MRT4530_96564C.1
atggagatggaggctgctgctgctgcggccgcggcggcctccgacgaaaccctagccgccatctttgctcagctcaagccccacaccgtcaccctcctcgacctcatccgcacccgcaccccggcctccaagtccgccgcggcttcctccctccgcgccatggcctccttcctccgctccgcccccgccccggccttgcagctctgcttcgagaaggaagccaatgcgtcaggggagctcgacatctctgatgccatcgccgaaggcggtcttgcgtgcctagaggtgctccttaccaaatgccgcctcacctcggtcaatcagatggttgcattgctaaagaagttaactttcggggcaatgctttcaccttcggaggcttcagaggaattccgccaaggcatcataagatgcttcagagccatgattctgcagctacacccatgcttggaccgctcttgttcttgcaaacaagcaactgcattgtctacagccctatcttttacaagtttggaagttggcactatagttaccccaaaatactcggcacaaccagaagagtgcttgcttgcgttcctccagtcccaaaacgcttcagctgctgtggggcactggctttcactacttctccagtcatcagaacttgaggcatcaaggggtcaccgtggcagtgcagatgttagaaaagaatcactgattacactgcgtgttcttattggcaaggtaggttctgcggatgcacttgcctttttccttcctggacttgtcagtcgtcttggaaaggttctttacacatctaagaatatgataagtggtgctgctgggagtgctttgagcattgaacaagctgttcttggattgaccgaggccttgatcgtagtcctaaatgacaaggagaatttgagtgaacttgatatttccagcgttgagaatgtggctctttgttctggtggcaatagttctagtgaacatgtattgcagatgcttcgccaattaccggccaaaactttatctaagcagatcggcagtggtgaagctacagaagatgtgaacgctgatggcagtaaaacctctgctgatagaagagaactgcatgttaaacggacaaaaaaatggcttgaggaaacagctaataatgttgataaattactctctgcgacatttccacatctttctattcattcatctgagaaagtaaggaggtcggtggttaatggtataagagtccttttgtccagctgcagctatacactaaggaaaagcaagatgttgcttgtggaatgcttatgtattctggcatgtgatgatgcagcatctgtgtctgaggctgcgcaagactctcttgattatcttttcattgagggtgagagagttctaacagaagatgatgtttctgatatttttaccaggtttgttgaaaagttaccacaaatggtacttggtagtgaggagaccactgctatttcgcatgctagaagactactagctctaacttattatgcaggccctcagtttttggcaaattatcttcaccgttctcctgttgttgcagctcgtttatttgactgtttgggtttatgtatcagtcaaagttcacaattttctggttccatggacaagctaattgtttcaaagccactgtctgttggatatctattttctgttgctgagttaaaaagtggtgcctatcctaaagatgaaaactatggttttcagcatgccatgcctgcatcaacagccaccaaaatatctgttatccatgataatggtttgccaaatacaacacatagttcagttgactatgagttaccccatgtacctccatggtttgttcacgtgaatagtcagaagctttattttgctcttgctggaattgttaggcttgttggtctatcggcagtttcaggcgaagaaaccagtgcatcactgtctctctttgttgatatcctacttgatcagttcaggaggttgagcactgagctgcggagtggtgggcagaggtggtacatgaaaagtgatgctgggcaaacactacgccaggcaagctctgctgtttgcatgctcaatgagctcatatatggtctatctgatcgttccctcagtatatgtttacaaatattcaacaagaactcagcacagatgataggagcacctggtcaaaatgatcagttaactgcttttggccagaataatggaggcactaacagaaatatttggaagatcagtgagcaaatgggcacgaaaaaccacattattcattgtatcggaagtattctgcatgaatatatggcaccagaagtttgggatcttccaacagaaccggactctgaactatccctaacagagttgaatattcccttgtatttctttcgtgatactgctgcattgcaccaagtaatgattgaaggaattggagtatttggtgttgtgcttggccaagattttgcaagtagtggatttatgcactcttcactttatcttctgcttcgaaaacttatcagctcaagtgtacagataagaattgcttcagatgctgtcttaagagcactcgctgctgctggaggttactgttcggttggtcaatttgttgtggcaaatgccgactacattgttgactctctttgcagacagttgcaccatttggatctcaatccccacgtccctgatattcttgcttctatgctgtgttatattggtgcttctcgtgacattttaccattcctggaagaaccgatgcgtgctgtttcttcagagctggaggttcttggtaggcatgatcacccgcatttaactgttccatttctgaaggctgtttctgaggttgctaaggcatctcgacatgaatctgttagtttgccagatgaggtggaatcattctttatgaaggttagatcggaaggtgaagcaatccaaagtttgatagagaagagaagggatacctgtgcaatgcctgaaagaatggatgttgatgctcagcctgattttatgggattagaatattgggaggatctactttgcaaactaaatgagatgagaagatacaggagaatagtaggatctcttgttggctcttgtgtagtagcttccactccacttctatcttcaacaaaagaagcagcttgtcttgtggcccttgacattgtagagaatgctattatgtctatagccaaggttgaggaagcctataagtgtgaaagtcgatgcaaagcagttattgaggagacaattcaattattatcagtggatgaacttcatgatgacatggatgctgcagaagatgttgatgagaatagactactcccagctgtgaacaagctatggccatacttggttatttgtcttgggaacaaaatctcagtgtctgttgtcagaaaatgcacagaggtgttaagtaaagtcattcagatatctggaggcgatttttttgtacgccggtttcataaggatggatctgttatttggaggttgctaaccttatctcccttccaacgaaaaagaatggcactgatggatgagaaagctattattttaccatataggaatacctcacttacatccgaggagcctatggctgagatatccagccaaaagattcagattgcagtgctggacatgctcgctgaaatatcttccaacaaacgaagtgctattgctctgggaagtgtactaaagaaggtttgtggacttgtggtgggaattgcctatagtggtttgatcggcctgcgagaagctgctataagggcattgacgggaattgcttctattgattctgaccttgtctggcttcttatggccgatgtgtattattcattgaaccaaagggatattcctttaccacctaaacaagatctagtggagctgtctgaccttttgccccctccaatgtcatcaagagagtatctctttgtgctgtatggaggtgagggtgttagatgtgatatagatccttcatctgtacgtgaggttttcaaaagtatgcaggatacagtcttaacatga

SEQ ID NO: 98681 - DNA, 205 bp, Oryza sativa
  Clone ID: PAT_MRT4530_96565C.1
aacattggccgtcaggctgccgctgccgtcgccggtggtgtcggtgagaaagcccggtggtggtggttgtgccggcggcgaggagtggctgcaacaggatgggctgttgtgcatgggcggatcagcgggtggcttatggcggtggccacgctgttcgccggcgacggacccggcggcggcggccttcacgagggacggcgcatga

SEQ ID NO: 98682 - DNA, 432 bp, Oryza sativa
  Clone ID: PAT_MRT4530_96566C.1
gggcccaatcctttttatttttggggcccgaccttttgggttagggcttagagggcccacagacaaaaccaaaaaagggacaaaaccatgcaaaaaccaccaaggaagccgcggaaggccaacaatggggggggggagggaaaaaaccactggggagggggggaaagggcccccaaaaaaggagggggggggcaacccgacaaaaaaacggaagaaaaaaaaggaggagaagaggtctatcaaatcgggggggggggggtgcttctttcccggcgggggaagagagggccaccccccccggggggagggggacaaccccaccccgggggggggaaaaaaaccagacgggaatccgaattatgggggaaaagaaacgccttttcgtggttgaaaaaggggccccgcccttcccagggaagggaacccagaagc

SEQ ID NO: 98683 - DNA, 540 bp, Oryza sativa
  Clone ID: PAT_MRT4530_96567C.1
atggcggaagatgacgacgaccacggcaattgcctggacaggcgcccatgtctacgatactttctactagcgaccttcatcgcgactctcttatcgctcatagcgtacgggcagtggaacagcatcggcgcccgtcttcaactcaccctccgcgtcgacaacgaggccacgcgccgcgcgttctgcgccggccgggccagcgcggcggtgtcgtacgctggcgtgcagctcgcgcacgccgacctcccgggcgggttctgcgtgccggggcaggcggtcggctccgtgccgatcgtggcgaccagcgacggggtggggatacccggcgagctgtacgagcgcatggagagccagcggcggcggcgcgagcgcgtgtcgctggaggtggaggtgaggatggaggattgctgcggccggctgcctgtgacgttgtggtgcacggccgtgctgcatggccagccagaggggcccttcctttgccccttcgcctatatggccaagggtggtgagcctaggccatgtcttagttgtggttgttaa

SEQ ID NO: 98684 - DNA, 1851 bp, Oryza sativa
  Clone ID: PAT_MRT4530_96568C.1
agactggttgcggacctcaccctaaaccctagccatggcggcggccaaccttctctctcgcgcgctcctccctgctctaaaccctaacccaagcagccacagcaaccgcgtcagcccttcggccgtatctctccgctgccgccacggcctgacggcctccgttcgcgcctctctctccacggcagcgccgtccccgccgccgcggccggcggcggcggcggccgacggtcgggcgccgaagcgctgtttccggcgcggcgccgatgggcacctgtactgcgagggggtgagggtggaggacgcgatgggggcggcggagcggacccccttctacctctacagcaagcctcaggtggtgcggaacttcaccgcctaccgcgacgccctcgaggggctccgctccatcgttgggtacgccgtcaaggccaacaacaatctccgcgtgctgcagctcctgcgggagctcggctgcggcgccgtcctcgtcagcgggaacgagctccgccttgccctccgggcaggattcgatcccactaggtgtatatttaatggaaatggaaagacattggaagatcttgttttagctgcagagagcggagtgtttgtaaacatagacagtgaatttgatttggagaatattgtcactgctgcgagagttgctgggaagaaagtccctgttttgctcaggataaacccagatgtggatccacaggtccatccttatgttgcgactggaaacaaaacctccaaatttggtatccgtaatgagaaactacaatggttcttagactctatcaagtcatactcaaatgatatcacactggtgggtgttcattgtcatctgggatctaccattacaaaggtcgatatatttagagatgcggcaggtcttatggtgaattatgttgatgaaattcgagcacaaggttttgaactggaatatctcaatattggcggtggcctgggcatagattatcaccacacggatgcagtcttgcctacacctatggacctcatcaacactgtgcgagaattagttctgtcacgagatcttacactcatcattgaacctgggagatccctcatagctaacacttgctgcttcgtcaatagggtcactggtgttaaatctaatggtacaaagaatttcattgtagttgatggcagcatggcagagcttatcagaccaagtctatatggagcataccagcatatcgaactggtttctccttccccagatgcagaagtagcaacattcgatattgttggaccagtttgtgaatctgcagatttccttggcaaagacagggaacttccaacacctgataagggagctggtttggtggttcatgacgcaggagcctactgcatgagcatggcttcaacctacaacttgaagttgcgaccacctgaatattgggtagaagatgatgggtccattgctaagattcggcgtggagagtcatttgatgactacatgaagttctttgataatctctctgcctaactcgttttcctgcaattgtaataagatttttctcttgttatgtgtggctgtatcaggattcggattgatagcgcagtacagtttgctgtagaatcggtatttttttttattgtactgtgatgtcggtaccttattttatccaaagatttttggcaaattttgctacaggacacttaaaaataaaaaactttgctgtgagacactaaaaaacgtatatcttcttgtgaacattaaaaaatgtggtaattacctgtaggactctcgatgtattattttattatttttggtgaaaatagagaaagagtgttgaaagtaaaaaaaaaaaaaaactctctctctccaaa

SEQ ID NO: 98685 - DNA, 232 bp, Oryza sativa
  unsure (1)..(232): unsure at all n locations
  Clone ID: PAT_MRT4530_96569C.1
ananatnacanttttttgccnaanggnggnattttnnaaaaatntntntnnnggntntngnctntttagcaaaagagngcttacanattaanttnnncaaaggaccttcaagnnangtntcanngagtcatnngagctctncaccaagnctagntgngtagaagncgcgnggtcttcattntttcaccttagagcggcaactgtnactnctcganancaagtatggcgacaa

SEQ ID NO: 98686 - DNA, 645 bp, Oryza sativa
  Clone ID: PAT_MRT4530_9656C.1
atgtggggcccacatgtcaggcccttcttcaacctccggccgccgccgagaccgagcccgagccgccgtcttccacctccgattccgcccaaatccgagcccgattcctccggcttcctctcgttgtcctcttccgtttgccccctctcccgagctctcccgtgcctcctagcgccgccgcgacgtgttccaagtccgccgccgccgccgcccgtcttcggcgtcgtcgccgcgccgtctccgccgtcgccgtcgcttgccgtcatcgccaagaggtgcgccgtgggtgaacaagccgcgggcgcgcccgaaggcggcctcgccggcacggccgatgggaggcggcgcacccgcgccccgatggtcgccgccggagaccaacggcgcggcggagcggcacccgagagagaggagggaagagggaaagcgaacggcggtccatggctcaccccgggacgacgagggcggcggaaatggcgaccggagcggaggacgacggcggcgcgggctcgggtcgacgaggacggcggcgttccggcggtcggcgagcgaagcggaggggcggacggggtcggcgaggacgcggcgaagccgaagggggtgacgccgaaacgggaggaggtccggagcgacgacggcgactga

SEQ ID NO: 98687 - DNA, 304 bp, Oryza sativa
  Clone ID: PAT_MRT4530_96570C.1
actgctcccccctcccatactgttccactctctgctctcctcttcgcggcggccgcggacgcggcggcggagtgacgaggaggagcaatggcgatggtcttctgcgcctactccccatctgtcggcgttgtcacccactccgcgccgggcaggatcaggccgcctcgcggactcggattcctcaccaccaccaccaagtttaggcccctcgtgctcaccaagcgttggggatggcagggaaacatttccgcggctcggctgaggacgcgctgctgtctcatgtttcgcggcggcgaggcctatg

SEQ ID NO: 98688 - DNA, 3277 bp, Oryza sativa
  unsure (1)..(3277): unsure at all n locations
  Clone ID: PAT_MRT4530_96571C.1
atgcactgcctcgccccccacttcctcctcttcctcccactctcctccgcctcccgccacgcgctcccccacaccccacccgctcctctcctcctcccctcccacccagcccaagcccaagcccaagcccgcgccggcccgctccgcctcccatccgcgcgctccccttcccgcgccgctgcccccgtctccgacgacgacgaggacgaggaggatgacgaagagatagacatccgcgacgacgcggacgtggacgaggagtacgacgacgacgacgacgaggagctggacgaggagagcggcggtgaggaggaggaggaggaggaaggggatgatggggtggaggagttggaggaggaggagggtgggcgggaggggaccgctgcgcggaggcggcggtcggaggagtacaagtcgcagcgggtggggaagctggtcgccgaggtgcgggagttcggggaggatatcatcgactacaacgagctcgcggggatctacgacttccccattgacaagtttcagcgcttggctatacaagcatttttgagaggctcatctgtcgtagtttctgcacctacaagtagtgggaagacactaattgcagaagctgcagctgttgcaacagtcgctagaggaagacgcctcttctacacaacaccgttaaaggccttatctaatcagaagttccgtgatttccggaatacgtttggtgatcataatgttggtcttcttacaggagattctgctattaacaaagatgctcagatcctgataatgacaacagagattctgcgtaacatgctgtatcaaagtgtcggtatggcagcatcagaaggtagattatttcaagttgatgttattgttttggacgaagtccattacttaagtgacatttcacgtggcactgtttgggaagaaactgtgatatattgtccaaaggaagtccagcttatatgcttatcagccactgttgcaaatcctgatgaattagctggctggattggtcaggttccattaatacgtgatactttatcacaactttgggaaaatgacatgcttccagctatttggtttatttttagtagaagagggtgtgatgcagctgttgaatatcttgaagattgtagacttctgcatgattgcgaggctagtgaagttgagctggaacttaagaggttcaggatgcaataccctgatgctatccgggaaagtgctgtgaaaggactcttacgaggagttgctgcccatcatgctggttgcttgccactgtggaaatctttcattgaagaattatttcagcgtggccttgttaaagtagtctttgcaacagaaacccttgcagcagggattaacatgcctgctagaacatctgtgatttcttctctcagcaaaagaattgacgctgggcgccagctcttaaccccaaatgaattattccagatggcaggtcgtgctggacgaagagggattgatacagttgggcattctgttcttgttcagactacttatgaagggcctgaagaatgttgcgatgttatctttgctggacttgagccacttgtttcacaatttactgcatcatatgggatggttttgaatctccttgctggctcaaaagttactcataatcagaaagaatcggatgatattaaggttaagcgttctggaagaactttagaagaagctcgaaagttagttgagcaaagctttggtaactatgttgggagcaatgtaatggttgctgctaaagaagagcttgaaagaatacagagtgaaatacaatatctctcttcagaaattacagatgaatccattgaccgaaagtgtagggaagaattatctgaggaagactatgctgagatttcccttcttcaaaagaaattgaagtacaaagacaaagattcagttcagcatactattcctgctgttttcattggaagcctcagttcatttgcggatcaaaagattgtgagcttgatactattgcaggtggaaaatgattctcctgttgctggcaagcagaaagttgacaatgaaggacagcaatattacccatcttattatgtagccttgagttcagacaactcatggtatctattcaccgaaaaatggattaaagctgtttacaagacaggtctacctgctgttccttcagcagagggaggccctctccctagagaaaccctgaagcagctccttttgcgtgaagatatgatgtgggataaaattgcaaaatcagaatatggttctttgttatgcatggatggatctctggacacatggtcgtggagtctcaatgttcccgtgcttaatagcctttcagaagatgatgaggtagaacgattctcccaggaacatcaagatgctgtagaatgtcataagcaacagagaaagaaagtttcacaattgaagaaaacaatcaggagtactaagggtttcaaagaatttcaaaagatcatcgacatgagaaactttacaaaagaaaagatcgagcgtttggaagctagatctcgtcgtttgactcggcggataagacaaattgaaccaactggttggaaggaatttttgcagattagcaaagtcatacaagaggctagagcattagatatcaatactcaggtaatctatccgttgggtgagacggcagcagccatacgaggggaaaacgagctctggcttgccatggttcttaggaacaaggtccttttggatctgaagccttctcaacttgcagcaatatgtggaagtttagtgtcagaagggatcaaacttcgtccctggaaaaacagcagttatgtatatgaaccatcttctgttgttactggtgttataaactacttagaagagcagagaaactcactcgtcgatctccaagagaagcacagtgtaaagataccctgcgaaatagatgcccagtttgctgggatggttgaagcctgggcatcagggttgacctggagggagataatgatggactcggcaatggatgatggagatttagcccgtctgctcagacgcacgattgatttactagcccagattccaaaattgccagatatagatccggttctccaaaagaacgcacaaattgcttgcaacatcatggaccgggtaccgataagtgagcttgctggctgaaagtatgtgaaatctgtaattaccacactggaatggtggaaatctgtaagtaccccactgggaccatttgttttaaggtagccaattctttggttgtatcatgcacatgccagttntccaaaaaaaaaaaaaaaaaaaa

SEQ ID NO: 98689 - DNA, 1008 bp, Oryza sativa
  Clone ID: PAT_MRT4530_96572C.1
atgggtccgcgccgccgccgggctccggccacggtgctcgagatcaacgtcgtcaccccctcgtatccccccggccactacgacggctacaccatgccggatctgatcatcacctcccgcgcatggcggcgcctcacgagattgcacctgtcccacgcgtggctggacggcggcttcggcgagcagctcggcgacggctgccctctcctcgaggacctggcgctccgcaggtgcgccatggcgccggggttccgccgcatccggtgcggctcgctgaggacgctcgtgctccactacacgggctgtggtggcggcgacgccggcggcggcgacgaggaggaggaggaggagacgctggtgatcagcgcgccgcgcctcgcctccgtgcgcgtgaagatcacgtcgtacgcgtgcaggcatggcgtttcgttcgatggctccacggcggattcgctcgtggaggcgtcgatcagggtggggcggcggcggcggcggcgcgcgttgccgacgggggttgaagccgtgcttctcgccggcatggtaaatgtgacgaccttgagctcgaaggtatacaggcaaagggatggtactgtttcattgtatggggtgaattcccttgtggaggcatcgattgatgtaagtaactgtcaaatgtcgccaagcggcgaggccatgcttctcggtgccctgttcagtgccaccaatttggagttgaagggtactcgggcaatggcaatactggatgaggaattggataaattcccattattcaacaacctgagaaacttgtcactacactgttgtcttcgagacaaaggtaatttgagtgacagattcaaggctcttggaagattactacaaaagtctcttaatttggagaagcttactttgcaggatttctgggcatcatggtgcagaaatacaagttctgttctaggaaaaattcaggtgctcgtgttgcttctgtttatccccatccttttacatgttgcatcagacttaaattaa

SEQ ID NO: 98690 - DNA, 870 bp, Oryza sativa
  Clone ID: PAT_MRT4530_96573C.1
atgtgcttccatgaacatgaacgctggacgggccgtgccgccgcaagccctctccgcgagaggctcccgcgcgcacgtggtatattaggtcttgtaggctggtttgggctgcatgtcagcgagacggataggcccggcggaggagtaggaaagggagccaagtacgggagacggagatggcgtaggtcagtaccgaccagcggattctccaaggaagagcgtggcgagctcagcgcctccagcgatagagttgtcagcagcagcggagccgcccacgtcatcttagggtggctggggagggaggaacgccgcgtcggccgactggagtccgtggttgccatggagcatggcgaggcggaggtcggatttgcggcggcgcttggctcctcctcccatggtgtgctggcgagggaggccgcgttgcgctgctctgtctcgacggcggcgccacccaccaactcgcgcgtggtgggcagggttcaatctatcgagaaggggaagattttcggggtcacacgcaagccgcaaggatgggaggcttgtgtcgtcgttgtcgtcggcgcgccgaagaggcacggagtcactggcggccactccagccatgcgaggcccgcgtcgtcgtcgtcgtcgtcacgccgaagagccggggagcccaccggtggccactccagcctcgcgaggcccgcgcggtttgtgtcgtcgtcgcgccacggagcgccgtcgccggctactccagccacaccgctgccgccggttccgcggccgccgccgccgccgctcgctagcgtcgggaggatggcgacctgctgcctactggggcgagctgttggaggaggacgacgaagcaaagctgcagccagccttcgctaa

SEQ ID NO: 98691 - DNA, 267 bp, Oryza sativa
  Clone ID: PAT_MRT4530_96574C.1
atggcacgtagccttggatgcgaggaaactagtcggcgtaggacaaggcggtcaacattgaagacgaagacgcccaacagtgacaacaaagttgtgcagccatggcgtcgtgaaagtgaagacaccttggccgacggcgaaggaaagctggtggtgaatacaatgatgaccatcgacgactgtgtgaccatcaagccattcggcggcgacggaggcaagccggcggtgatgatgaagatgcccatcaacggtggtgtggccatctaa

SEQ ID NO: 98692 - DNA, 906 bp, Oryza sativa
  Clone ID: PAT_MRT4530_96575C.1
aaggggtggttccacatttgattgtggggtttgccttatctctaatgggccgatgacacaatattgttgacaaaagctactgaggagaatattctggctttgaaattcctactcttttgttttgaagaaatgtctggtatgaaaataaataaccataaaagtgaggtgtatgtcattgggtgagtaaagaagatggaagagagatttgctgatatgcttaactgtaaagttggtgcctagccgattaactactttattatggattcgtatgggggtggaaaagattggtaggagggagctcttgctagtaatgcagaaagttgaaaagaggcatatgtgtgtagggaaatctttactatgggtgtagagaaatcataattaattcttgcctttctagtatcaccttgtacactatgggtttttataaactttgtgaggagttctataagaagatggatgaagtgagggggaggttttactggcagggtgtggggaaaaagaggaaataccaaatgatcaattggcaagctctatgtagacctatggagtatggaggtgtggtctttttaaataccaaagatatgaacacgtgtctcttgagtaaatgggttatgaaaattaagggaaattaagatgacatgagtgttgtgctcttcagaaaaaaagaagtcactaatgaggtttcttgggatatatcctctacaagaaagctggacctcttggacaagtagagttttggggagattatggccttactaagtgggcttactctaagtgaggaaccagataaaacattttggcctcacacaaaaaatggtattttcacaaccaaatctatgcacaatctgatcaagcaatggggatgtgtagacctatggagtatggagatatggggttttaaaatac

SEQ ID NO: 98693 - DNA, 199 bp, Oryza sativa
  Clone ID: PAT_MRT4530_96576C.1
atggcacgtagccttggatgcgaggaaactagtcggcgtaggacaaggcggtcaacattgaagacgaagacgcccaacagtgacaacagagttgtgcagccatggcgtcgtgaaagtgaagacaccttggacgacggcgaaggaaagctggtggtgaatacaatgatgaccatcgacgactgtgtgaccatcaagccat

SEQ ID NO: 98694 - DNA, 1966 bp, Oryza sativa
  Clone ID: PAT_MRT4530_96577C.1
atggtcacaccaccgttgttgggcgactacatctttaccgaccagctgccttcgttaccgccgactggtgtttccgcctatacggttggatggtcacaccaccgttgttgggcgtctacatcttcaccgaccggctgccttcgccgccgccgaccggtgtttccgcctatacaattagatggccacaccaccgttgatgggcatcttcatcatcaccgccggcttgcctccgtcgccgccgactggtgttttcgcctatatggttggatggtcacaccaccgttgttgggcatctacatcttcaccgaccggctgccttcgccgccgccgactggtgtttccgcctatacggttggttggtctacactaccgttgatgggcatcttcatcatcaccaccagcttgcctccgtcaccgccaactagtgttttcgcctatacggttggatggtcacaccaccgttgttgggcgtctacatcttcaccgatcggctgccttcgccgccgccgacgtgtgtttcttcctatatggttggttggtcatactaccgttgatggccatcttcatcatcactgccggcttgcctccgtcgccgccgactggtgtttccacctatacggttggttcgtcacaccaccattgatgggcatcttcaacatcactatcggcttgcctccgtcgctgcaaactggtgtctttgcctacatggttggttggtcataccaccattattgggcgtcatcgtcttcacttctggtcatattgtctaccgccgactgattatctcgccaccatggctgcacaactccgtcgtcactgctggacacctttatcttcactaatacctatcttttgatgccgactagtttcttcgcctccatggttgcgcgtcttcatcatcatttattggagttatcatcttctccaccaaacgtcttcgtcttcaccgccggcttgcctttgtcgccgctgactggtgttttcccctacatggcttgatggtcacacagtcgtcgatggtcatcattgtattcaccaccagctttccttcgccgtcgtccaaggtgtcttcactttcacgactggcttcaaggaagttttcgttttcatcatcattctacttcttccatcgctgactggtttcatcaccactacggtcgcctcgtcaattgccgaatgattatcccaccgccatggctgcacaactctgttgtcactgttgggcgtcttcgtcttcaatgttgaccgccttgtcctacgccgactagtttcctcgcatccaaggctacgtgccatcttcaccgttaattagcgttgtcatcttctccaccagtcatctcgttcgccgtcaactgattttttgtcttcactattatgcgtcttcgcaccggtttgcttttgttgccgccgactcatcttcacgtcatcacggctatgcaactttaccaccatggtggagcgactacattttcattgttttttgcaccggcaaactctattgcctttacttcgcaagatttgctacttcaccaaccacgacgtctacaagagcctcgacatctcggcatgcatcacgaaatatgatgccgtgttattttactacaacaagtggtgcttctacaatttttaagaattctactcagacatcttcaacacgtatcttcaattaagcaatgaccactcgacaacaagaagcttcagttctagagtcggggctacacaaatacaagactcaaaattcgacagatgttatgtcaacatgaagcaatcaattaacaagccaatgagtcaatatcttcgtcttcacttccgagcaagctttctacttcatcaactccaattatttctccggcaattttggcttctccatcgccgccacaatctactccaaaattttccagaaccaagtttgagattttatctacatgtccgggagtttggagttatcaaccaattaacacagatt

SEQ ID NO: 98695 - DNA, 159 bp, Oryza sativa
  Clone ID: PAT_MRT4530_96578C.1
atggcctgcaggggcagttcgacgatggccggcaaccatggcgttgggagcttagggatgaagcagctcgacggggcaaagctcgatggcgatggcctgtttgttactaccctgagaaaaagtcgtctggccggagacatgcctgagactattttataa

SEQ ID NO: 98696 - DNA, 609 bp, Oryza sativa
  unsure (1)..(609): unsure at all n locations
  Clone ID: PAT_MRT4530_96579C.1
ctcctctctactnctctactctctctctctctctctacttcttctacttctccttcccgtcgcctcctcccacacatcgcatngtccctcacgccacacatcgcantatccgcatccctccacaccagcanaccagcgcctccaccacgcgcctccaccccatcacactaccacgcgcaacatccacctcccccgctccgccaattccaacatccccaaatncccaacatcaccacacgcacgccntcaccccacacgcgaaccgctccctcaatcacacttcggccgccgcccacccaacactcccccctccctctcaacacggntcccgcggcctctcgcccgcgcaatcacaccaaccaactcacacctcacacaattacaaatcaaaaatctcgccaaagccacaattggttcntctngccttgcctnaatgngtacactgggttcccacactccctctcctccccaaaacctcacaactngcgaattcgcaaatctacacacagccccccctccctncccctctccttaaatttccccctcatcaaaaaacaagaaaagaaacaacacacaaaacactaataaaaaaaaaaaaaaaaaaaaaaa

SEQ ID NO: 98697 - DNA, 2841 bp, Oryza sativa
  Clone ID: PAT_MRT4530_9657C.1
aaccaagtcaacctagctttgattgtgagttgactattagaatgactcggttatattggtcccaaatataaaccgtttctcatcttctaattctacccccttgccagttttggttatcaacactaagtgaggctatgaaatgctacactctcttcagcgatgtatgtatgtatgtacgtatagttgtatatacggagtatatatactacactactataccctgtacgccatgccgacctcgatgagggaggtatgcgggatgccgagcaccaccgccggccgccgcgagtttcgccggaggaagccgtacaccacgttgacggcgaacttcttcaccgccgacgatgactcgtgcgcgaacacgcacgtgtgcccgatcatgtacgacacgccggcctccttctcctccatcagctccttcacctccgccgcctcctcctcctcctcgccgccgccgccgccgtcgttgtcgaaccgtaccttcctcctgccgccgccgcctgcggtggcgtcgatctcgcacgagctcgtcgtcgtcccggcgtcaaaggcgtgctgattgcttccgccggaggacgacgtggcggggatgaccgacatggcctcgtcctcgccggaggcggcggcggacatccgatcgccgccgcctccgccgctgccgtcctggtggcggaggaactcgacgaccttcatcagcagttggttctcgaagttgaagtggtcccacctgccctccttgtacccataccggacgatgcaccggaacaggcggttcgccggcgagccgatcctgccgaccaagaacctctcctccggcgagaccttgggcacggcgagcgtctgcagcgagacgaagatgaggacccggtggaaggccgggaagttggtgacgaagtgggcgaacatgggggggacgccattggtggtgctggagtagacgaagccgacgccggggacgcggacgaggccgatgccggagctgaggccgaggaagtggtccaggcagaccttgttctggacctcgtgctgctgcttcatggcggtgccgtagtgccacgtggacatcaccagcagcgtggtgagggagaggaggagcgggagccagccgccatgggggaccttggcgaggcacgccgataggtagaggagctcgacggagccgaagacgacggtgaaggccgccgcccacaccacccaccggttccacacggtggtgatcaccaggaacatcaggcatgtcgttgcgcacatcaccaagatcactgcaagtccataggcgttgccaatcatctcggtgtctcggaatccaatcgtgacggccaagcagagggacatgagcacccagttcacctctgggatgtagatctgaccatggacatggcttgatgtgtgcaccacctttattcgcgggaaacaaccaagagccctacactggcttatgatggaaaatgtagctgagatgatcgcttggctcccaacagctgtggctaacgttgcaatgaacaacactggccaaaacacacggtctggaagagctttgtaaaagctactttggagatcctccctatgtttggacaggtatgcagcctcacccatgtaagccagaactaagcaaggatatacaacaattgtgaatccaagcctcagtgaaagctttgagaaatgccccagatcagcaaacatggcttcagcacctgtaaggcaaagaacaatccctcctagtgagctccagccatccttgccagccttcctgaagaagttgtatatgtaatacggggacagagcacggatgacactagggttccactttatgatgttatatatgccaatcccaccaatgcaagtgagccaggaaatcaagattggtgcgaataggaatccgacacggcgtgttccatagtgttgcaatgcaaaaagcccaattaaaatgacacaagcaaggagcacagtgtaattttcatgtagttctggaaacttaattctgagcccagaaactgccgccaacactgacattgttggggtcaagacaccatccccaattaccatgctagtacccatcagaacgaacagcagcagcacaacacgaagcgagtaatgcttctcgaagaaggccttgatgagcatgctgttcctcgactccttacaaggttcctccttgttgtatgccgacagagaaccatggtttgcacgcatgttgttcagaagtcccatcttggaattcctgcacagcaatgagtacagagcaaatgtgccaccttctccattgtcatctgctcctagaacaaggatgatgtacttgaggagaggtataagagtaaggctccagaagaccagagataataccccaaggatctcttcatcctcctcatgaagacgcaattttccggagaaggtgttcttgtacacgtacacgggtgagatgcagagatcgccatacacaactccgaagctctgatatgccagtagaagtgttcctttctgccatccccaagaattcctccccctgggcggcgcgccaccaccaccaccaccaccaccctccacatccatctctccacctctccgacgaccgccgccgccgccgccgccgctggaattctttctcctgctctcttgccctctctcccacggcagctggaatgctactgaattcttgctgccttcagaccctctctctctttcttgctgcaaccaccacagttgtgtaggagaggaaggagagaagcagttaaggagacgggaaaacgtgggaggaggcttctcacaaaaagaaggggggagagagagagagagagacagagagggcgccaaattgttaggagtgttttgcttccattccat

SEQ ID NO: 98698 - DNA, 363 bp, Oryza sativa
  Clone ID: PAT_MRT4530_96580C.1
atgaggcaccgcaggatttggggcctcgacatcctgattagccgtgcgacaactgcattgagttgtgcaggggggggcgacagtagcagctccgctgatggagccctaggttcagggcgaccagcgagcaggcggttgcagatccggtgcggggtggctgagcgcggtgccaacctagttgggatggcagaggtggcaagttgccttgccaggaggtggtggcggtgctggtggctagctggctcaggaagggatggcgcatcgatggcgttcaaccgagcaatgagcgggtatggcagcgtgactcagagcgcacctaaggcgcttgtccaggagcatcttgggctagctggtgatgtgtga

SEQ ID NO: 98699 - DNA, 435 bp, Oryza sativa
  Clone ID: PAT_MRT4530_96581C.1
atggtggcggtggctggtggtggccaaggggacggattgcgcacgcggtggaagacagggaatggtggaggcagcggtggcgacgaggtcgaggacatggattcgaggcggatctatcctagccgctctcctgcctctcccacacctagccggtggcgaagcgaaggtcaggcacaacggtggaggaggtcaatccagtggggcggtgctcaacatcctgaggtcaacttcaatggcgagctcaaggatgatgacggctgccacgacaatgacaacgacaatagggccttgagaaggttcctgcggctcctccaccccctctcctctcccagatctctcaaacacgcggcggctcaggccccgagtggtggatccgacagcttgaggtggtggggtcaccacaggcggtggagctcggtcatgggaggcgggtga

SEQ ID NO: 98700 - DNA, 297 bp, Oryza sativa
  Clone ID: PAT_MRT4530_96582C.1
atgggcgagaagagcaaattatacggtggtccgggcctagatgacacaccgtacaagtttgagatcgtccttgtacttcactggtacgaggatggcggattcaccggtgcgcgagcgagggcgaaggatccgcagctaagttggtcaccggtggcaaggcacgagcaaaacagatccgtgcccgagttggacgctgtcttgcgcacgtataactctggcgcccgcacactctctccgccctcctccttctccacccagcatggcaacaacgtgcagcgtgtaggcgtgctcagctaa

SEQ ID NO: 98701 - DNA, 138 bp, Oryza sativa
  Clone ID: PAT_MRT4530_96583C.1
cctatgcttgcggccatgcctccgcccacaggctggggggagtcttttcaatcttcgcgcggttttaggaacccaccgaacacgttccgatttcctcacccacactacagtgatacggcccctccaagctttggcttc

SEQ ID NO: 98702 - DNA, 234 bp, Oryza sativa
  Clone ID: PAT_MRT4530_96584C.1
aaaaaaaaaagaaaaaaaaaaaaaaaaataaaataaaacaagagaaaaaaaaaagttgttagaaaaaaaaaaaaaaaaaaaaaagtaaaagagaaggaagcacgacgagaaatttacaaaggtagagacactctaaaagaattgacttaacctccgctaaacaagggaaaaaaatagctaatactattgggggtccccaactaaataaactggccgaagttaaacaatacggca

SEQ ID NO: 98703 - DNA, 911 bp, Oryza sativa
  Clone ID: PAT_MRT4530_96585C.1
cgtcaatccccaaaccctcctcctcctctccggcgatccacccatcgatcggcgatgacgctggggagctccggcgccggatcgagcgtcgtcgttccgcgaaacttcaggttgctagaagagcttgaacgtggtgaaaagggcattggagatggaaccgtgagctatggaatggatgatgcagatgacatctacatgcggtcttggactggcaccatcattggtccacataatagtgtccatgaaggtcgcatctaccagctgaagctgttctgtgacaaggactacccagagaagccaccatctgtccggtttcattcaagaatcaatatgtcgtgtgttaatcatgagactggagcggttgactcgaggaagtttggtgttctagcaaactggcagcgcgagtacaccatggagactatccttacccagctcaagaaggagatggcaaccccgcagaatcgcaagttggtgcaacctccagaagggacgttcttctagaggagtatttacctcctggctcatctccagaattcagattcaacatcatcaacttgtatttatctggctcccgcgcttaattgttttctagttcaatttgatatatgccctgctttctgtgtaccaacaaccgagtccaactttgcgcctcgtgattcgtcgggtggctgttgattaaggagatgagtcggatgaaaagggtgatctggtttggcaaaattggcagtatgagggatgtaaaattggaaacagatgctgtgtcaagaaatgtgtaactgcaggtcctttatattgcctacatgaatatagtccgtgcatgcttttctttaagctggcggtatgaaaaaacgccagaatatacttctctctctctctccctcgtgccgattcctgcagcccggggatccact

SEQ ID NO: 98704 - DNA, 476 bp, Oryza sativa
  Clone ID: PAT_MRT4530_96588C.1
attagggaccttcttgattgtacagcagctcatcaggagggaggccggattggcgcgagaggcgcgtccggtagaggaggccggcttggcgcgagaggcgcggccggtgtttttagaggcgacctcggtgcgtggtggagctgccggtgggtgtggcgcggtcttcggcgcacgaaggttggccggcggggggcgtcggtgcaggggccccacatgtcggcagagtttgagtggtggtggagcatcggtacatcatccgtggattcgcaggtggcgagcgacgggtgaaaacctagcccggccttggccagaccgacaacgatggttatttccccctcctgagggcgttgtcgtgctgtctcacccctcaagggcagttgccgggcagtttagtgatcattcccctttctctccacgaagagtttagtgatcattcccctttctctccacgttcttcgtgtattgttcaattagtg

SEQ ID NO: 98705 - DNA, 1200 bp, Oryza sativa
  Clone ID: PAT_MRT4530_96589C.1
ccacgcgtccgaagaattgcactactccgtcgtgaaggctaaaaagggagggggatcgaggcgagaggaacgccaccgaacccaaaccccatccaatcaaaaattcgtacgggagagctctcgatttgatcgccgcgaccgcgaggatgtacaagtcgcggctgcaggagctgtgccagcagcggcggtgggcgccgccggagtacacccaccggtgcgcgggccccgcccacgccccgctcttcggcgccaccgtctccgtcaacggcgtggagttccgcacgccggaagacgccgcgcggtcggccaaggaggcgcacaacatcgccgccaaggccgccttcgaccacctctcctccctcccgctgccgccgcctccccctccctccgaaaaccaatcttcttacaaaagtcagttgcaaatttatgctcagaagaagggcaaactgttgccttcgtaccaaacaattcgggaaggtccaggtcatgcatctcggttcaagtcagtagtgactgtagatggcaaagcatttgaaagtccggaatactttcacacagttaaggaggctgaatccgctgcagcaaaacttgctcttatgtccttacctcaagaagcaagctcatcggagcaagtgccggtccagccattgtcatacaagaatcttctacaagaattagctcagaaacatggcttttccttgcctgtctacagcacaacttcagatggatcagtgcaggcctatgttcaaatcaactgtggtatttcaggatggaagttttcagggagaaccagcaaatactaagaagcaagcagagatgaatgctgctagggttgcttttcaacattttgaagacagaagaaaaaatgctctttcttccactgttctaagaggaccgcatttgggacaaggaacagtgcacatatctgctggacaagtcaagattgcagaacctgttttttcagttcccctagcatcaacagctacaagccacagtgcaactggtgctacagatcgtgattatcactcccttggctccactaatccccttccaattgctaagtctacaaactgcgctgatgtacatatccaaccttgcagaagaaaactacgccttaggaacgttgcggtagacaagaactggagccggtgcttttgtgaagttgtagcttctgccaagtttaatttacctcaggcgtag

SEQ ID NO: 98706 - DNA, 2674 bp, Oryza sativa
  Clone ID: PAT_MRT4530_9658C.1
gaatctgagttgcttgttcgtgcgccgccgccgccgccgattccgccgcatcccgccgtccccgcgcgcaataaagtggggggaatcattccccgtgattccctctccgttttcccccgcttttccctctctctctccctcggattcgttcggatttaatcccgcaagtttcaccggcgtcattgatggagccgagatctccgcggccgattcctccctctccggccgctctctccctctcccgacgctatataattgttccccgtgcctccctcctccgtttccgccactcgccgctcgctctccccgtcggattcgtgctcgcgccgtcctcctctctctccgccgtcgccgccgagctccggttcgccgccgccgtcgctccggacttcctcccgactcggcgtcacctccatcggcttcgccgcgtcgtcgtcgacctcgtccgctcctccgtttcgcccgccgaccgccggagcaccgtcgtcctcgccgtcccgaaccgcgccgccgctttcctccactccggtcgtcgtttccgccgtcctcgtcgtcccggggtgagccgtggaccgcccctttcgcttccctctcttctccgctctctcgggcgccgctccgccgcgccggtggtcgccggcggtgaccatcggggcgcgggtgcgccgcctcccgtcggccgtgccggcgaggccgccttcgggcgcgccccgcggctgccaagtggggcccggccgtcagccgcccgcgctcgcgggatgtttaacagagaaaaaggaaagaatgtcagcgggtatgcctcaagtaactcaagttttcaactcaatccaccactggcctcaagagagttaaccagggcacacccttggtccattccaagcatgctgcttagttcacagctaccattagttggaagtcaagaccaaaatcagtatgtgtttgatcgagcgtttgccacccaggtcaatgagcttccaatgccagaagaggatgtccccttttgtcacgattgtagagagcaaggacactatgccctgaattgtccatgggtatatgtcaaagaagccccttcctttggtttagcagggcagacatcgctaaaccagcctcctcgcaccaagtcaagtttgcagcctagtgtgcaaagtgaagagcccaatggagacaatccattgaatcctagaaaatgctttcctcctagcctttcgcaccacgtggggtcacgtactaagcaagccaaaggcaggaagagtaagaatcagaagagaaaggcaccgatgcgaactgaagaagaagtacgtaagatgactattaccagcacagaatggcctccaccaggaatgacaaaacgtcagagaagaaataccttccgaggtgcgccacagttgacagagcaacttttagctaatggaggtagagtgtctgatagtgaagattcagatcaagtctcctcagatgatgaagatgagaagtctccccaaggtttcaaccagaataaaatggaacataaggcatgctctcgttgtagagaaatcggtcatgttgccagctcgtgtgccactacatgcgttcattgtgaggaagaccatccacccgacaggtgtccaacgagcaggatcacttgtttcttttgtgaaggaactgatcatgtaccaaaagattgtcaattcagttttctgctgacgaagaagatggccaaccaacccgccagttccaacggagagaagcatcaaggcaacacaaatcctcgccaagattacagtttcagcctgactccagtgccaggacagaggaatcaaaatgagaaaagaaaatgccgagtccgggaagatatctgttgcttcaattgtcaaggaatgggtcatttcgccgacaagtgcccaaaaccgagaaacatagctgccggcacgtcagtccacgtaactccctgcactcagaagcttgctcctcagcgaattgtcatccatgcatcccgaagcagtcctatagcccgcgttgcaacagctccaactccagcgagagcattaccacaaggtgtcaatgctcaatttcagccccagccatcagttgacaagacagaggccagtatcggcattgtacctttggatgttccagcacagcagccaaggaatcaagtacaagatgaagaacctgagcaagaccatccaccaggggagtgtctcacccgcaggtgacatgttttctgtgtgaaggaacaaaccatgtgcccaaggattgccaacttagtgtgttgttgaccaagaccgcagaaatccaacgaacaactctacgattgtctcatcagctagtcagctccaacaacaacatcgatgatatcatccaccgcaccaatgctcctcttgctccacctaactttgcaataaatcatggcaataataccttcagcaccaaccactctctgcatcgacagcctcagcaaagaattgtcgtagatggaagaagttgtgtctctccccgacgtgaaatgggtaacttgtatgaggttgactccaaagatatgaactatacgaagttctggaactgaagccccatcttcaagtgccgcaacccagacgaagtcagctaaaggttcaaccagggacaagtcaggtgaagagaagattccacgataagttcttccagggcatcccgcgaaccggtccttaattgccat

SEQ ID NO: 98707 - DNA, 129 bp, Oryza sativa
  Clone ID: PAT_MRT4530_96590C.1
ctccggccaccgatcgacgcccctcctttcttcgttgatgtatcccccaccggcggctcggacgcgacgcaccgctgcctcgacacgacacagacgaggtcctcgacgtcgcaggggctcaccgtgtag

SEQ ID NO: 98708 - DNA, 303 bp, Oryza sativa
  Clone ID: PAT_MRT4530_96591C.1
atgcacgaggccacgagccacagaaacgaggccgtgcggtcgtccgtgcagtgcacacgctggccaatggccatgccatgcgtgcgcgacgacagggccagcttgcgtccatcgaggcagcggatgcacgcacgccacccgccgcaagattccaaagccatcagttcccgcgcgtgccaagccgcatcatgcgcccgtcgcacgtgcgaggccggggctttagctgtcgcctgcctggtcgtcctcgtcagttcactgctccgtatcacggagaggcccccccgccgcggccttttcgttggt

SEQ ID NO: 98709 - DNA, 181 bp, Oryza sativa
  Clone ID: PAT_MRT4530_96592C.1
tccaagcgtgagcagcgcggacacttggactggagaagaaaccaacaagaggggcgccgtagagtggtcatggatgcatgggagggcgtcgtggaccaaggtgcgcgagaacgcgcaggacgatgatggtgacgcgattgcggcagtcgttgaggtagatgacactgaagagccgatgtag

SEQ ID NO: 98710 - DNA, 354 bp, Oryza sativa
  Clone ID: PAT_MRT4530_96593C.1
atggctggcgccctcctcctgccacgtcggtacttggcacggcgagtgtatcagctcagcccacccgaggacctggccctggcaatgtcgacggtgaggccgtcacgacggttcctgaacgatgccacgatgaacggggatgtcctgacggagggcaggtacggcacggtgaggcgagtgtacgtcgtggcagaggaggacgagtggaagccggcggagatccagcggctgatggtgtcgtggaaccctggcacggaggtgagggcgttgcagggagctgatcatatgcccatgttctcaaaggcgagggagctctcagaattactcatggagattgccaacaaatatagttga

SEQ ID NO: 98711 - DNA, 357 bp, Oryza sativa
  Clone ID: PAT_MRT4530_96594C.1
ggcaacaaaccagcagcaagattttcattgatgcataaagacaagaaacagcaccgggggcaatcaaaacccggccaagaatccaatcccccccccaaacatatgcgagagcatacgaatccaaaccgggtctggtgggggaaacggattaaaggggcagtaacataaggggcgctccggcccacacaggattggcctactcctccattccccaaaagcccataaccaattgagcttcatcatccccaaacaataataaagattgcccaaacgggaggacacaaccggcgacactcaaaaggggaccccaggaaaaaccccggggggattacccgttttgggggacccgctcctttt

SEQ ID NO: 98712 - DNA, 3105 bp, Oryza sativa
  Clone ID: PAT_MRT4530_96595C.1
atggggtggacgtggtcatacgtggatagggcctcgcgttggattccctggcccgattactttgcactgtgcaaatttcgatttccgcgcttgtccgtagccgttttttatttcccctcgctgatcccgctctctcctcgcatttctctctctcgctttccccttttcttctcttctcttctcgttttctccgcgaggcgagagagagatctcgtcggagtgagtgcttgctggagaggtttgtctcgtcggtataagtgctcgccggagaggactgtcttgtcggtgtgcatgctcaccggagagatgcctcgtgtccaaacatcaaggttgggtaaaaatcccattgaagttgattctgatggaggtgaagatttacatgttgattatgaagttggtaatgatgttgatgaaggtcctgaacatggtgaaattgatggtttattctctgttgtgctcaggaaaatgattgttcaagaagtgaaaaagaatttggttgacacttcttctgtcaattttcacaatcccattgataagaaatctaaagttcattcgaagactgagccctcatatagcagattctcaacaaaatatttctcaacagttctatcttctttatctcctgatcagcagcgtactattggtgactatgataaagtcattgcaattaataaagaatgtgttcattatattttgggtctgcctattggtggtatggagttcccaactgattgtgatgctggaaagtcctttattctttcaaagtttggcaagagcgctcttccatctgtgagattctttggtgataagttcatccgaaaggaaactctctctgatgatgaagttattacttcatttttgattgttgcaatggcttgttttctttgtccaaactcttctttggtccctagcaccaagtatttgactgtgtttgagaatgttgatgagcttcggtcatatgattggtcaaaatttgtgtacgaatggatgatgacttccatcaaaaagatccaaaagtttaataccttgggtggatgctggtttctctgggcagtgctttatctggattatgttgagtttggtgacaagaatattcctattggttttcctagaatttctcactggaagaataatatgattactttgtattctgaccttgacaaagttgatgaagaaaactttggccttaggcccattaaggatttcaatgatacaacttatttcaaggttgtaccccctgaaaatagaattaatacattcagagataaattggagtctgctattggtactatgttacctgctttcattaaggagaaaatttgttcaatggttgttagtcattgttctgccaatcacattgttgacagtgagtcttgtgaagatattgctatcagcattatgctcttgctatgtgaacatgctggttctagagatggtggtgatcctgatgaaaacttaatttttgataatatcaaccctgggtttcagcctaactatgcaattgatgttgaaaatgaaatcccttgtgatgctcataacaatggaagtaccaataaatctgttgctagtaaagctaatgaaacaagttttcgccatacaccttctcatgataaggaattgggggtaaatgatgattctgttattgtctctaaatctgttgttagattttccctttcaccaaactttgaaaaagatcaaggcttactaacccctgaagttggatatgctaataactccaattcacgatttgcttcaggtcctactgtatctgctgtagctgctgttaggaatgttgcaaataaaattaaatcaagattatctcaactcaacaatgatgacaaaagaggaccattgttccctgatttaattgattcttgtgaagatgaagctgttggttatgctaagtcactttcatgtcaaaaggaatatcttaaccctcgatatgtcacttcctcttcatcacagcctggtatatcttttcactgtcttgacaattcacctattcaagtaattggtataaataataatgaaggaacaagcagaactcattgtattcagaatgtgaagaagaggcgttttgatgatgttactaattctcctgatgtggaatatcttggtcattctatatttcctgattgctgcaaggtattgtgtacccaaactaataatttgtataatgccaagaacatgttgaaaagtaacaacctggatttgagttctaccggtggaaaattacctccccatggccctagaagagttttagttccttctcggaaattttcagatccttatgttctttctgttagacgccaatttccagtgtcagatcaagaaaagagacattacaatgcaatatgcaagttgtccgagagctctaaatggcatagttatgatgctgtagacattgataatgttagagcaaaattctcttcttttgggcaatctctcatgaaaggtggtattgtattgagctatgttatcaatgtgttttgccgtgttttgttcaacaacaatcatccttcaaactccaagagacactatttcttctcttctattggtgaactattgttaactgatctatcttgtgctgatttgagcaaggtgaaaagatcgtttcttggagcagctagtgctaggaagttgcacctttctgacatgctatttttccccatcgaacaccttgaacattggttcctttttgttgttgatataaaggacagaatgttggtcctcttagattctttacatgaaaaaggtgatccctattttgaagacattgaatgcttactgatcaataatttacagacattctgggattcttatgatggctcttcaattgattttactactttgaagaaagtttacccttgtgttccaaaacagagatcttgctttgattctggaatttttgttatgaagtgtatggaattgtggtcatcaagggttgttctaccaaatgaattttcttcagatgatattgacaatattcggatgctgtatgcaaatcagttattcttccatccaacgaataaaatgctgcagactgaagttgaagaagttgtgctcaattggtttaatcctgatcaatttgctggtgaaggctaa

SEQ ID NO: 98713 - DNA, 4938 bp, Oryza sativa
  Clone ID: PAT_MRT4530_96596C.1
atgggtctctgtttcagcaagaagcagcaagtgaggcggcggcgagaggagcagcagcagccgccgtgccatgaggccaggaaggccggcggcggcaagaaagctggtgctaaggaggtcgcgatagtcccggaggcggccaagaaggcgccgccgcccaggaaggctgttcccaaggcggaggagccggcggccgacaagaggacggtgttcgtcgtcaaggcggccgcggccgcggctgctgccgaggtcgccgcctcggcgagcggcgaggcggcggatgaggaggcgaagaggcccgccccggaggaggaggaggcgaagcccgtcgtcgtcagcagggtgccggtgcggacctcgagctgcaccaaggaagaggtggacgccatcctgatccagtgcggccggctcagccggagctcgtcgtcgtcggggaaggtggcgtcgggtgagggcggcggcgggcaccggaggtactctggatctaagaggagctacgatttcgaccgcgagaggaggggcggcggcggcggcggcgtggacgacgactgcgactgggagaggcagggcgccgccgtgtccaggccgtcgccgcgccggaggacgccggagcggaagcggtcggggagccacgagaggagcggcggaagtggaagcaggagagtgagccgttcgccagggaggcgcgcggacagcgtccccgcgacggcgagcggcgagcgggcctcgcggcagcagccggggaagatggtgtcggtcccggccagggagaaggggcgggcgccgtcgcccgtgccggccgcgtccgggaagaggtacccgtcgcccaggtccaactccccggcgagggcgggggccgcgggtaatgagaacgccgccgcgcagctggcgcacgggccgtctctgagccggagctcgtcgcggaaggccgagcactcgccgtaccgtcgcaaccccatggcggagctcgacgagaacacgctcggcaaccaccacagttgcaacaacaatggcaggccccaaaagaaacctacggagagtggcggcgccctgccgcagaaggtggcggagtgggctaaagatcaggtagccgcaagccggacggcggcgaaggagaagcaggagatcgtggaggtgcccgtggcatcatcagacaccaaaggggggaattccgggaggatgaaggcgacgcactcggtgagcattgtggccgagagcgtcgtcaaccagaagggccggtcgtcgaggagatcttcccacgacttcgacaacaatggcaactcgtacgcatccctgctcctcgaggacatccagaactaccaccagcagagcaccggctccgccgccgccccggcgccagcgttctcgctcccggcctgcgtgtccaaggcctgctccatcctcgaggcggtcgcggacctcaactcctcgtcgtcggagaacaagagcttcgagctggaccggtcggccaacgacaagtgctcggcaaacgggaggtacggcgacggcaaggtcgccggcggcggcacgctcgtcgtcgagtcggaggttgttgtgaaggacgacctgatggagccgagcctgcacaagtacgtctccgtgcgtgacatccgaggcgaggcggagccgcaggaatccgccgggagcaacagctttgccggcaacgcgtggacgccctcgtgggagcccagttccgtcgattccaccgaccggacatggacagcgtcgcagtccaacaacggcgacgaggtggagcagctcagcagcggcgcggtcagcccactggagctgtcgtggcagggcaagcagaagctcccgtcgcaggagccaagtggtggtggccgttcgcgggtgggtccaactggcaatgctcaacgcggacgcagcgctcatcgtggcggcggaggcgctgtcaatgcgcgatccgatgttcgtgctgctccggttccagcccaaggggatgtggcttctctattccgatccatgtcccgtagtcaatcaacgtgtaggtccgatttgctcaccggaaagatgcctcgtgtccaaacatcaaggttgggtaaaaatcccattgaagttgattctgatggaggtgaagattttcatgttgattatgaagttggtaatgatgttgatgaaggtcctgaacatggtgaaattgatggtttactctctgttgtgctcaggaaaatgattgttcaagaagtgaaaaagaatttggttgacacttcttctgtcaattttcacaatcccattgataaaaaaaaatctaaagttcattcgaagactgagccctcatatagcagattctcaacaaaatatttctcaacagttctatcttctttatctcctgatcagaagcgtattattggtgactatggttttaattctttgctgatgtttgacaatgcttatgtcccaaacaaatttgcttcttggattgcaaatcatgttgatgtgaagtcttctcaaattgttttaaaagataaagtcattgcaattaataaagaatgtgttcatcatattttgggtctgcctattggtggtatggagttcccaactgattgtgatgctggaaagtcttttattctttcaaagtttggcaagagcgctcttccatctgaaactctctctgatgatgaagttattacttcatttttgattgttgcaatggcttgttttctttgtccaaactcttctttggtccctagcaccaagtatttgactgtgtttgagaatgttgatgagcttcggtcatatgattggtcaaaatttgtgtacgaatggatgatgacttccatcaaaaagatccaaaagtttagtaccttgggtggatgctggtttctctgggcagtgctttatctggattatgttgagtttggtgacaagaatgttcctattggcaagaatgttcctattggttttcctagaatttctcactggaagaataatatgattactttgtattctaaccttgacaaagttgatgaagaaaactttggccttagacccattaaggatttcaatgatacaacttatttcaaggttgtaccccctgaaaatagaattaatacattcagagataaattggagtctgctattggaaccatgttacctgctttcattaaggagaaaatttgttcaatggttgttagtcattgttctgccaatcacattgttgacagtgagtcttgtgaagatattgctatcagcattatgctcttgctatgtgaacatgctggttctagatatggtggtgatcctgatgaaaacttaatttttgatgatatcaaccctgggtttcagcctaactatgcaattgatgttgaaaatgaaatcccttgtgatgctcataacaatggaagtaccaataaatctgttgctagtaaagctaatgaaacaagttttcgccatacaccttctcatgataaggaattgggggtaaatgatgattctgttattgtctctaaatctgctgttagattttccctttcaccaaactttgaaaaagatcaaggcttactaacccctgaagttggatatgctaataactccaattcacgatttgaacattttcgatctgcttcaggtcctactgtatctgctgttgctgctgttaggaatgttgcaaataaaattaaatcaagattatctcaactcaacaatgatgacaaaagaggaccattgttccctgatttaattgattcttgtgaagatgaagctgttggttatgctaagtcactttcatgtcaaaaggaatatcttaaccctcgatatgtcacttcctcttcatcacagcctggtatatctttacactgtcttgacaattcacctgttcaagtaattggtataaataataatgaaggaacacgcagaactcattgtattcagaatgtgaagaagaggcgttttgatgatgttattaattctcctgatgtggaatattttggtcattctacatttcctgattgctgcaaggtgttgtgtacccagactgataatttgtataatgccaagaacatgttgaaaagtaacaacctggatttgagttctaccggtggaaaattacctccccatggccctagaagagtcttagttccttctcggaaattttcagatccttatgttctttctgttagacgccgatttctagtgtcagatcaagaaaagagacattacaatgcaatatgcaagttgtccgagagctctaaatggcatagttatgatgctgtagacattgataatgttagagcaaaattctcttcttttgggcaatctctcatgaaaggtggtactgtattgagctatgttatcaatgtgttttgccgtgttttgttcaacaacaatcatccttcaaactccaagagacactatttcttctcttctattggtgaactattgttaactgatctatcttgtgctgatttgagcaaggtgaaaagatcgtctcttggagcagctagtgctaggaagttgcacctttctgacatgctatttttccccatcgaacaccttgaacattggttcctttttgttgttgatataaaggacagaatgttggtcctcttagattctttacatgaaaaaggtgatccctattttgaagacattgaatgcttactgatcaataatttacagacattctgggattcttattatggctcttcaattgattttactactttgaagaaagtttacccttgtgttccaaaacagagatcttgctttgattctggaatttttgttatgaagtgtatggaattgtggtcaccaagggttgttctaccaaatgaattttcttcagatgatattgacaatattcggatgttgtatgcaaatcagttattcttccatccaacgaataaaatgctgcagactgaagttgaagaagttgtgctcaattggtttaatcctgatcaatttgctggtgaaggctga

SEQ ID NO: 98714 - DNA, 658 bp, Oryza sativa
  Clone ID: PAT_MRT4530_96597C.1
ttatgatgctgtagacattgataatgttagagcaaaattctcttcttttgggcaatctctcatgaaaggtggtactgtattgagctatgttatcaatgtgttttgccgtgttttgttcaacaacaatcatccttcaaactccaagagacactatttcttctcttctattggtgaactattgttaactgatctatcttgtgctgatttgagcaaggtgaaaagatcgtttcttggagcagctagtgctaggaagttgcacctttctgacatgctatttttccccatcgaacaccttgaacattggttcctttttgttgttgatataaaggacagaatgttggtcctcttagattctttacatgaaaaaggtgatccctattttgaagacattgaatgcttactgatcaataatttacagacattctgggattcttatgatggctcttcaattgattttactactttgaagaaatgtatggaattgtggtcaccaagggttgttctaccaaatgaattttcttcagatgatattgacaatattcggatgctatatgcaaatcagttattcttccatccaacgaataaaatgctgcagactgaagttgaagaagttgtgctcaattggtttaatcctgatcaatttgctggtgaaggctga

SEQ ID NO: 98715 - DNA, 1281 bp, Oryza sativa
  Clone ID: PAT_MRT4530_96598C.1
atggagttcccaactgattgtgatgctggaaagtcttttattctttcaaagtttggcaagagcgctcttccatctgtgagattctttggtgatatgttcatccgaaaggaaactctctctgatgatgaagttattacttcatttttgattgttgcaatggcttgttttctttgtccaaactcttctttggtccctagcaccaagtatttgactgtgtttgagaatgttgatgagcttcggtcatatgattggtcaaaatttgtgtacgaatggatgatgacttccatcaaaaagatccaaaagtttaataccttgggtggatgctggtttctctgggcagtgctttatctggattatgttgagtttggtgacaagaatgttcctattggttttcctagaatttctcactggaagaataatatgattactttgtattctgaccttgacaaagttgatgaagaaaactttggccttaggcccattaaggatttcaatgatacaacttatttcaaggttgtaccccctgaaaatagaattaatacattcagagataaattggagtctgctattggtaccatgttacctgctttcattaaggagaaaatttattcaatggttgttagtcattgttctgccaatcacattgttgacagtgagtcttgtgaagatattgctatcagcattatgctcttgctatgtgaacatgctggttctagagatggtggtgatcctgatgaaaacttaatttttgatgatatcaaccctgggtttcagcctaactatgcaattgatgttgaaaatgaaatcccttgtgatgctcataacaatggaagtaccaataaatctgttgctagtaaagctaatgaaacaagttttcgccatacaccttctcatgataaggaattgggggtaaatgatgaatctgttattgtctctaaatcctgctcttcaggtcctactgtatctgctgttgctgctgttaggaatgttgcaaataaaattaaatcaagattatctcaactcaacaatgatgacaaaagaggaccattgttccctgatttaattgattcttgtgaagatgaagctgttggttatgctaagtcactttcatgtcaaaaggaatatcttaaccctcgatatgtcacttcctcttcatcacagcctggtatatcttttcactgtcttgacaattcacctgttcaagtaattggtataaataataatgaaggaacaagcagaactcattgtattcagaatgtgaagaagaggcgttttgatgat

SEQ ID NO: 98716 - DNA, 679 bp, Oryza sativa
  Clone ID: PAT_MRT4530_96599C.1
gtacctcccgtttgccgagcacttgtcgttggccgaccggtccagctcgaagctcttgttctccgacgacgaggagttgaggtccgcgaccgcctcgaggatggagcaggccttggacacgcaggccgggagcgagaacgctggcgccggggcggcggcggagccggtgctctgctggtggtagttctggatgtcctcgaggagcagggatgcgtacgagttgccattgttgtcgaagtcgtgggaagatctcctcgacgaccggcccttctggttgacgacgctctcggccacaatgctcaccgagtgcgtcgccttcatcctcccggaattcccccctttggtgtctgatgatgccacgggcacctccacgatctcctgcttctccttcgccgccgtccggcttgcggctacctgatctttagcccactccgccaccttctgcggcagggcgccgccactctccgtaggtttctgcaatgcattttgatggtttgagttcttcggcgcggcgaattgatggcttagattgcgtgatctgaagtgtgacgcctttccatgcgcccgttactttttggggccccgcccttgttgttgcccctgccctggttgtcctctcttctccccctcttgttctttcctgccccctctttttttttcgcgcgctgtccccccccct

SEQ ID NO: 98717 - DNA, 489 bp, Oryza sativa
  Clone ID: PAT_MRT4530_9659C.1
cagatcaccatggcttccatcaagcttgctctcccaatggctctcctgctgtgtgatgatgttatttctctgaaattcttgcaggactcatggtgattggatccatacagagcgccgaggcacaaggggggaagttttgcccccagttctgctacgacggcctcgagtacatgacgtgcccgtcgacgggaagccagcacctgaaaccggcgtgcaactgctgcatcgccggcgagaaaggctgcgtcctctacctgaacaacgggcaagtgataaactgcacttgaaagtcaggagctgttgtttcttcagttcttgcatggtcacttgctgctgaataaatattctccctggaagggctggaactgtctcttcagttcttgcatgttcagagaagatttgtactgctgcagaataaatgtctccctggtgtgatatataataccattggaaaaaataaaattctcgtggctacctagcggcctgcct

SEQ ID NO: 98718 - DNA, 468 bp, Oryza sativa
  Clone ID: PAT_MRT4530_965C.1
atgaagatgcatggcgaatgttgccggaggcggatccgccccgccagccgccgcctcccgccgtacgcgcgctgtttctcctcccacgccgagaagaaaactccaccgccggcacattttccccgccgctaccttccgggccggccgcgcggtttccagcggcggttctgcccccgagccacccgcgcggcggacgacttggcggcgccggctccaggtggtggagcggcgggttccgacagcagggcggcgacttcctctgcgttggagcgactcgtgggcatcggcgtcctcgaccggcgggaagcccacagcggcggcactctcaccggcagcgttcaggaggcaaggaggcggcggcggaagtggccaccggcggtgacgtcctcaggggcacagaggagcagtgatgcgcggcggctcctgtgttggcggcagcagtggcgggtgctgaggagtgccgtgtga

SEQ ID NO: 98719 - DNA, 265 bp, Oryza sativa
  unsure (1)..(265): unsure at all n locations
  Clone ID: PAT_MRT4530_96600C.1
tgccccctcattttttttttttataggaactaaaaatagacatataaatgtcaatgtttaaataatagggacccggaatagactnatggtagcgtagtgtatataccacatgacaangaagagggggtgtnnttatactttgattagctattcatatgnatcagcccaataggagggaggaaaatttagacntatncngagagaggagtacgatggcccatcgtgccttcgggccggcccggcacggaccgaggcgtgttgggcc

SEQ ID NO: 98720 - DNA, 6840 bp, Oryza sativa
  Clone ID: PAT_MRT4530_96601C.1
atggtgaacaccgagggtactgaagaacaaagaaaggctgaggaggatgctgcactgcaggctgggaagaaggaaagtgtggcaggagaatcttcttttttcactaaaggtatgatgggtcttaggagtgggataggaccatctgagataaaattggaagtaatgccaaatgaagtgaggttggaggggaccaaaaactacttgagctggtctagaagggcaaggttgatgctgagagcaaaaggtgtagaacattatttggaggaaacttgtgttgaacctattgataaatctagtgtggaatggaagatgtggaatgccactaattctacagtggtagcatggctgatgacttcggtgtccccatctattgctaggatgatagaagctattcagaatgcaacaattatatggaagacattgagcaacatgtattcaggagagggaaatgttatgatgatggttgaggctcaagacaaggtagataatctgaagcaagaagggagaacagttcaagagtatgccagcgagttgcaacatttatgggcagatcttgatcattataatcccctacaattaaagcatgatgatgatattgtgattggaaataaatggctgcaaaggagaagagtcattcattttttaaaggggttgaacaaggagtttgaggatagaagagcagctatgtttcaccaagctacattacctaatatggaggaagctatttcagccatggttcaggaggagatgaggcagaaagtgatgaaaggaagtaatcctgtgaggtctgcatacatcacaattaatgacagggagtgttataattgtgggttaaaggggcatgtgagctacaattgtccttctcctaggaacaataatggtcggggtgtagctcgtggaggagcacgtggtggctatggtggcttcaatgggagccgtggtggctatggtggctatgtaggagaccgaggtggccgaggaggtgaacgtggaggccgtggtggaagtcgaggtagaggcctaggtggtcctagggccaatgttgtcatgggggagagctcatctatcactctaacaggtgaacaagctgcacaatgggaggaatggcaaaagaataagggccccgtggactccaatcaacaaaattctgctaaagcaacaaccagccacttcggtaactttgccaactacgcccacacgggcgaaggtactcaggcacatgcacttgcatccacatatagacatcatgtagactggataatagattcaggtgcatcaaaacatgtcacaggcttgcctaataatttctcctcatactcccctattgctccctctgaaactatccaaattgctgatggttcatctcaactcattcatggtatagggtcagtagagtgcactccatctattagcttgtcatctgttttgcatgtcccttcctttctagtcaacctcctctctgttagttctatcattgatcaattcaagtgcatcgttatatttgatgagaattcatgtctcttccaggagaaggggactgggaggaggattgggactggagtcaggcgtaatgggctgtggtacatcaatcaagaggagatgggattggctgtagtagtgggagatactgagaaggagattattttgcttcattgtcaattaggacatccatctttcgagagtttgagtaagctgtatcctgacctctttaccaaagtggacaagagtagacttgtttgtgatgcttgtgagtttggcaaacatacacggtctacatatgctggaattggtcttcgtagttgtgaaccttttatattaatacattctgatgtttggggaccatgcccagttacttctgtgagtggattcaaatggtttgttacctttattgattgttatactcgtatgacttggatttacatgcttagacataagaatgaggtccttcgttgctttcaagacttccacaaattggttaccaatcagtttgatgcaagggttcggattattcgaattgacaatgggacggagtatattaatagtgagtttgtgtcatatgtctcagatcatggaattattcatcaaaccacttgtcctggagccccccctcaaaatggtgtagctgagaggaagaatcggcatttgctagaggtggctcggtcattaatgtttcaaatgaacgtacctaagtatctgtggagtgaggcagtgatgacagccgcataccttatcaaccgcatgccatccaggatacttggtatgaaatcaccagctgaacttttacttgggaagcgagaatttaaagttcccccaaaggtatttggttgtgtttgttttgtgagagatcatcgaccttttgttggcaagttggatcctcatgcagtaaaatgtgtctttgttggctatgcatctaaccagaaaggttataagtgttgggaccctattgggaagaggttatttgttagtatggatgtaacatttcgagagtttgaaccttattacaggagtcgaggagaccttgatcaatttctagaggagttctcaactgtcatcgagatcgacagtcgagtgggggagatagttgaggttgatgcacataagcaaggtgatgaggatgtggttattgggtcaattccgagttttgttggtgatactattgagaaggttgtggacattggtgagaaggtagtagacattagttgtgacaaggatgagggggtagttgtcgggacaatcccatgtcctctggagcgtgtggaagtacaacaaactgaaatgagagtatatcaaagaaggaacaagaaccaagttgataaggtgacagggaaggagcaagtgcaccagaggagccaaattcagaatcagggggagagaagtggtgagcctatgcaagagcaagacaaggagtcacaacagctgcaacagtttgagtacccagtcccagattcctcctctagcctctctccaacaagttcctccctccttgagacaagtgtgcctattccaaaggactggagatgtgcaaaacaagatccaagatggaaggatgcaatgaaggaggagttgcgtgcccttgaaaagaataagacatgggaacttgtgaaactaccaatggggaaaagagcagtgggatgtaaatgggtatttacagtgaagcaaacccctgaagggaaagtggatagatataaagcaagattagttgcaaaaggttatagtcaaacatatggaattgactatgatgaaacatttgcacctgtggctaagatgagtacgatgtcaagaatgcttttctacatggtgatttacaagaggaggtttaggcgtgtattgtgcaatatgggatattcacaatgtaatggagatcacacagttttctatagacatagggggacacacatcactatcttggctgtttatgttgatgatatagtgatcactggagatgatgtagaagagatcaaatgcttaaagcagcgattaggagaggcctttgaggtgaaggatcttggacctcttcgatactttcttgggattgaggttgctcgatcatcaaaggggatagttctctctcaaagaaagtatgtccttgatttgttaacagaaaccggaatgcttggatgtcgtacaagtgctactcccattgataggaatcaccaattgagtgcacagtcaggtgatccagttgatagggaaacttatcagaggttggttggacgtttgatatatctatgccacactagaccagatatctcttatgcggtgagtgtggttagtaggtatatgcatgatcctagaacaactcatctagaggtggttcataggatcttgaggtacttgaaaggaactcctggtaaggggttgtggtttagaaagaaccaacacttggatgtggaaggatattgtgatgctgattgggcaagcagtgtggatgatagaagatctacatcaggatattgtgtatttgtgggtggcaatgttgtctgttggcgaagcaagaagcaggcggtagtggctcgatctaccgcggaagctgagtatagagccatggcattgagtttaagtgagatgttgtgggtgaagaatctattgttggagctacggttgttcagaaataataccgtggtgcttcattgtgacaacaaatctgctatcaacattgcaaacaatccagttcaacatgaccgcaccaaacatatcgaaattgataggttcttcatcaaagagaagatcgatagtggggctcttagactacaatacattaaatcttctgagcagctagctgattgtttaaccaagggattaggtcctagtgagagagatgagtgcatgattactgattatgccatcacaaagatatctaatatgtatagctcattaactgaagataagctcatatctagcttcttcacttgcgatgattctccaagtgagagttctattgggtcaccactaaagctttgtcagatttgtgaagcaaccaaggccaaccgtaggacgcagaagaagggtgatttcttcaatccccggtgtaatagctatctgaagccaactgttgagagaacttacattgatcttgccagaataacatattacaagcttgagtctcttcacaccaatgcccgagtggtttttcagaatgtggtcaactttgctagcgaaagcgcgtgctttaccaccctttcgacgtgcatcttgttccaagctcagtgtttcctcagtgaagatgagggcggctccggaccgttcaggaaaccgctttgcattgccctccaggctccaggcctcagccagtacggcccaactggagaagaggcagcccatgagacggacagcaacaaggcccagaagtcaacgtgtaggtccgatttgctcaccggagagatgcctcgtgtccaaacatcaaggttgggtaaaaatcccattgaagttgattctgatggaggtgaagattttcatgttgattatgaagttggtaatgatgttgatgaaggtcctgaacatggtgaaattgatggtttactctctgttgtgctcaggaaaatgattgttcaagaagtgaaaaagaatttggttgacacttcttctgtcaattttcacaatcccattgataagaaatctaaagttcattcgaagactgagccctcatatagcagattctcaacaaaatatttctcaacagttctatcttctttatctcctgatcagaagcgtattattggtgactatggttttaattctttgctgatgtttgacaatgcttatgtcccaaacaaatttgcttcttggattgcaaatcatgttgatgtgaagtcttctcaaattgttttgaaagataaagtcattgcaattaataaagaatgtgttcatcatattttgggtctgcctattggtggtatggagttcccaactgattgtgatgctggaaagtcttttattctttcaaagtttggcaagagcgctcttccatctgtgagattctttggtgatatgttcatccgaaaggaaactctctctgatgatgaagttattacttcatttttgattgttgcaatggcttgttttctttgtccaaactcttctttggtccctagcaccaagtatttgactgtgtttgagaatgttgatgagcttcggtcatatgattggtcaaaatttgtgtacgaatggatgatgacttccatcaaaaagatccaaaagtttaataccttgggtggatgctggtttctctgggcagtgctttatctggattatgttgagtttggtgacaagaatgttcctattggttttcctagaatttctcactggaagaataatatgattactttgtattctgaccttgacaaagttgatgaagaaaactttggccttaggcccattaaggatttcaatgatacaacttatttcaaggttgtaccccctgaaaatagaattaatacattcagagataaattggagtctgctattggtaccatgttacctgctttcattaaggagaaaatttattcaatggttgttagtcattgttctgccaatcacattgttgacagtgagtcttgtgaagatattgctatcagcattatgctcttgctatgtgaacatgctggttctagagatggtggtgatcctgatgaaaacttaatttttgatgatatcaaccctgggtttcagcctaactatgcaattgatgttgaaaatgaaatcccttgtgatgctcataacaatggaagtaccaataaatctgttgctagtaaagctaatgaaacaagttttcgccatacaccttctcatgataaggaattgggggtaaatgatgattctgttattgtctctaaatctgctgttagattttccctttcaccaaactttaaaaaagatcaaggcttactaacccctgaagttggatatgctaataactccaattcacgatttgaacattctcgatctgcttcaggtcctactgtatctgctgttgctgctgttaggaatgttgcaaataaaattaaatcaagattatctcaactcaacaatgatgacaaaagaggaccattgttccctgatttaattgattcttgtgaagatgaagctgttggttatgctaagtcactttcatgtcaaaaggaatatcttaaccctcgatatgtcacttcctcttcatcacagcctggtatatcttttcactgtcttgacaattcacctgttcaagtaattggtataaataataatgaaggaacaagcagaactcattgtattcagaatgtgaagaagaggcgttttgatgatgttactaattctcctgatgtggaatatcttggtcattctacatttcctgattgctgcaag

SEQ ID NO: 98721 - DNA, 1089 bp, Oryza sativa
  Clone ID: PAT_MRT4530_96602C.1
ctcctgctgctctagctactgctctgctcttcgtctccgattctccgatcagttgcgtttgcgtgcgaggaggcggcggccatgtcggggatgtcgctggcggtggggccgcggacgtcgggcacggacgacaccgcggcggagcgggggcagcagcagccgtcgacgatgctgggcggcgtgatggggtcgctccgcgtcatcgagctccagctcgtcgccttcatcatggtcttctccgcctccggcctcgtcccgctcatcgacctcgccttccccgtcgccaccaccctctacctcctcctcctctcccgcctctccttcccccctctccactccaccctcccctcctcctcctcctcctcccaagagatcttccgcggcagcacgtggttccaggcgtacgtggtgctggggacgacggtggggctgttcctgccgctggcgcacgtgctgggcggattcgcgcgcggggacgacggcgcggtgacctcggcgacgccgcacctgttcctcctctcgtgccagatcctcaccgagaacgtggtcggcgccctgggcgccgcgttctcgccgccggtcagggcgctggtgccgctgctctacacggtgcgccgcgtgttcgtcgccgtcgactgggtgtacgacgcgtgggggaaccgcgccgccgccgccgcgccgcaggaggcggtcgcctggatgtggttcggccgctacctcgccgtcgccaacctcgtctacttctccaccaacctcctcgtcttcctcattcccaagttcctcccccgctccttcgagaagtacttccgcatgcgcgacgaggtgtacgccgagaccgccgaggaccggcacgcagccgcggcgacggtggcggcgaagccggtggaatcgaagaaggcagactgatcgacgatcgaaagctatatataccccattttgctgtgagactcttgttatttgtgattatgtttgtgttttgtgtcatgtgaagtttgttgcttgttcgtgtattgcaacttggtgttcgagtgtcacgtcgttgaattggtagttaaaatttgctaaaaaaaaaaaaaaaaaaaaaacacc

SEQ ID NO: 98722 - DNA, 159 bp, Oryza sativa
  Clone ID: PAT_MRT4530_96603C.1
atgtcgctcccggacagggagagggcacaggcagaaagagttgtgcgcatggccaagcgctatgtcctggagctgagcagggggctcacggcatctggtgaaggcttcttgtgccacctgtttctgaaactaggtccgctgggacaggtgagggcgtag

SEQ ID NO: 98723 - DNA, 220 bp, Oryza sativa
  unsure (1)..(220): unsure at all n locations
  Clone ID: PAT_MRT4530_96604C.1
ctggaacacctctccgtcgtgaaaaccaactgccggcggcgtggaagtcgccggcgagttcatggccgccgngttcatcgtccccgcaaacccaaancctacttcaaancccaacttcttcntccgtnccccatngngtgccgcttccagtgtgctccgtttccccgncgggaccggggttggaaacccatttttaattgcggggttttgggaaggggga

SEQ ID NO: 98724 - DNA, 407 bp, Oryza sativa
  unsure (1)..(407): unsure at all n locations
  Clone ID: PAT_MRT4530_96605C.1
gccgccgagaactcacaactcaaacattacagcgaaagcataacaactagaatcccaccacaatgaagatcattttcttctttgctctccttgctattgctgcatgtagcgcctctgcgcagtttgatgctgttactcaagtttacaggnaatatcagctgcagccgcatctcatgctgcagcaacagatgctcagcccatgcggtgagccccctcgggtcagcgatggtccggggttcccccttccacctgcctctcccccccccccggtgtctctgtctccccgttggatcccctcctctccccccccgctcctccacctcccccccttnccccccctttacccctncgccccccccctccttccccctcctttccnccgcttctgttctcttttctctcttctt

SEQ ID NO: 98725 - DNA, 268 bp, Oryza sativa
  Clone ID: PAT_MRT4530_96606C.1
gttggttttagcaccggcgaaatacacgcagcgggagagggtagatttataaattgcctctcccctcgctaagggcagcttattccgaaggtcctaagactcgtaggagcgagaacattatttttaccaaacgcctgggcgtattccgtaccgaggaggatgcccagccaacctatcccagcatggacctccgctcacttattattaagaggtagctaacgaagatcaaggagaatgagacctgacttccgccacctcaaggggacca

SEQ ID NO: 98726 - DNA, 666 bp, Oryza sativa
  Clone ID: PAT_MRT4530_96607C.1
atggtgatacattcagagtacgccatcgtcacaagtggaggtggaggtgatgtagcttgcctcggaggtggcggcgccgaggctatcggaggagcagcaggaggagagggaggaggcggatcgcggggcggccatgcggcggccgaagctgtcgtagtggacggcgccgtcgaagtccagtggctggcaccgctcccccatcaggatcgtccgctgccagatggcctcgccgccgccgccgtcctgcttggccggcgcggacctcccgccaccgtagcagcggcggtcgaggaggaggaggcggcggctgacgcgcgagaggccgcggccgcacaaggcgacgaggctgctcagcctgcccacgacgtcgtggtggtggtggtggtgccggtggtcactagtgtaggcgacggccatggatggaatttactactattagctgcagctgcagtggtgattcacgaggagatgaagattagcgcgcgcatgccgccgcgcccgcgcgacgaaaggttccaccgatttagttggagttggagttggaggaacaagtcaaaaggccgcggcccactcgcgcgcgcaccgcaaaggcccaacttacaaaagcccaattcactacggcctactcgcccgcaggccgcagcctcccccttctggcccggatag

SEQ ID NO: 98727 - DNA, 702 bp, Oryza sativa
  Clone ID: PAT_MRT4530_96608C.1
atggagccgagctcgccgccgtacgttgccgaggccgacctccccatcggcgccgccggcgagcgcaggcacgcgtgttccgccaactacgatcaccgtggcggcgtcggcggctgggaggacgacgacttcgagttcgcgccgctgctgccccagcgccggcggctgcgcggcgagtgtcgtcgtccaagaacctccgccgccgccgtcgccgcatgccgcggcacggccgtcgtccacgccgtgctcacgcagccgcctacgccggtgaaacagcgcacgcctcgccgtcgccaggcggcggcggcggcggaggccaagtcatcggctgctccggcttcgacgccgacggcggcggcccgaagggtccggtggcacgagatggcgttcgggtcggtgcgcgtgccggcggccatggacatgggcgagatcaggaggcggctacacgcgcggcgccggaggctagcctacggcgacggcgaggccggcgacgcggccgcggcggccgccgggtgggcgccgtggaggctgatacggtcactgagctgcaagggcatcgaggccgtcgccgtggctgccgcggcggcgccgtatcataatttattaggactgatcctactgagaaaacataacggcatccttgagctcaccaacataatggaaatggatgattttctattctctgatgtacaagataattaa

SEQ ID NO: 98728 - DNA, 336 bp, Oryza sativa
  unsure (1)..(336): unsure at all n locations
  Clone ID: PAT_MRT4530_96609C.1
gcacgaggaagacaagcaacattcttctggataaggagatgactcctaaaatttcagacttggtagggcaagaatgttggcagtgacgacacggaaataaatacagttagagtggttggcacnnatacggctatatggcccccgagtacgcaagggatggagtattttcagtgaaatcagatgtattcagtttcggcgtcatagtgctagaaggtcatttctggtaaaaggaacaggggtgtctacagctactccagccacctaaaccttctagcacgtgcatggagctcatggagtgaagggaacagcctcgatctcgtcgacaaaacactgaac

SEQ ID NO: 98729 - DNA, 396 bp, Oryza sativa
  Clone ID: PAT_MRT4530_9660C.1
aaagagcccaagccccagcccctctaggaccttcattcgatactacaccacaggccacaccgggacccacagcatccaacctctcaaccagtattaattcaacgaggtgaacccaacaagcacacggcccattgctagcaaaacttaacgcacgatggaccgaagagcgaagcccgtggccaacacacaagcaccgcccacaaatcccaaatgcaaacgaaataaccaacactaacccatcgtgcatggccagaggtgacacaattgccacgggatccactacactacctgcataagactgtatagcatccgtctgcaactcgctttgctcccatgccacgacagaaggggtccagcatggaagctactttccccaacccaatctgaatcaatgcc

SEQ ID NO: 98730 - DNA, 303 bp, Oryza sativa
  Clone ID: PAT_MRT4530_96610C.1
atggcgtcgtcctcctcatcatcgtcctttctcgctcatccatcgtcgctgctgcgtcaggtcgtccatggcttcgccggctacctcgccggcctctgccgttctctccagaatctgaaaccatctgcagctccgaaacaagacgctgacgacgaatttgccgtcaataacactgctgcgtcaagctccgaagaagttgagaatgttcagatgagaacaagagcaatgccgcgttctgaaaggccggttttaagagaagggaacgggggaaaaggcggagcacaccacaacgctggcctttag

SEQ ID NO: 98731 - DNA, 1536 bp, Oryza sativa
  Clone ID: PAT_MRT4530_96611C.1
atggatgaacaagaaggcatcaaggtcaaggcctccaagtgtcggaatccgattcggccacctgctgcactgctgatttcaaacggccgcgaaatctccatacgagctctgtttttggcccatgagtacttgatggaaagctctaggagtcctctttccaacggatccagcctcattgcgaaatttcatctcaatgagccacaattgaagcaacaaggtgctgcgtcacctgtaatgggcatatgggcttgtaacttcatctgggaccccggcccaagtggggcccatgtggggaataaggttgatctgcatcggcaagatcaacaacccacggagagttatcatcaactcaccgaaagacgggccaacaacagccttaagtgtctcgagtggagctcaggggtcatcaggtggtatcagagctttcgttgctcggctcgcgtctctggattgcacaaggggaaacgagatggtcatgctcaacatcgacttcttcacgatcaacgagatataacgacttcttcacgcatagcatatgaggtacatgataatgatcttgcaagggtagaatctaatttgccagtttttgatggccacttgttcatgcttgcttgcagtgttgagagcaatattttaaagaacccaagggagaaacagggagctcagaacattcaccatgaggagaagagcaatatgctcgagatgccatctccatcgctcacgaaggaagaagaaaagactgatgcacctatattatctgaagagggcataaaaggtaaattaaatggtgctaatattagtcaaggtgagtgtgcttctgatgagtcacatttgtccactatccatgctaatctagagcaaattttggtggaaactacttctgatttgcctttgttacaagttgatttacttgctgtttcttgtgataaagaagagttgtgtgataatgcttcacttaaatccatgccacaactagtgaatgaacctgctatttctagtgtttcattgtgtgctgattttaagcatgttgttcacattgctaatgatgttgaggaacgtaaattgataacttctttaaatactttgggctatgttcagtttgatgatttttgtgagctcaataatttggaggagaaattatttgctaagtctgatttgccatgtccaactaatgctatttttcatatctttgatgaatataatgatagaaaaatatatttggtgcatagagttttcatttgttcggatttagagaaacatgttattcctaatcacactacttcgagtttctctagtcttgattggatgaaacatgttattttgaatggactatgtgaagagcaccatatggaaaaaccgaggacggttttccatgaagaaggggagtatgatgtgaccatagctactacggatacaaccattgctcacatcatggatggacaagaagacattaaggtcaaggcctccaagtgctggaatccaattcggccacctgctgcactgctgatttcaaacggccgcgaaatctccatatga

SEQ ID NO: 98732 - DNA, 351 bp, Oryza sativa
  Clone ID: PAT_MRT4530_96612C.1
tgggccataatttagctatagtcgttttggcatcccctagtgtaacatcccggccaagggcttaataggattaatagaatactcatatcaacacgttgcaacttcttttccggaagccaatctccaaagaactccagggttaagcgtgcttggcttggagcaatttagggatgggcgaccgatcgggaaattcttcccgggtgcgcacgagtgaggacgggtgcgcacgagtgaggacaaattgtgcagaaaagacttgtgttggtctgtgagggcatgtaagggggagggtaagctactggcaggacatgaaagaatgcgtaggctccgacttgaacaaagctactggca

SEQ ID NO: 98733 - DNA, 330 bp, Oryza sativa
  Clone ID: PAT_MRT4530_96613C.1
gtgcagcggaagtaagcgctaagaaggctaaggaatcctcgcgatgtagtgtgcgtcgatgtagaggaagtagtcgatcgcaccggctcgaccttttcctccgcatgcgttctcctcaccgtgctcccaagccgatcagcaccacaaagcagcggcgcctttactggtatccacaatccagggaaggaacaccacgcgcagatcgtgcgaccctgtaggttcatatatatactcggctgcaacccgaaagctccttttcggtccacgtgtcaacagcggcccctagcagaacgtattgacccaccgagcatacataaagatcatatcggt

SEQ ID NO: 98734 - DNA, 918 bp, Oryza sativa
  Clone ID: PAT_MRT4530_96614C.1
atggcaggattgcgtaagggaatacgagaacatcgacttctacaccttcgacgagatatgacgacttctccaaatgatgcatatgaggaagatcagcacatccaagaaaaggagaatggtatacttgagaagaaagaggatgaagcacctgcgatgtctgaagaaagttcgcaaggtaaattaaatggtgctgagagaaatgaaggaatagggttgatctgcaccggcaagatcaacaacccacggagagaatggggaggaggagcagaggagggggtgtacctcggcttctcggcacggctcaccgtggagtcccagcgcggcggcgacggcggtggcgcggaggaggaagaggcggcggagctggtcccggcatcgacgacgagtcccggtggcggcggcgtcgacaacgaggacccggcggcggcgatgactcccgaggtggaggcggcgtcgacgacaaggaaccggcggaggaagaggaggtcccggcagcggtcttggcggcggcggcggtgggaggaggaggcggcggagctggtcccggcgtcgacgacgagtcccggtggcggcggcgtcgacgacgaggacccggtggcggcgatgactcccgaggtggaggcggcgtcgatgatgaggaaccggcggaggaagaggaggtctcggcggcggtcttggtggcggcggtgggaggaggaggcggcggcggcggcggagaagaggagccggcagacaagtcccggtggtggcgacaactcccgacgtggaggaaggaggagccggggagaggtggagctcgatctggcagcggtggtggtggagacggcgggccgatcgaggaggaggatgcggcggccgtcggtcggagaggagttggatctagcggtggcggtggagaggaggcgcgaatggatctag

SEQ ID NO: 98735 - DNA, 1455 bp, Oryza sativa
  Clone ID: PAT_MRT4530_96615C.1
atggctactatggatacaaccaccactcacatcatggatgaacaacaaaatatcaagatcaagtcctccaagtgctggaatccgattcgtacaactgctacactgctgacttcaaacggccaccgaatctgtatacgacctccgtttttgccccgtgagtacttgatggaaagctctcggagtcctctttccaatggatccagcctcattaccaaattccatctcagtcggcagcaattgaagaaacaagttggaatagggttgatttgcaccggcaagatcaacaacccacggagagttatctcaactcaccaaaagatcgggccaacaacagccataagtgtcgagtggaactcagggttcatcaggtggtatcagagctttcgttgcccgcctaccccgagctccacagatttgattgcagccgtacagcaagtgtttgccaaggcatcgatacatctaacctccattggggtgcttggttgtgtcggtgtatgtcgccaccattctgcttgcattgggatacgcaagaaaacttgggataattgtgctgaacatgaacatcttcgtcgagtgatgaggaatgatcaacatgaccaatatgaggatatgctggcttgtcaaagatatagaactctttctcatttgttacaacttgcttgcaatgctgaaagtaaactagaggaggacatgaaaaagcaacacgatatctttttgcctcctattactaactatttgcaagaagtgcataatcacggaaaagaagagagagacatgaaaaagccgtcgttcccattgttcacactcaaattcgatgcacctccgtcatcagaagagcgaatcacagtagagcaaccattattggaaccaattgttgaaatgcctttgtcacaagttgatttactggctgttccttgtgataaagaagagttgtgtgataatgtttcacttatattcgtgccacaactagtgaatgaacatgctatttctaatgttgttttaaatcgaccacgcgatgagcaccatatggaaaaaccgatgacagttttccatgaagaaggggaggatgatgtgaccatggctactacggatacaaccattgctcatatcatggatgaacaacaagatatcaagattaagtcctccaagtgctggaatccgattcggccacctgctacactactgacttcaaacagccaccaaatctgcgtacgacctccgtttttggcctgtgagtacttgatggaaagctctcgaagtcctctttccaatggatccagcctcattaccaaattgcatctcggtcggcagcaattgaagaaacaaggtggtgcgacacctgtaatgggtctatgggcttgtaactttgtctgggacccaggcccatgtggggtgctccccaatctagtggagcacgaccctaggagcctcttggtcgtcctcccacctctttaa

SEQ ID NO: 98736 - DNA, 1491 bp, Oryza sativa
  Clone ID: PAT_MRT4530_96616C.1
atggccatggtgcatgcagagatggagatgaagtccgctgcgttctggaatccaattcggccacctgagatagtgctgaattcaaacggttgccaaatctccatatggcctccgttttgggcccatgagttcttgatggaaagctctcggaatcctctttccaacggatccaacctcattgtcaaattccatctgagtcatcggcaattgaagaaacaaggggctgcattgaataaggttgatctgcaccggcaagatcaacaacccacggagaggtgtatcgatcgcaaaggcgcaacacaacatcttggttacacaaagagtttggagctgttcgtgctcaaggtggacattttcaccttcgacaacacatggcaagtgaccaacatgacgcaaataagtggtttacaagaatctaatgagaacacaatgactagatttttcagagggcataattccaatattcaggttgggcttgttaatgtgacatataatcatataggccaattgttcatgcttgcttgcaatgttgagcgcaaaattttggagaacccaacggagcaacaagctatgcttttgcctcctatcactgatgttttgcaggaagttcagaacagtccccaaaatgagaagaacgatatgtttgagatgtcacttccatcactcgcgaatgaggagaaggctgttgaacctacattatttgaaaagggcataaaagatacgcaaccctctgttgttgtgccaagaaaatgcaaactggagagtagtgttaggaccactgatgttacttcaagtttgttttgcttttgtccaaagacgcaggttggttctgaagaaggggagcgacgagatcgctcaatgttgctgccatatacagtaaagaatgcaccatatgaagcgttgcgtgaggatatgctacgtgaattacctatgtttaaaccgaggacggttttccgtgaagaaggggaggatgatgtgaccatgcctatgatggatacaaccattgatcatgtcatatacccacaggtgatctcgttttataacaagtgccaatttaatctaatcaagaatatgacactacctcataatgtatgcgtttatatgttcaggaccaatccacttatttggggctgcatatggaagataaacacgatggccatggtgcatgcagagatggagatgaagttcgccgcgttctggaatccaattcggccacctgagatagtgttgaattcaaacggttgcaaaatatccatatggcctccgttttgggcccatgagtacttgatggaaagctcttggaatcctctttccaatggatccaacctccaaattccatctgagtcatcggtaattgaagaaacaatgggctgcattgtctgtaatgggcctatgggcctgaataaggtttatctgcaccggcaagatcaacaacccacggagaggtgtattgatcgcaaaggcgtaacacaacgtcttgtacggttgtag

SEQ ID NO: 98737 - DNA, 615 bp, Oryza sativa
  Clone ID: PAT_MRT4530_96617C.1
atgaagcactacaagtgcctcgacaagatcgggaggaagtcgagggtgtggtgcatagggtgcaggacccgaggactagggaaacccgccgtgaagtgcctccatagagggatcaactacggtgaggtggagtgctttcgcgagccacggtgcctcgaggcgtgccagggccacccgtaccttgttgagcatcccacgacacacagagagatgaagaggggtggcgatggcagagcttgcccgtgttgctatgtcgtgacggagtacatcaacaggtcaagccttgtgcgtgtcgtgcaggaggagcggtggttgctcggcagcatcatggccaatatcctcaccggcggcccactcttcctcatccccacgctgcatcgccatgtccgcgcacagcttgtacatgtcgttggtgtcacccctggcttccaccgacgacatgaagaagaggagcaacatgaccgccgcaaccgatgcgtttcagctggtatgaagtgcgaatttgttcaagaggttgtacctattaacacaagggagaagcacttctgcagccttggtaagatcaagaagcatctcattggaacaactgatatcgacaacttgctagataaatga

SEQ ID NO: 98738 - DNA, 180 bp, Oryza sativa
  Clone ID: PAT_MRT4530_96618C.1
aagacatgctttatcatttttatgtcgaagactggacagtacatatctgcaaaacaatatgttgcaatttatctattgatgtattcttcattcaaacgccgaccttagtaggattctgccccataacaaacaaaacagaagactcttgtttttggtgggagtgaatgcaccgaactcagc

SEQ ID NO: 98739 - DNA, 244 bp, Oryza sativa
  Clone ID: PAT_MRT4530_96619C.1
ccattgctcacatcatggatgaacaagaagatatcgagatcaagtactccaagtgctggaatctgattcggccacctactacactgctgacttcaaacggccaccgatctgcatacgacctccgttttcagcccgtggggcccatgtggggtgcgccccaaccaggaataaggttgatctgcaccggcaagatcaacaacccacggagaggtgtatcgatcgcaaaggcgcaacacaacgtctt

SEQ ID NO: 98740 - DNA, 1147 bp, Oryza sativa
  Clone ID: PAT_MRT4530_9661C.1
atgagtagagtgtccactagttggggtttggtttaatctagggtgaacaagcaagggggaggggacgcgcggaccgggtccacgggagtggggcccacgcggcagcctcacggcccacagtggaccgggcgcacctgggctcgcaccagccggcgccgtgggtcccacgtgtcagccgcacccaagggcgcgggcggctgacggccgggccccacgcggcagccactcggcgcgcacgagggcggccacgctggcgcggtcggcgggaggcggcgcgcccgcgccccgatggtcgccgccggcgaccaccggcacggcggagcggcggccgagagaggggagggaagggggaaaggaggcgacggtccacggctcaccctaggtcgacggcggcgacggaggaggcggccggagtggagggaggcggcggcgcggctcgggtcgatggcgtcggcggcgctccggtggttggcgaccgaaacggagaggtggacgaggttggcgaggatgcggtgaacccgaaggaggcggcgccgaggtgggaggcggtccggggcgacgacggcggcggaccgaagctcggcggcgacggcggagagagagagtgacgtcgcgagctcaaatccggcgaggaggaaggccggcgagaggcagaaacggacgaaggaggtgcggggagggtttaaatagggttggaagagggagagagtggccggaggggaaggaaaccggcgtggcgctctcgggctccatcaatggcgccggcgggattaggggagggtttccaaacgaatccaagggagagagggatgcaaaattgggtggaatgggagaggggatcacggggagtgattccccccactttattgcacgcggggacggcgggaggcggcgggattcgcggcggcggcggcgctagggtgcgggggaggcggcgggagcggtgggagaaaggggatgacgggtgggccccacccgtcagcgagggtggcgggcgggcctgcccgtcagcggcgcgcgcgcagggagaggccgagtgggccgcggggagaggagagagagggggagggagatgggccgaattcggcccattagggtttttctttttataaaatcattttaactttgtttatttcttaataattat

SEQ ID NO: 98741 - DNA, 989 bp, Oryza sativa
  Clone ID: PAT_MRT4530_96620C.1
ccggccaggacactcccctcgtttcgtcgtgcacgagccggagcaggagacgaagggtttcagccatggttagcctccgcctccccctcatactcctctccctcctggccatctccttctcatgcagcgccgcgccgccgccggtgtacgacacggagggccacgagctgagcgccgacgggagctactacgtcctcccggctagccccggccacggagggggcctcacgatggcgccccgcgtgctcccctgcccgctcctcgtggcgcaggagacggacgagcgccgcaaggggttccccgtgcgcttcaccccgtggggcggcgccgcggcgccggaggacaggaccatccgcgtctcgaccgacgtccgcatccgcttcaacgccgcgacgatctgcgtgcagtccaccgagtggcatgtcggcgacgagccgctcacgggggcgcggcgcgtggtgacggggccgttgatcgggccgagcccgagcgggcgggagaacgcgttccgcgtggagaagtacggcggtgggtacaagctggtgtcgtgcagggactcgtgccaggacctgggcgtgtcaagggacggcgcgcgggcgtggctgggcgcgagccagccgcctcacgtcgtggtcttcaagaaggccaggccaagcccaccagagtaaacgaggggaggggagggggggggggtcactcatgcgttgcgtggtgcggtggtgcctctgtagcgtgtataggtagtagggtgcgtgcgtgcgtgcgcatgtgctggttgaataatgtgtgaagaggctagcaggtattgctccgtggttctgttctcatggtcgtgtcatgtctgttagtcgtgataactcgtgagcactgagcaagtgagcaggactgcctctggctgtctggcccagccggacttgttaagtccaaatggaatgaacgaattgtgcgggatatggattttcatctaaaaaaaaaaaaaaaaaaaaaaa

SEQ ID NO: 98742 - DNA, 747 bp, Oryza sativa
  Clone ID: PAT_MRT4530_96621C.1
atggctaccaccgatgcaaccattgctcacatcatggatgaacaagaagatatcgagatcaagtactccaagtgctggaatccgattcggccacctactacactgctgacttcaaacggccaccgaatctgcatacgacctccgttttcgggccgtgagtacttgatggaaagctctcggagccctctttctaacggatccagcctcttctctgaattctatctcgtgtggccagaatcacaggaacaaggtgttgcatcacctataatgggcctatgggcttgtaacttcatttgggaccccggtccagcgcgcgtgtcggctaaaccgtctgtctgcttgttttttggaacccccacttatcatttggtaaaattccttttgcaaaaaccagaggctttaaacggtttccgacagggttttcaattggcctccaaaaaaagggttttttttgcccccggcaaaaatcagcaaccccacgggaaagggttttcgatcgtaaagggccccacacaacgtttcgaacggttttatcccaactccccgaaagatcgggccaacaacagccttgagtgtcgagaggaactcagggttcatcaggtggtatcagagctttcgttgctcggaatagggttgatctgcaccggcaagatcagcaacccacggagaggtgtatcgatcgctaaggcgcaacacaacgtctcgtacggttgtagtcggatcgtcaacgtttctcccaaatcgtag

SEQ ID NO: 98743 - DNA, 1397 bp, Oryza sativa
  Clone ID: PAT_MRT4530_96622C.1
atggttactacagatacaaccattgctcacatcatggatgaacaagaagatatcaagatcaagttctccaagtgctggaatccgatttggccacatgctacactgctgactttaaacagtagccgaatctgcatacgacctccgttttcgtcctatgacttgatctacaccagcaagatcaacaacccacgaagagtgtctagttcgtttagagtttcgagttatggtcacgttttgtaccacagtcgtcgctgcccctgtgtctcatattttgaaggaaattatgatcctcatgcttacattaattgggagctagtggttgatagcgaatttaaaatgcatggcttgtctgagaaacaaaaggttatgtgtgcctctagtgttttaattaatgaagcttctaatgattggaaatatatttgtaggcataataaaatacctcaatcttggaaagacctgaaacgatatttgagagatgtttatgttcccatgtattatgctaacattttgttcaacaaactgcaatgtttaaaacaagatactagaactgatagttcatattatcatgatatgtcttcttttactgaccatttgcaggaagtgcataatcatgaaatggaggagagagacatgaatgagccgtcagtcccattgtccacactcaaagagttgtgtgataatgcttcacttatatccatgccacaactagtgaataaacatgctatttctaatgtcagttctttatgtgatgattttaagcatgttattcacattactaatgaagtagaggaatatgaattggcatcttctttaaatactttaggctatgttcagtgtgatgatttatgtgagctcgatagtttgaaggagaaattatttgctatatattatttgccatgtccaactaatgctatttttcatatctttggcgaatataatgatagagaaatggatttggtgcatagagtttatatatgttcgaatttagaacctcctgtacatgtggataaaacttgcaagctagagagacaagttatttctaatcatattacttcgagtttctcttgttttgattggaacaaattgttttaaattgaccacgcgatgagcaccatatggaaaaaccaaggacggttttccgtgaagaaggggaggatgatgtgatcatggctactatagatacaaccattgctcatatcatgtatgaacaagaagatatcaagatcaagtccttcaaattctggaatccgatttggccacatggtacactgctgacttcaaacggttgccgaatttgcatacgacctccgttttcggccctaaggttgatctgcaccggcaacatcaacaatccacagagaggtgtatcgatcgcaaaggcgcaacacaacgtcttg

SEQ ID NO: 98744 - DNA, 265 bp, Oryza sativa
  Clone ID: PAT_MRT4530_96623C.1
ctccggggccgcgctagcttctcccggtggatgctgcgcctttcggagcggaacatgaagatcctattcgtcgccgccctggttgtgggctccgtcttcttcctgctgttgcctggaccatccgcggccgatgagaagaagaaggggcccaaagtcactgtcaaagtgtactttgacctgcgaattggagatgaagatataggccgggtggtcatcggtctctttggaaagactgttccaaaaacagtggataattttgtggcct

SEQ ID NO: 98745 - DNA, 291 bp, Oryza sativa
  Clone ID: PAT_MRT4530_96624C.1
atggctactacggatacatccgttgctcacatcatggatgaacaacaagatatcaagttcgagtcctccaagtgccagaatccaattcggccacctgctacactgctgacttcaaacggccgccgaatttgcatacgacctccgttttcggcccatgagtacttgatggaaagctctcggagtcctctttccaatggatccagcctcattgccaaattccatctcagtcggaatagggttgatctgcaccggcaagatcaacaatccacggagaggtttatcgatcgctaa

SEQ ID NO: 98746 - DNA, 160 bp, Oryza sativa
  Clone ID: PAT_MRT4530_96625C.1
atgcaacgcaactggtatcgctttccatgtaggtccaaatggtgcgatagaggtcatcaatgcacaacagcgacaagatggtgcacgctttagatccaaaatggaggatgaaaaggtagccaaaagtggcattgcaattcaaacaccacagggagcttac

SEQ ID NO: 98747 - DNA, 810 bp, Oryza sativa
  Clone ID: PAT_MRT4530_96626C.1
ctatagggaatctggccgcgcgccagaattcaacttgttgtctaatcaaagcataaaaaacgacacattcatctaaagaaaacagtgcattaatcatttaatcttatacggtagcatttccagttcccctatccgttttgtctccgtctataagaagcctcattagccagcttaagtagatcatcgtcggtacacatcacatcccaaaagtgcagataaagctcgagacagtctgcgttcttcaagccttcaacaatggcgcataagctcctctgctttgcggcactcatttccatggcggctttggccgccggagcaacgtcggaggaggacacgggcgcgctgctgctcccgggctcgacggggtcgaaccagtgcgtgtacacgctctacgtggagacgggctcgatctggaaggccggcaccgacgcggcgatcggcgtggagctctacacggcggccggcaacggcatcctcatcaggaacctgcaggcgtggggcggcctcatggcggccggccacgactacttcgagcggagcaacgtcgacatcttcagcggccgcgggccatgcctgggagcccccgtctgccgcatgaagctcgtctccaacggcgccggcgagcaccacgggtggttctgcaagtccgtcgaggtcaccgtcgccggtccccacgccaggtgcaacagggcggcgttcgacgtccagcagtggctcgccaccgacgcgccgccgtaccagctctacgccgagcggagcgtctgcggcaagatcagcacggccaccgccgccgccgaggaggagagctga

SEQ ID NO: 98748 - DNA, 1872 bp, Oryza sativa
  Clone ID: PAT_MRT4530_96627C.1
atggcaggattgtgcaaggggaaacaagatggtcatgctcaacatcaacatcttcaccatcaacgagatatagcgacttcttcacgcatcacatatgagtacacagttggcaataagcttgaaacttgggatgaatgcaaaacaatgatgaggaaaaagtttgtgttttcatattataaacgtactctacttgagaaattagaacatctaaaacaaggccacttgttcatgcttgcttgcagtgttgagagcaatgttttaaagaacccaaaggagaaacaagctatgcttgtgcctcctattaatgacattttgcagggagctcagaacattcaccatgaggagaagagcaatatgctcgggatgtcatctccatcgctcacgaaggaagaagagaagactgatgcacctacaatatctgaagagggcataaaaggaataaggttgatctgcaccggcaagatcaacaacccacggagagggatacgcaagataattggggatagctgtgctcaacatcgatatcttcgtcgagacatgaggagtgatcaacatgacgattataaggaagtgcgtaatcacgaaaaggaggagagagacatgaaagagccaccaattccattgttcacactcaagttcgagacacctcgatcatcagaagaggacatcaaaggtaaagtaaatggtactgaaattaatcaaggtgagtgcgttgttaacgaagtaaatttgtccacttttcatgctaaagtagagcaaccgttagtggaaccaaatgctagtattcctttgtcacaagttgatttactcgatgttccttgtgataaagaagagttgtgtgataatgcttcacttatatccatgccacaactagtgaatgaacatgctatttctagtgtttctttgtgtgttgattttaagcatgttattcacattgctaatgaagttgaggaacgtaaattgctatcttctttaaatactttgggctatgttcagtttgatgatttttgtgagctcgataatttgaaggagaaattatttactaagtctgatttgccatgtccaactaatgctatttttcatatctttggcaaatataatgatagaggaatatatttggtgcatagagttttcatttgttcggatttagagaaacatgttattgctaatcacactacttcgagtttctctagttttgattggatgaaacaggttattttgaatggactatgtgaagaacaccatatggaaaaatcgaggacggttttccgtgaaaaaggggaggatgatgtgaccatggctactacggatacatccgttgctcacatcatggatgaacaacaagatatcaagttcgagtcctccaagtgccggaatccgattcggccacctgctacactgctgacttcaaacggccgccgaatctgcatacgaccttcgttttcggcccgaataaggttgatctgcaccggcaagatcaacaacctacggagaggtgtatcgattgctaagattattttgaatggactatatgacgagcaccatatggaaaaactgaggacggttttccgtgaagaaggggaggatgatgtgaccatggctactacggatacaaccattgctcacatcatggatgaacaagatgatatcaagatcaagtcctccaagtgctggaatccgattcggccacctgctacactgttaagttcaatcggccgccgaatctgcatacaacctccgtttttgacccgaataagtttgatctgcatcggcaagatcaacaactcatggagaggtgtatcgatcactaaggcgcaacacaacgtctcgtatggttgtagtcggatcgtcaacgtttctcccaaattgtag

SEQ ID NO: 98749 - DNA, 511 bp, Oryza sativa
  unsure (1)..(511): unsure at all n locations
  Clone ID: PAT_MRT4530_96628C.1
ccaggaaaacaacacgacttcttccaactgttaaatgccacatcttaaaagtggcaaatagttaaatgtctcacaatcactattcactacaagtctacaacacccaattttcagatgaacagatgatgtaactttttattcctccatgcatataactactcgatcaaaattataccacaaatggaagcagcaaaaagctcaagcgggctcggctgcggcctccaacatcctgatttataagcaaaaatgtttcaccactttgacgtaacaatccacccaagtggcagaacaccataaatatcctgaattggctgcgatcgatatatagccgggttacccttgacagccgccacagaatgatatggcaatcattgttgaggcctttcgttcaattccattccaacagttaccgctgcttaccactcatcaacattcagcatgctcatgggaatggggggttnccnnnnnnnnnnnnnnnnnnnnnnnnnnnnnnnnnnnnnnnnnnnnnnnn

SEQ ID NO: 98750 - DNA, 210 bp, Oryza sativa
  Clone ID: PAT_MRT4530_96629C.1
atggacgcagatttgtcgccaatcaatgcggctgatgatggtcgccgccggcgtccgtccaaccggcaacccatcaaacacgccgggacaaaaacgacgccatctccgccgtccgatcgcccaacggacggccacgatcgatctccgccttttgcaggcttaattaattacagccactgcacaagcaaggacgggagcactgttgcattt

SEQ ID NO: 98751 - DNA, 262 bp, Oryza sativa
  Clone ID: PAT_MRT4530_9662C.1
cggacgcgtgggctgacacgtggggaaaaaacgacgagctcgccgtggtcaataatctctggccatggcgagacaccacggagcggtctggttgctaaaacactcctcaagactacctcccacctgcacaacatcgctcggtgcgcggacggcgtttgttccatgagctgggaccctaaggttgccagcttatggtaaagctttacggtcatgtttgtctgtttctgccggttgttgcacttttgttgttcgttctgataga

SEQ ID NO: 98752 - DNA, 319 bp, Oryza sativa
  Clone ID: PAT_MRT4530_96630C.1
atggagggagtacctagttttgttgttgttgccttccctttcgccgcttccctcccttcctcagggctgatatttcaccggatgacgccgatcgagcagcaaaaactccggctcccgccgcagaacacggccccgggagccgaccgacgagccgtcaccctgtgtccgttcgtcgcgtcttccctccctggcagctctatccgtatcggcttccagaaacagcggaaacgagccgagccagcgacaaaacgacgcgcaaaaaccgtcgaaccaaactgcgcgcgcgcgctggccaccaccaccagtccagccatcccag

SEQ ID NO: 98753 - DNA, 351 bp, Oryza sativa
  Clone ID: PAT_MRT4530_96631C.1
atggctgtaacaaaagggctgacgtcagcacggaggggatgcggcgccgacatgcggggcccgcatgtcagcggcgcacggatggccggtctaccgtggaccgggacgacgcgggtgatccaccgccggtccacgggatcgacggcccggatcggcccggaaccgatcggacggtgcggcggcggccaggctaggctcggctcggcacaaagccggccgaccggtcacggcgacggcgcgcgcacgcgcacgcgcgttgccgacgacggcaaccgccggcggagacggcagcgcaaggcggcgccgaagggcggtgaggctaaagcgacgactaacgggcggcggcgctaa

SEQ ID NO: 98754 - DNA, 135 bp, Oryza sativa
  Clone ID: PAT_MRT4530_96632C.1
atggggacagcgaagccaaaaggcggcacaaggccaacgcttccaatccccggcaagggacggtggggaaaattccatggcggcgcacgcacaacggtgaaccggcacgaccccgacaaggccggttgtccataa

SEQ ID NO: 98755 - DNA, 811 bp, Oryza sativa
  Clone ID: PAT_MRT4530_96633C.1
atctggtcgatcgcctataaccgcgggcacggctattcgaatagttttactttggccaaaggtgcacaactgtacccacaagacacaatccaccggcatgtcaccatgtcatcatgtgccctgatgcacacatcaccatgtcgagtgattgtgacaagacccttcatataaccccctctgaccaatcgcaccgcacctcaggtttcacccccactcctcgcaaggcagcgggcagtcccctctcgtgccacggtgaatccagaagccgatcaactgaataccccagccaacccaactccattacgcccacccttgcctgggaacgtcagccagaggaaagctatacttcaagtcaggcagttacccattcctgcttgtggcaagcgctgtatgtcttccagggtttcccgcgaactggtccttcattgccatgggtgcgaccagcaaaaccatgcacccacagcccaccatggctgacgtcagcacggagggaggggggtgcggcgccgacaagcggggcccgcatgtcagcggcgcacgggtggccggtctaccgtggacggggaccacgcgggtgatccaccgccggtccacgggatcgacggcccggatcggcccggggccgatcggacggtgcggcggcgaccaggctaggctcggctcggcacaaagccggccgaccggtcacggcgacggcgcgcgcacgcgcacgcgcgttgccgacgacggcaaccgccggcggagacggcggcgcaaggcggcgccgaagggcggtgatgctaaagcgacgactaacgggcggcggcgctaa

SEQ ID NO: 98756 - DNA, 2931 bp, Oryza sativa
  Clone ID: PAT_MRT4530_96634C.1
ttaagtacatcgagacaggaagaactcatagtctgggtggcagttcacggattccccacctcccttgggaaccacagcccttgctgcggccagtgcacctcgctgcagtgtcctcagcctctcctacagaactgcagcacggctgccctattatgcatcaccaaccatttgcagttccttaaaatctggacgtctttggggacaaagtcatagcacttcctccttgggtctttccagctagactgcagtcaaccctgacgaattatgtatatcaacatccaagcttacaattagatcagcataagtacagcccccaggggccaaggtcgtcccccaggtgcatgcaatgcacatcacgcaaaccttatacggaaacttaaagcagcacaagataatctatgagcacagcacatatgggggatttcagccagtcacctggggtgcttgccaattgaattggagctttctttgccctgagaggaactggatgcttcacatattgaacacaacgacgatccggaatacccaaaaattccatcattgactctccccattcggatagcattgtattgaggaagttaatccagcaaaacacatactatgctcaaaaggtccgagcaacctagcagatacaaggtgagaacacagagagcttccagtatttgatgtctcacccccaccaatgccgaaactgtgattcatacttttcctagaccacccaaacaattccaacccatagcaccctggctcttcataccattcccatatgctcctcaaggaaatattagacaaattttgctgacaaatggagtcattaactaattggtcctttgaacaattgctgcccttcatgcaaggtacatgaccaatgactggagttgccaaatagataaatgtatcaagatcagtaattggatgaccggcagccaggtgggcatctgcagaaacttgcacttgataggcatcaccaacaaccctgaacatctcagtcagaagcatctcagcactgcataacttttggaagctgtgattccattcaacagccactaagtcagcttgggcagacccagaaccaggtaacagcggtccaggagtggtgccaatggcatcattggtttgatgcgaagttcctagtcctcttttctgcaagggaagagctcctacagtacaatttgttgatctaccagattctgaaggacaattgcccattgtaaactttggagctgtagtttcagaaggtgaatccaacctcatctcacagcaatttgattttataccgtgcatagcatttggtagctttttatctgaatcaatgttccactcgttaaaatcactatttgattttctgctgctgtcctcttttggattcgaagaatgaaggaggattctagcatgtttggaaaccttcgatgcaactctactatggggctctacctgcatgcaaatattacttggcttatgaatggtattcttggagttctttaacacaactccatgttgaagatgtatactgccaacacggttttgtctacaggacaaatccttagtgttgagttcctggaaaatttgcctagaggaacggccaacataattgtcatttcgaccacgtgtagcagcagataaacgctctccattggaactcttccaaagtgccattttcttctcttttctagctctctttcttgaaattactagatggaaatcgctgtcactgctagtgtcactgcacaaatggactgcctggattccgttgcgcataccaacaccattcggggaacaaatacgactactgcaattatcaccaactccatccctagaacaacattctgtcgtttcacatggatcagatccacgctcattctcgaaactcagcagaaccttgttatcatcccaacagtccccgctgctgccagcacaagtctcttgagatgaatgaacaagtgtggtattacaattattatccaaacacctgatgttactcttgttgtgctgtccaaacaattccaggcatgctgttgttggtctatacagttctgtctcatcacagtaagaaacacttaaaactgaagcaactgaacaggccgggtaatcatcatcattttcactgtcatgtgcctcttcagaggcttctttcactgatgaactgggtgagaaagtgtcctcaaacagtatgtcaccaacacacttaggagaaagtgtcgaatcttcacaatcaaccatactaatcgcaggggtaggacagttgttccctttacatttaatttcagatccagctgttggcttcctacaacgttgcttgtgcttcttgcttttctttttgctcttccttcttacagtatgtcctgcattcatgcttgttttggtaaagctgttgcctaagaaatctgaattggagatactattagatgctgtggatttctcccctagcagccctggtgaagtatctgcccatgatttgttagattcatgtggaacgttaagacgaaggagaataattggtggcgaggatgatgatgatgaagatgacaggtcaaggctatcttctggagatgccagttcggatgagctatggctacttccatccgtgtgttggaatggtttgaaatcacaacagatgttatatggaattactgtgaagatacgacaccttctcacagaataatcaagacagaccacatatctcacacaaaaccataacctttctttggtcaaagtcatagcatttccttctttggtttctgctagctgcatcagccttctacggaaacttaaagcagcacaagataatctatgagcacagcacatatgggggatttcagcagtcacctgcggtgcttgccagttgaattggagctttctttgcctgagaggaactggatgcttcacatattgaacacaacgacgatccggaatacccaaaaattccatcat

SEQ ID NO: 98757 - DNA, 202 bp, Oryza sativa
  Clone ID: PAT_MRT4530_96635C.1
gcacgaggttggttgaggacttgttctgtacatctaaagagagtaccacgcactttggttgttgcatgacctcgaacttcctagcaggttgggtctaaaacgctagcgattgggtagcagctgctcgatacattgaaatatttcctggtgtatttgtcatgaaccgctacttctatttgcctgcttggcttgtcgaccttgt

SEQ ID NO: 98758 - DNA, 134 bp, Oryza sativa
  Clone ID: PAT_MRT4530_96636C.1
acacagttgaccgtgcccgccgcctgcaggggttcttgccaattccgcctcacgaccggagagcacacataggccttacagcaggcacgagccgccgctcgccctagccatcgcgctcctgctgttgttggccg

SEQ ID NO: 98759 - DNA, 348 bp, Oryza sativa
  Clone ID: PAT_MRT4530_96637C.1
ggtcgactctagaggatcgcccacttggagcaaacggacacggaacggattagtagttcccgtctttttttagccttaaaagaaggcaagttggcaatggccaatcatttgttgggacggccctatgccctcagggggacggcggtgcagggacagcaattggggcgtaaattgggctttcccactgctaacctttgtttgccagcggataaactctggccgaagtatggagtgtatgcgggttgggtcaatctaaatgccttggacgcacccataccagcggtgattaatcttggtgatcgccccacagtcaacggccagtaaccttcggcggaagtgcatttactt

SEQ ID NO: 98760 - DNA, 355 bp, Oryza sativa
  unsure (1)..(355): unsure at all n locations
  Clone ID: PAT_MRT4530_96638C.1
caaagacgtatgcacgtnaaaccgtttcttcgcctgtatagcggccggcaccgtgcacacgcgcgcgccttcctcgatcgatcggtcggccgcgagctagcccggccggccatggcggcggtaccggagtggccctgcggcacggcgccgggaggccatgccggcggtcggcgtgggcacggcggattcggcggcgacgtcgccggagacgaaaaggggcgccgcgctggcgcctgngaggtgggcttccgccacttcgacaccgcggcgctgtacggcacggaggcgccgctcgggaaggcctccgcggaggcgacccgccgcgggcctcgtcgcctcccgggaggaggtgttc

SEQ ID NO: 98761 - DNA, 914 bp, Oryza sativa
  unsure (1)..(914): unsure at all n locations
  Clone ID: PAT_MRT4530_96639C.1
ttccgccagcgagcaaaaaaaaaaaaagaagaagaaaaaatccaccgatctggactcgactcgacggtcgacgccaccccccaccggccggccccgtctcgccgtcgccgccgtcgtctccgccacccaaaaccctagccctgcagcctcccctccgcagctcgccccctctcctcgccatggccaccaacggcagctccccgagggcgagggagactgagagcagcctggagaaggtgaagcggcagctctcgtcggggtccgggcggtacctgctgcaggggccactgctgaagcgatctgagacgttgaggaaatggaatgagagatgggtaattttagaccctacttcaggaaagatggaatacaaaattcggagaaatgaaactgccattaaaggaaccattatatttgatgcttcaagcactattaccttgtcccctgtaaatttccaagggatgccaaagtatgatggctgctgtttctacattggaactcctcaaaaaaaggattactttctttgtgctgaaactcctggtgctgcaaaggcttgggtatctacgttgcttgcaacacaattagtactacaagcgcataaagaagcagtgaattctttggctgggaacggctctcctgccacgttaggtacagttgctacagcagttgctaatgccaacgctactgctttggaggctaccaaggagatagaagcagcaatgaaagcttcaatgagggcagctcttgggttgggtgcaatcaatccaaaggaaggtcaacttgatgatttaaccatcatggaaggagactcttcgggtnaaagatgaggaattggcagaatttggccaaggatattcgttgctcgggatgctacaaattaaggaaatagcanataagattaacagagtcttgcagag

SEQ ID NO: 98762 - DNA, 110 bp, Oryza sativa
  Clone ID: PAT_MRT4530_9663C.1
gcacgagggtctcgtctaggacgtctccgatgaccatcaggacgtcagcagagcggaagggtttcgtcgactcccttgaccaggctcccacgggtgatggcacccacgag

SEQ ID NO: 98763 - DNA, 1686 bp, Oryza sativa
  Clone ID: PAT_MRT4530_96640C.1
atggccgcggcgcctatgagcttcgcttttacgctgctcgcggcttgcatttccttcttgcaccacgcgccggccgccgccgcagccgctccggcgaaccagaccgccggctttctcgactgcctcgccgcgagcctccctgccggcgtcgtctacacgcacgcgtcccggtcgtaccagtccgtcctcgagtcctccatcaagaacctcctcttcgacacgccggccaccccgacgccggtcgcggtcgtcgaggccaccgacgcctcgcacgtccaggccgccgtgcgctgcggcgtcggccatggcgtctccgtccgctcccgcagcggcgggcatgactacgagggcctgtcctaccgctccctcgacgcggcccgcgccttcgccgtcgtcgacatggcgggcggcgcgctccgcgcggtccgcgtcgacgtcctcggccgggcggcgtgggtcggctccggcgcgacgctcggcgaggtgtactacgccatcgccaacaagacctcccgcctcgggttccccggcagcgtcggcccgacggtcggcgtcggcgggttcctcagcggcggcggcttcggcctgatgctgcggaagcacggcctcgcctccgaccacgtcctcgacgccaccatggtggaggccaaggggaggctcctcgacaggcccgccatgggcgaggacctctttttgggccatccggggcggcggcggcggcaacttcgggatcgtcctgtcttggaagctccggctcgtccccgttccggccaccgtcacggtgttcaccgtccaccgctcaaggaaccaaaccagaacgcgcagttcgagtccctgtacctcggcacgcgcgccggcctcgtcgccgccatggccgacgccttcccggagctcaacgtgacggcgagcgactgcatcgagatgacgtgggtccagtccgtgctctacttcgcgttctacggcacggggaagccgccggagatgctcctggacaggggcaccggcaggccggacaggtacttcaaggccaagtccgactacgtccaagaacccatgcccagccaggtctgggagaccacctggagctggctcctcaaggacggcgccggactgctcatcctcgacccctacggcggcgagatggctcgcgtcgcgccggcggcgacgccgttcccgcaccggcaggcgctctacaacatccagtactacgggttctggtcggagagcggggaggcggcggcggcgaagcacatgggctggatcagaggggtgtacggggagatggagccgtacgtgtccaagaaccccaggggcgcctacgtcaactacagggacctcgacctcggcgtgaacgacgatggcgacggcggcggcggcgtggcgagggcgaggtatgagaaggcgacggtttgggggagagcgtacttcaaggccaactttgagcggctcgcggcggtgaaggccaaggtggatcctgacaactacttcaagaacgagcagagcattccaccacttccgagttagactgctgtggcctccagctccagccattcttctgctatagtaataatagaactagtcaaattctcatgtgttactacataataataaagtgagtatttgatagtttttttaaaaaaactttcaaatgtaactataatatattagcgcggctatattatacct

SEQ ID NO: 98764 - DNA, 552 bp, Oryza sativa
  Clone ID: PAT_MRT4530_96641C.1
atggcccgtgctgcttgggtgagggagctcatggcgttctccgtcagggaaaccccttgtgccgcctcctccgcacagagaataaaagagaggagaagaaagaaaagagaagataacatagagctgaagaaggaagatggacagtgggcacagccgaacctggccatggaggaccagcacaggtcctcgcctccaacggccgacacgagggggagggccgccgccgccggcgccccggaccgcgtggcgccgccgccctgtgccccggcgaccacatgcctcgccggcgccgccctcccccagcctccctccggccagatctgggaggggaggggagccgctgccgctgccgcccggagccgtcgtcgtcaccgtccacgccgccgccgccctcccccagcctccctccggccagatctgggagggaaggggaggggagtggagggcagccgccgccgccacccggagtcgtcgtcgtcgccgcaccacgcccccgccgaccacatgcctcgccgccgccgccctcccccggcctccctccggccagattag

SEQ ID NO: 98765 - DNA, 251 bp, Oryza sativa
  Clone ID: PAT_MRT4530_96642C.1
tcttccgcctcctgcattcttctccttgcttctgcgtaacctcgcgctttcttggccgcttcgcccgcgacgcaacgggggggagaggccttcctccgtttccttggataggataaagctcgcggatctccgctcaatccagttcttcattctcctctcccggttctgttcttggttcttggaaagccggtggggtgcgggtggctcgtggcgaccagtgctcgctcgatagatccatcctagatgctgag

SEQ ID NO: 98766 - DNA, 493 bp, Oryza sativa
  Clone ID: PAT_MRT4530_96643C.1
attaattattttttttttttttttttttataaaaggaacagataaaaacttttttacagtatttaaacaaaagggtattgagataaaaaaaaaaaaaagaggggggggggcgactttttgagggagaaaaaaaaaaagaggcttttaaaaagaaacaaataaacaaattaaaaaaaattttccgcccaggggaaaaaagggaaaaaaaagaaaggggtgtccaaaaggggttctaaaaaggacgacaaaaaagggacgaatagaatggtgggaaccttgacaaaaagcttctcacaaaggggggggccaaaaatcttcacaccggaacaaggccctgggagccaaactggaaaggggggcctttgggggggagaaactgggggcgcccacctggggggccatcaaggaaggaccagggttcctagaaaaccttttaaaacagggggcccattaagaaaaaaaaaagggggcttaaccgtaccggggcaaaaag

SEQ ID NO: 98767 - DNA, 314 bp, Oryza sativa
  Clone ID: PAT_MRT4530_96644C.1
gggttgagcattctaataaaaactcatatggcggaatctccaagaggataccaacagttcatcggaacgggaacacaaaaatagaaagaccatcttgagggatgcccttagcattcacaactgatattataagaaactttaacagcgcatatcaactacacaattgcctgcaattgattaattgatttactaagatattctttatccgaatggcctacttaattaagattccgccacattataaacgtctaggaagcttttgtattgcaggggaatgaatgccccgaactcatatcctctgttatacctgaacc

SEQ ID NO: 98768 - DNA, 1141 bp, Oryza sativa
  Clone ID: PAT_MRT4530_96645C.1
ctaacgacctacattgtgagttggattagcagatggattagtagtaggattagtgaaaccaatggacaacctccttgctttgagcaccccacgcctccacttcgtcgccgccttgaaccacccctcttccttcccatgtggctcatcgccactgccatccctcatccaatgccgtcgccggctcaccaacaggcctgccaccgtgcgccttagcccagcaccgtcaccttgtcccatgtcgccacctcccctcaacacagtgcgctgtggccgctacacatcaactccgctcgacatcgccgcctgcccaccgctgtcggtgctgtcgatctgtcgtcgtcctcgactccgcatcttcgccataaggaacgcaatgcaaaggatggggatagcgatggtttcttgtggacaaaggggagagatggtagcggcaatagtggcggtttcctgcggacaaagggggagagatggtagcaacaacggttggcagcacgagcttgagtcgcctgacagttgttgggctcatccaagtatttgtctcttctatcgattggcatgtagtgatttagtgccttcctctggattgtgcacacaagaactgttggccaggttccccctccactttagcttaagctctattagtgacgatgagcaacccataaccatggagatcatctatttcttctataaggtgctcatgtgttacacgttcctcctccattttagcttaagctccattggtaacgacgagcaacccacaaccatggagatcaactatttatataagttaagagagggcaagatagaagaggcgctattagccacggttggtcgcactatgcttgtctgcataggtggtactcatgtgctgcacgtgaggtttcccctccactttagcttaagctccattggtgacgacgagcaacccacaaccatggagatcaactatttctataagatattagagaaaataagtatggtggttcaaattggcgatgacgagcaacccaaaaccatggagatcaagagggtgaagattgtagttcacgtggcgagcatcacatcgatgatccttgcctttaggttaatgtttatcatctatgtcccgatgtcttatgtcaagcctctgtcctacaggtag

SEQ ID NO: 98769 - DNA, 145 bp, Oryza sativa
  unsure (1)..(145): unsure at all n locations
  Clone ID: PAT_MRT4530_96646C.1
ccacgcgtccggtagtatatcatttatggtagagtttttgagtgttgaagcccttaacattggcactgtagtccttcctcagctccacataccaccatctattcattttaacacaaagattttcctcttgttccttttnntctta

SEQ ID NO: 98770 - DNA, 543 bp, Oryza sativa
  Clone ID: PAT_MRT4530_96647C.1
ttggcctcagagaggcgcacacaccagtgcagcaatgagaggctaaccgatcagatcatcaagctcaagcaagctaaaatcaatgatcgatgacgtgcctaagcaacagtcgccatggatgctgcctttttgttcgaccgatgctggtgctggtgatggtgctggagctgacgatattgattccgccggctagctgtcttgcaagtccggttcggaacatctcggccatcttcatcttcggcgactcgaccgtcgatccaggcaacaacaacaaccgcctgacgccgtccaaggccaacttcccgccgtacggccaggacttccccggcggcgtggccacaggcaggttttccaacgggaaggccatgagggacatgatagcttcaaaattgggtgttaaggagctaattcctccttatctcggcgatggtcttcaactcgatgatctactcagtggggtagcatttgcttctggcggcagtggatatgaccctctcacttctaaaataacgaccgcgatatcaagtagtcagcagcttcaat

SEQ ID NO: 98771 - DNA, 2857 bp, Oryza sativa
  Clone ID: PAT_MRT4530_96648C.1
tcatcgtctcgggccatcctcttgtcccgcctccggccagtagccacccttctcactgtcgatcacgtggagttgatggagcttcctcatcgtgtcaggccatccttctccctgttgtccacctcttgctggtgcctgtcggatagcaatcactgtctggtgattctgaactccggaatgcagaggcagcgacgcagcgtcacatttctgaaccgacatccgacaatgcacgttgtgagtgttgctcgctgagatgattaggcgttgatgtcttctcctgtacaatgagtgcccggttatttgttcgccgacgattgtgggcgtgcttaatctgctgttcgcaagagtttcgcctgctgtaaacagctgctgctcttgagctgtattgccgaatctctgcaacttcatgcttctcccattatcaacttccatgttcatccgcgtactgaacacatgacaagtccaaagagtaacccgttttcttttcctcacgttgtccgtactagccaacaaggcaacaagtttgagcagactcacggtcgcgtcgacgtgccggagttcatcgccggacatggcgaccgccgtcgtacccgggatttgccacgcggtggcgttgatgtggcttcttctcgtgttgttttgctgggcgccggggttgacgtcggcggccgatacggcggcgtacattgtgcacatggacaagtcggccatgccgagggcgttcgccagccaggcgagctggtacgagtccaccctcgccgcggcggcgcccggggccgacatgttctacgtgtacgacaacgccatgcacggcttcgcggcgcgggtgaccgcggacgagctggagaagctgagggggtccaggggcttcgtgtcgtgctaccccgacgacgcgagggcggtgaggcgtgacacgacgcacacgccggagttcctcggcgtcagcgcgtcgtcgggcgggctgtgggaggcgtcggagtacggcgaggacgtcatcgtcggcgtggtggacacgggcgtgtggcccgagagcgcgagcttccgcgacgacgggctcccgccggtgccggcacggtggaagggctactgcgagtccggcacggcgttcgacgccgggaaggtgtgcaaccggaagctcgtcggcgcgcgcaagttcaacaaggggctcgtcgcggcgaccaacctgaccatcgccgtcaactccccgcgcgacaccgacgggcacggcacgcacacgtcgtccacggccgcgggctcgcccgtggcgggcgcgtcgttcttcggctacgcgcccggcaccgcgcgcggcatggcgccccgcgccagggtggccatgtacaaggccctgtgggacgaaggcacgtacccgtccgacatactcgccgccatagaccaggccatcgccgacggcgtcgacgtcctctccctctcccttggcctgaacgacgtcccgttctaccgagaccccatcgccatcggcgccttcgcggcgatgcagcgcggcgtgttcgtgtcaacctcggccggtaacgacggccccgaccccggcttcctccacaacggcacgccgtggacgctcaccgtcgcgtcgggcacgggcgaccgggagttcgccggcatcgtcaggctcggcgacggcacgaccgtcattggccagtcaatgtacccaggcagcccgagcaccatcgcgagctccgggttcgtcttcctcggcgcgtgcgacaacgacacggcgctcgcgagaaaccgcgacaaggtcgtgctctgcgacgccacggactccctcagcgccgccattttcgcggtgcaggtcgccaaggcgcgcgccgggctgttcctctccaacgactcgttcagggagctctccgagcacttcaccttccccggcgtgatactgagcccgcaggatgcccccgcgctgctgcagtacatcaagaggagccgcgcgcccagggcgtcgatcaagttcggggtgaccatcctgggcaccaagccggcgccggtggtggcgacgtactcgtcgcgcggcccgtcggcgagctgcccgacggtgctcaaacccgacgtgctcgcgccgggctctctcatcctcgcctcgtggccggagaacgtcagcgtctccaccgttgggagccagcagctgtacagccgcttcaacgtcatctccggcacgtccatgtcgtgcccgcacgcgtccggggtggcggcgctgatcaaggccgtgcacccggagtggagccccgccgcggtgcggtcggcgatgatgacgacggcgagcgcggtggacaacaccaacgcgcccatcaaggacatggggcgggccaaccgcggcgcgacgccgctggcgatgggctcgggacacatcgaccccaaccgcgccgtggacccgggcctcgtctacgacgccggggccgacgactacgtcaagctcatgtgcgccatgaactacacggcggcgcagatcaagaccgtggcgcagtcgccgtcctccgccgtggactgcgccggcgcgaccctggacctcaactacccgtcgttcatcgcgttcttcgaccccggcgccaccgccccggccgcgaggacgttcaccagggcggtgaccaacgtcggcgacgcgccggcgagctacagcgccaaggtgaagggcctgggcgggctgacggtgagcgtctcgccggagaggctggtcttcggccgcaagcacgagacgcagaagtacacggtggtgatccgcgggcagatgaagaacaagaccgacgaggtgctccatgggtcgctgacgtgggtcgacgacgccggcaagtacacggtgaggagcccgattgtggcgacgacggcgagctcggctccgctatag

SEQ ID NO: 98772 - DNA, 724 bp, Oryza sativa
  Clone ID: PAT_MRT4530_96649C.1
actagtggatccccgggctgcaggatgcgcccgaaaaaattgtgccgtctactcatcaaactcttatcagatctcctgctgaaagaatccggaaaatatgaatatgtgcatccacctcctatggagactcaagcggcagatttaccggagctttcacaggatatgctgatggagatctttgccctcctggagatccctgaccttgttcgtgcgggatctgtctgccaatcctggcgttctgcctacaccagcctacgcgacatggggcagtacaagcagcagactccctgcctgctctacaccactgaatcctcaggcgagaaggtttcatgcctctacagtcttgtggagaagagggccttcaggttaactctcccagggacgccgctgcacaaaagactgccgattggatcctcacatggttgggtggttactgctgatgagttatccgagcttcatcttgtcaatccaatcaccggacaacagattgccctcccaccggtgatcaccattgagcaggtgaagcccatcttcaatgacattggtgttgtccaaggctacaagatcggatggtactgtgcagagaaagattatggagatccgtatggagagccgtcgccaatccttactcccagtgagctgcgtgaccacctatactacaaggcatttgtgtttcctgatcccttgactagaagcttcattgtggtggtcatccactatccat

SEQ ID NO: 98773 - DNA, 258 bp, Oryza sativa
  unsure (1)..(258): unsure at all n locations
  Clone ID: PAT_MRT4530_9664C.1
ggtcgttgaatcataccgagagcctaacgttgcacctgcnccgagtgccaccatgtcatctcaggcagccgtcaggcnccggtcacagccggcggctccaccgccgcagacgccacccgtgacgcctctctccggtgactgntcccccgacgntctcacccnctncggtgacgccaccactcggtgactcccccgccgnantcacctcctccggtgagtcccncacctgtgacactctccacatgaagagcccccgac

SEQ ID NO: 98774 - DNA, 273 bp, Oryza sativa
  Clone ID: PAT_MRT4530_96650C.1
atgagagaggcggagacgaaagcggggccgcaatataaaggacgcctcgcgtcgcgatcagtcgtcgatgccgcgacaggtggtgggttcggccgcatccgggccgtccacgagtcccgcctccccgccgcgcaccgccacgcgacacgtgtccttcgcgtccacaccaaacggcgaccacccacccaggcccggacacgtgacgaagctaccaccaacgcaaaagagaaaaagaaaaatatatcgctgtcattcgtcgtcgccacgtactag

SEQ ID NO: 98775 - DNA, 1875 bp, Oryza sativa
  Clone ID: PAT_MRT4530_96651C.1
ttataccccaaggaaatcgatgtcgttctcagtgagaaacatctttcctctgtttgcattgttggccctccgctgggaggggggttggcctctcttgcgcaaaacaaatgcgaggtagagataggctacctcccattcatcctgtgacagtgtactttggtcctgccttccatcacctagggcacccagcctccgcatgagctcagcaaactctggcttttgcaagtactcgtgtacaaattcatggaagtttttcgtcagaaccaactccaggtcatactcctctgccagcaatttgaagagatggaatggaacaacccattccgggcaatcaacagcatcctctaagtgaaacttgtatttgataccgaaaggtctggatgcggggaatttcttttcagcatactcttcgccaaaactaatccagtaaacaccattcccaaattccatgccatcagtttctctaagccttttgatgatgacattagcatcaggcattgtcccaatgaaaactcctccaggacgaagcaaagcagatacattagctagggcttgtcttgcacgtgcttcagttgaccatgagtaatgtaacgcaaactggcagctacatatgtcaaacggagcatcctcatataaatgctcatccaaacgagcctcgtaacaatcagcacaaataagccgtgcaggaaaactgaacttcttccttcgttgttgatcagtgtcaccattatagcgagtcatgcaatcttttatcgagccttcggcgatatcaactcctacataatatccaaccttggctttgtcccactttatcaagtcacctccctttccacaagccagatcaagaacgcagtctccggggtgtgcgtagagctggatcagaacactcttaatccagttgttgagcttcttgaggtggatgatggggctgttctcccgctcctcgagcgtctggttcgacctcgcgctgtagtggtccgccacccgccgcgcgctgctccgctcctccgagtacccatgccccccataccctccgccgcctgcgccgtactggcgcttgggggcggaggcgaaggaggaggagggctcgtcgcggggccgcttgttcatgccgccggcgatcgccgccgccgccgccgcctggattggaaggaggagggtttcgattcgattcgattcgattcggctcggctcggccgccgctcggtcggctctgcgtctgcgtctgtcgcgcttagggatcccagtcgggcacgacgggcacgggtagtgactacccatgcccgtgcccgcgaggtaatttatgcccgcgggcatgcccgttactacgtgacgggcaaggagtacttcccatgcccgttgcccgcgggcgccatgtgcccgcgggggaatagaaggggaaaagaaggggaataccttgcggaggaccggaggcggcggcgaccggagacggcggcgaccggggggaggggggaccacggctcggcgcagtggaggcaggaagcagcggcgacggcggccgcaaacggagggggcctggatggaggacgaccggccggaggggtgctcggcgcagaggtgaagcccctcccggaggcaaagcccctcccgtccccttctgcggccgtgaggcaaagcccctcccgtcctctctcgtcccctcacggcgacgactgcccggcggccggcggcgggagtgggggcgccggcggcgggggtgggggcgccggcggagaccggggtggctgggaggaggagtcgaggctgggaggcggctgggactgggagtgggaggagaggcggctgggagtgggagtgggaggaggccggagggagagaaaccctaaagattttagacggtggtttttatactaa

SEQ ID NO: 98776 - DNA, 119 bp, Oryza sativa
  Clone ID: PAT_MRT4530_96652C.1
cgccaccacgcgcgactctttactggatggtgtgcaggcgtggtacgagatcgagaggctgagccgccgcgttatgttcaggcgcaactgctacgccgtgcacgctcgccgtgtcgccg

SEQ ID NO: 98777 - DNA, 451 bp, Oryza sativa
  Clone ID: PAT_MRT4530_96653C.1
tttgtttaatgttattgtttttttaatttttgttttattttgttcaaagttttatatttaattttattgtttcatgacacttttagtgccaggaaaagcacagggtttaccacaaaaaggccaaacacgggaaggagcttaacaaaggcaaggtgacaacaatggaaaaaggcatttccaacccccaaaccaaacagggggggagaccaggtggttgggccccaaaagggggaaaaaatttaggcaaggaacctcaaaaggggcgaaaagtttttcccggaaaaaaaaaaagctttgggcccccaagggaccccctgaacaggttttccgggggggaattcgggggggccaaaaaaaactgtaaaggggcccaaaaaaatttccaaaaaagggggaaaccaggggggccttaaccaaagggcccccggaaaaaaaaaaaaaatgcccccct

SEQ ID NO: 98778 - DNA, 459 bp, Oryza sativa
  unsure (1)..(459): unsure at all n locations
  Clone ID: PAT_MRT4530_96654C.1
cgaactccgtcccccctttncccctcttctttaccgatgctgccaggcacaccaccgtaagagtcgtcccccgtgctcctcctcctcacggtcctcctcgtcgtggtgcgaccccgcgccaagcaatctccggcgagccggcgtcgcgaagggcggncccgaggctcgcggcccgcacccnnncacccaccgccgcaaacntcgtccgcacccgcgnagctctccctctcttcgttcgtcgtcggtgcctcgaggattccctcggcgtcgactcctcgcgagttagttcgctgncccgtcgctgcgccgatttcatnccgcgagctgagagggggagggcgccgctncgtcgtcgtcgtctgtctgttgcttcgcgnatcccggaaaatnttgtaaaagctatggaaatttaaaattcttaacataaaaagtccgaatatgtgtaaaaatgatggcaca

SEQ ID NO: 98779 - DNA, 1784 bp, Oryza sativa
  Clone ID: PAT_MRT4530_96655C.1
cccgggctgaggatcggcacgaggcccggccggataccaaagtcggcggctacacctgactcatcgatccactactgccgccgccgcccatggcctccgccgccgtcgccgtcgcccccgtcgtctccgacctcgtcgacttcctcaacgcctcccccaccgccttccacgccgtcgatgaggcgaagcggcggctgaaggcggcggggttctcgcagctgtcggagcgggaggagtgggcggggctccagcccggccgcaagtacttcttcacgcgcaaccactccaccatcgtcgccttcgccatcggcgccaagtatgctgccggcaatgggtttcacataatcggtgcgcatactgacagtccatccctgaagctcaagcctgtctccaaggtaacaaagggaggttatcttgaggttggggtccaaacttatggaggtggcttgtggtacacatggttcgaccgtgatcttactgttgctggtagggtgattgtaagggagaagaaggatggtgcagtgtcgtatgcgcataagcttgtaagagtgcaagagccagtcatgagaatccccactttggctattcaccttgacaggaatatctcctcagaaggtctcaagattaacaaccagaatcatcttgtccctgtgctggccacatctgttaagaatgaaatgcagaaattagtggcagaaaatggttcagagtcatctgagagtaagaacaccaagcatcatccactattattgcagttgattgctaaagaagcgaactgcaagcctgatgagatatgtgactttgagctgcagttgtgcgatacccagccaagtactgtagcaggtgccatgaaagaattcatcttttcaggaaggcttgacaatctttgcatgtcattttgttcgttgaaggccctaatagaatcgacttcttctgaagaatctcttgcgcatgaatctggtgtgagaatggtggctctatttgaccatgaggaggttggatctgattcggctcagggagctggttctcctgccatgttagatgctttgtcaagaatcacagggtcttttaactcttcaaattcgaggttgctagaaaaggctattcaaagaagctttctagtatctgcagatatggcacatgccttacaccccaattatatggacaagcatgaggagaaccaccagcctaaattgcatggaggactcgtgattaaacacaatgctaaccaacgatatgctacaaatgctgtgacagcatttatttttcgggaaattgctgagaggcaccatctacctatacaggattttgttgttcggaacgacatgggttgtggttcaaccatcggcccaatactagctagtggtgttggtattcgtactgtggatattggagcaccacaattgtcgatgcacagcatcagggaaatgtgtgctgtcgatgacatcaagcactcgtacgaacacttcaaggcatatttcgaagagttcactgaattggacagcaaagttaaagtagattgctaagatgaagtagtgaccatactggatcagccgactggtggtgttgctttgacatatcctgtactgttgcaaaataaatgaacaataaattgggttacattatctcgtcacaggaatctcatggagaatatattttctggctgtgatttttatctcctcgttcctggtcagttgccgggatctgtgctggccacatcatcttttatggtctagtacaggtcgaaatgtgcttcttagaagtataataagttttcacctcaa

SEQ ID NO: 98780 - DNA, 1311 bp, Oryza sativa
  Clone ID: PAT_MRT4530_96656C.1
atgggtcgtcggcgacggcggcgcaaccgcgacgccgagttcgacatggcggagatcgaccggatggtgccggtgatgaagctggaccggacgaggcagccatggctgaccgtccccggccgctcaagctgcacctgcgactgctgcaatgtgacgacgaagaagaagccgtccaacaaggctctcatcccggcctggctattccgatccgacgacgacgacgatgatcaccacgaagaatcagcagaagaggaggaagaagataatcagctgcaaggcctgaataaacacttagctgaatatcggattggtcaatatgagattcgaggagccacgataaaacgatacccttacacagatggctacgagctcaccgagaagctgaacgccgagctgccggccggcgagcggcgctacaccccgaccttcgtcctcgagggctcctcccaccgcgacggcttcttcggcctctcgtggcactccgagtaccggatgcacgagacggcgccgacatcgctgccccgctccaggttcaccacccctcacccccgctgggactacgaagccgacaacatgctgcagctctgctcgctcagcctcgccgccggcgccggcagcggcggtgatgggcggcggctgctcgtctatgggatcgtcgccgcccgcgacgacatggaggggctgcccaactttgtgttcaaccggacacgggacaacgcccaggaagtgacactgagctctcctgcactggagctgtcatctccactgcgcggcatctccgcgttcgagcatgtgttgctcgagttcgacctgaagctgaagaacaccgccggcgacggcgccgacgctgacgccgacgacgtgctggtcgacgcgtgcaaagagttcgtcgacaggacgatcacctgcagcgccggcagattgctgaggtcacgcatcgagggcccaatctgctcgctggacatggactacatgttcatcaagagcggcgtcgaggccgccgtcgaggtgttcctgggcgactcctgcgcgagctgcttccagagcgtggctgccgtctaccgcgccatcgccggcgacggtgacggcggcggcgacgggattgtcatccacgaggagtccatcccgcttcctccgaagctgatgctggccgccgataccgctactgctcaggccgccgcggtggcgacggtggtcgccgtgccgtcggccggcgagctaacggtgacgctcagcttcgccacggcgaggcaccgcacccgcacgtcgcctccgctcagctatctattcgctaggtctatacccatatga

SEQ ID NO: 98781 - DNA, 1651 bp, Oryza sativa
  Clone ID: PAT_MRT4530_96657C.1
atggaggccaaggacgtctcgccgctcgtcaccgtcccgcccgcgcccgccgccgccgcgccgccacctgcggcagcgcccgcgccgccgccgtcccagccgccgccgccgccgctgccgttcgcgcagcaggcgccgccgccggccgccaaccccgcggcggcgcccatgcggctgtcgttcgaccagatggcagggaaggcgcccgggggggagcagcagcaccaccaccacccggggcccatgctgtacgcggcggcgcccgcgggcggcgccgcgccgccgccgcagggcggcaatgtgatgggcatgggcgagctgatgcgcaagaagcgcggccgcccgcgcaagtacgcgcccgacgggagcatggcgctcgcgctcgcccccatctcctccgcctccggcggcgccgcgccgccgcctccgccgccagggcaccagccgcacggcttctccatcagcagcccggcgtcggatccgaacgccaagcgccgcggccggccacccggctccggcaagaagaagcagttcgaagccctaggctcatggggcatcgccttcactcctcacatcctcaccgtcaaggccggcgaggatgttgcttcaaaaattatggccttctcacagcaaggccctcgcacagtttgcattctctcagcgaatggtgcaataagcaatgtaacacttcggcagccagctacatctggtggacttgtgacttatgagggccgatttgagatcatctctctatcaggttctttcctgcttgcagaggatggcgacactcgcagcaggactggtggcctgagtgtcgcacttgcaggatctgatggccgagttcttggtggatgtgtagctggaatgctgatggccgcaacccctgtccaggttgtcgtggctagcttcatcgcggaaggtaagaaatcgaagccagtcgagacaaggaaggtcgaaccgatgtcagcgcctccacagatggcaacctacgtgccagctccggtggcgagcccgccatcggagggcacatccagtggatcgtccgatgactcgggcagcccgatcaaccacagcgggatgccgtacaaccactccgggcagcagcagcaacaccagcagcaccagcacatgccccctgcttacgcatccggtggctggtcgctctcagctcatcatcagaacaggcacgactctgacatgaagatgatgtcgaactaacactctgctcggcctcgaggcgccccatttgtttggttgggctgaagaaggagctgatgatggatggtggatcgtgttcgtacccccctctgctagctaagagatttaggaccatggtgatgaatgatctcagagagatgtgttgttgctgttgtttttccttggagtaagattaatttaggcgctgttgtaacgctgtagctgtcataattaagccgcctctaacgcaagagtttattatgtgttgtactaccggtggatatgccttctgcttgtctgtcttgctgagatcttcacctccttagtaggctagtagtagtctacatacagacttgtatgaatttacctgaatgctttgatttcaattcgagaacttttactaggttgtttcaaaaaaaaaaaaaaaaaaaacgacctgcagcccggggatcca

SEQ ID NO: 98782 - DNA, 1410 bp, Oryza sativa
  Clone ID: PAT_MRT4530_96658C.1
atgggtcgtcggcgacggcggcgcaaccgcgacgccgagttcgacatggcggagatcgaccggatggtgccggtgatgaagctggaccggacgaggcagccatggctgaccgtccccggccgctcaagctgcacctgcgactgctgcaatgtgacgacgaagaagaagccgtccaacaaggctctcatcccggcctggctattccgatccgacgacgacgacgatgatcaccacgaagaatcagcagaagaggaggaagaagataatcagctgcaaggcctgaataaacacttagctgaatatcggattggtcaatatgagattcatattggtagtcaaagtagcatctcggagactgtaccagagtccaaaaatacttatattttaggacaaatggagtatatgaacatttcttgtcttgcaggaggagccacgataaaacgatacccttacacagatggctacgagctcaccgagaagctgaacgccgagctgccggccggcgagcggcgctacaccccgaccttcgtcctcgagggctcctcccaccgcgacggcttcttcggcctctcgtggcactccgagtaccggatgcacgagacggcgccgacatcgctgccccgctccaggttcaccacccctcacccccgctgggactacgaagccgacaacatgctgcagctctgctcgctcagcctcgccgccggcgccggcagcggcggtgatgggcggcggctgctcgtctatgggatcgtcgccgcccgcgacgacatggaggggctgcccaactttgtgttcaaccggacacgggacaacgcccaggaagtgacactgagctctcctgcactggagctgtcatctccactgcgcggcatctccgcgttcgagcatgtgttgctcgagttcgacctgaagctgaagaacaccgccggcgacggcgccgacgctgacgccgacgacgtgctggtcgacgcgtgcaaagagttcgtcgacaggacgatcacctgcagcgccggcagattgctgaggtcacgcatcgagggcccaatctgctcgctggacatggactacatgttcatcaagagcggcgtcgaggccgccgtcgaggtgttcctgggcgactcctgcgcgagctgcttccagagcgtggctgccgtctaccgcgccatcgccggcgacggtgacggcggcggcgacgggattgtcatccacgaggagtccatcccgcttcctccgaagctgatgctggccgccgataccgctactgctcaggccgccgcggtggcgacggtggtcgccgtgccgtcggccggcgagctaacggtgacgctcagcttcgccacggcgaggcaccgcacccgcacgtcgcctccgctcagctatctattcgctaggtctatacccatatga

SEQ ID NO: 98783 - DNA, 444 bp, Oryza sativa
  Clone ID: PAT_MRT4530_96659C.1
gctcttggttggcaagcgacagctggtagaacaagcatgcaacgttgtgctgcatcaacccaatggtttaatgaaagaatttcacttgctagatatgcacatgtcccattgggaaactttgaactggattggcttcttttcaccgctgacgtgttcttttcaagggcattgcgtgatcaacagcagaaggtgcagtgcccaagggctgtgccctgcaatctctcgatcgatctacctgatcaacgatcatgggagcattatggggcaacagcgtctgggaattcaggaggagaccaaaaccgcatcgaaacggctccgatcgaaatgacaacgacagtgtgggggcccgcatgtcctttccctgtccatgacatcatgcatgagcgctttggactggggcccaccaccctctcccttcgacctccacaccggcgattgagatga

SEQ ID NO: 98784 - DNA, 426 bp, Oryza sativa
  Clone ID: PAT_MRT4530_9665C.1
atgtcgtccctccctggtagtcatgatctgggacaaatcatcctgtgcacggctcgacatgaaccgattgacgacggtcacttggaaccggtgaacgtctaccaccagctgactttgattgacatgcgtggacgcgagggggggggggggggggcttggaaaagtttttacagcgaaggcaagcagaagagtcaaaaagttcgttcagggcgttttcgccgccacgctgatccatccagcagatctccaactcagatcacgaaaaagttcaccgattttcccccaaaaggagcagcgctgaccacagcagcagcgacggatagcccacagcagcagatctccacgccgatggttttgcccttgctcctcctccgatggtttatcgccgtccgctcttacgcgacgtcacgtgacaaaagtacggcg

SEQ ID NO: 98785 - DNA, 384 bp, Oryza sativa
  Clone ID: PAT_MRT4530_96660C.1
gaaggaaatcactggctgcagtgtaccttaggggggaccattaccatggtttaaacacatcagatgcctaacaaaaatccaaggctcaccattacaagctagtataacggagcgacagacagcaaccagggggggggtcagaaacatggaaaatgaaaacagcagctgtcaatgatgtgcgcttagcaacaactaaaccacttcaacagggggcccgaaaaacaactgaagatcttgaggggactcaatcctgcaggatgctcaagcttgatcttcttagatggccatagcctgggtaatctcgttcatagcgaacagatttggcagcacccagcacagttttccgagagaccctaccataaccttgaacaaccaaagaatcca

SEQ ID NO: 98786 - DNA, 861 bp, Oryza sativa
  Clone ID: PAT_MRT4530_96661C.1
atggatcccctctcccccgcactagcccgtccaacgtggtcatcttccagcggtaagccaccgctgcaagaggacaattgcctggaaagaagttcgtcgcaggcttcgacgcctccctcatggcgctaccgccgtcgccgcctcgaccatgttgcccgtgttcccgcaatgggtcacctagtcgcatcgccgtcgcctccatcctcccaccacgatagccttgctgccgctgcgcaccacccatgccgtgcttgcaccacggcaccatccgcgccgaccttccacggcccctgtcagtcttccaccgccacctcgctgcaccggaggcccccagagcctccgggcacgcctctaatcaccaccgtgcccgcctactaccaccatccgctgctcccagtcggctcctctccatccccgccgccgtctccgcttgcctcccaccgacggcgacgcgggtgtgcgcccaccgtcgacgtcgtcgtcatcgcgcccttctacctccagacgtcgcccccgccacctccacgctgccgcgtctcgctgccgccggctcgagggttggctccccgtgcgacgctcggggaggccgcccttacacctcggacgtccgccgcctccacgccgccacgccctgacaccgttgtctcgaggggatccgggcggaaggcggccggatttgggccatcccaccaccttcacgtccacaccgccaccgaagcccacgtcgccacctccacgcagcctcgccaccgccaccaccggatttggacgggagggtgccggatctggccggcggcgccgcctcgccgtcgtggcgtctcccgtacggtcggagtcgtgggcgtgaactacgcgacctag

SEQ ID NO: 98787 - DNA, 200 bp, Oryza sativa
  unsure (1)..(200): unsure at all n locations
  Clone ID: PAT_MRT4530_96662C.1
ataaccaagccaatnttatgaaggaagtaccattnggaacaaangagangttggtgcatgaccangggatgaaagangacnanaacaaggntgtaaattcagnagcttcagacttcatnannctnaancacaggncttgnncactgcagannagcgcaagcatgtatnaaccttcttaaatgcgggtccaanannatggg

SEQ ID NO: 98788 - DNA, 138 bp, Oryza sativa
  Clone ID: PAT_MRT4530_96663C.1
atggcttatcatacatgctctaagaaagcggaggcctcttgtccgtggaaccgggagaagagctcacctcgagctgggacagctctggcgagctcaatcttcgagtgggcagcaaagccgacgctggcgaagacatga

SEQ ID NO: 98789 - DNA, 2466 bp, Oryza sativa
  Clone ID: PAT_MRT4530_96664C.1
gcatttcaaatttttcggggactcatccccattcccacctcctcctcccccaccaagctcgcttccgattcgcttccatggcggcctccgaccacgcacgcgcatagagggtgcgcaggctgcccccgaggcctgccgggccgcagcgcccgccgcccgttgggaaccctagcgcgccgcccatctgcacctccggcgagatgcctgtgggccccgccgcagccgacgccgctgacgatggagaggagggataatttccttcagccccctgccgccgccgccgccccagccgccggcggcggaaagggcctcccggtccccgccacaggggacgcgacgaacctgacctcgtcgtcgagctccacctcctccctcacgctgtcccctccggacttcctgcgtcaggttcaggccgcgctgaagcggcataggcctaccggttcgatgcagtccaatcaaccacgagcaacccgagtcctggtgtcccgaggtgagggctcaacgaaagctgttgccaacccttctgtggcacaaaatccggaaggcaaggttatgcagcagaggagaggcctgctgggggcttccaggttgcgaaatgcagctcctgatcagaacaaagctgttgtctcaagtcaagacgaattgttgttgactacgcctttgacattgggaactatcactgatacccatgatcagaatggtggtcagaaccaccagccgaaaagtgacactgatctcttggtggataggaagaaatcgtcaatggaagtttcttcctcccagatggcatccgcaaatgcattggtaggggaagatttcaaaaaagacctattctatttgactagcgatccgcagttaacttctcagacaggagataattttcctgtcgctcaagtagcagatgatcaaggcaagaaccacaaggagattgggattgctagtgcagcagttgagatggatatcaagtatgatgcagctaacttgtcccgaagaattgatgaggcttgtgatcagaatcatggagagccaatgactcgttgctctgccatgggttcatcagtgactgctgtatctttatattcagggcctactattcaaagtaaaagtgctgctcagattgatcaatatgcttcaccagctcagatgccacaatgtggcagagaatcatctggtgtatcaggtcatggctctcaaaaactgcatggagtggcaatgaatcatgctgattgcaataccaacaaacagcaggttgataccaatggtgggatggacaaacctgtttctagtagtgcagtttgtttgccatcccaagggttatctgggaatgatcaatctttgtctgccaaggatgatggtgctcctagacgaagcaaggttgaaaaggagtgtcgcaaaaagaattatgatccggatgtattctttaaagtgaatggaaaactttatcagaagctaggtaaaatagggtctggaggcagcagtgaagttcacaaagttatatcagccgagtgtacaatatatgccctgaaaaaaataaaacttaaaggtcgggactaccctactgcctatggcttttgccaagaaattgagtacctaaacaagttgaaaggaaagagtaatatcatacagttgattgattatgaggtcactgataaaagtttgcttcaagatgattcgctgtcacccagagatgggagaattaaggatgatcactacatttatatggtccttgagtatggtgaaattgatttagctaatatggttgctcaggagtggaagaagaggaacacctcaaatatgaaaatagatgaaaattggctacgtttttattggcagcaaatgcttaaagctgtcaatacaatacatgaggaacggatagtgcactccgatttgaagcctgcaaattttttgcttgtgaggggtgcactgaaacttattgactttggcattgctaaagcaataatgaatgataccacaaacattcaacgtgattctcagattggaacactgaactatatgtcacctgaagcattcatgtgcaatgagcaggactcgggtggtaatgttatcaagtgtggacgtccatctgatatttggtctcttggttgtattctttaccagatggtgtatggtaagacaccatttgctgattacaagaatttctgggccaagtttaaagttgttactgataagaaccacaagatcaagtatgaaccggtagataatccatggcttattgatttaatgcaacgatgccttgcatgggaccgaaatgatcgatggagaatacctcaattgcttgagcacccgttccttgttcctttggttccaagggatttaccttcaattgaccaagacccgtgtaggttgctgatggagagggttagagttcactgggccaatcccaagcttcatagttttattgcagagctcgagaaggatcaatgccgtccagccactcaaatgtaa

SEQ ID NO: 98790 - DNA, 117 bp, Oryza sativa
  Clone ID: PAT_MRT4530_96665C.1
atggcgtatcggacaggccacgacatggcaaaggaacgccttcactctcagctcgccctctacgctgttgacaaaatggtggagctcaaggagactaaagattctattgtcgaataa

SEQ ID NO: 98791 - DNA, 2675 bp, Oryza sativa
  Clone ID: PAT_MRT4530_96666C.1
atggctaccctccgccatctcgccgccgtgctcctcatcctcttcgccgccgcgtcgccggcggcggcggccgcgagagagcagtcgacgtacatcctccacctcgcgcccgagcacccggcgctcagggccacgcgcgtcggcggcggcggcggcgccgtgttcctcggccgcctccttcgcctcccgcgccatctgcgcgcaccgcggccacggttgctctactcctacgcgcacgcagcgacgggggtcgcggcgcgcctcacccccgaacaggcggcgcacgtcgaggcgcagcctggggtgctcgccgtccaccccgaccaggcgcgccagctgcacaccacccataccccggcgttcctccaccttacccaggcttccgggctcctgcccgccgccgcctccggtggcgcgtcgtcacccatcgtcggggtgctcgacaccgggatctaccccatcggccgcggctccttcgcgcccaccgacgggctcggcccgccgcccgcgtccttctccggcggatgcgtctccaccgcctccttcaacgcctccgcctactgcaacaacaagctcatcggcgcaaagttcttctacaagggatacgaggctgctctcggccacgccatcgatgagacggaggagtccaagtcgccactggacaccgagggccacgggacccacaccgcctccaccgccgcagggtcgccggtgaccggcgccgggttcttcgactacgcgcgtggccaggcggtgggcatgtcccccgcggcgcacatcgccgcgtacaagatctgctggaagtccggttgctacgactccgacatcctcgccgccatggacgaggccgtcgcggacggcgtcgacgtcatatccctctccgtcggcgccggcggctacgccccgagcttcttccgcgactccatcgccatcggctccttccacgccgttagcaagggcatcgtggtgtccgcgtccgccggcaactccggccccggcgagtacaccgcgacgaacatcgcgccatggatactgaccgtcggcgcatctaccatcgaccgcgaattcccggctgatgtggttctaggcaacggtcaggtctacggcggcgtgtccctgtactccggcgaacccctgaactccacactgctcccggtggtgtacgccggcgactgcgggtctcggctttgcataatcggcgagctcgatccagcgaaggtttccggcaagatcgttctgtgtgagcgtgggagcaacgcccgtgtggcgaaaggcggggcagtgaaggtggccggcggtgccggcatgattctggtgaacacggcggagagcggcgaggagctggttgccgactcccacctcgtcccggcgacaatggtggggcagaaattcggcgacaagatcaagtactacgtccagagcgatccgtcgccgacggcgaccatcgtgttccggggcacggtcatcgggaagtcgccgtccgcgccgcgcgtcgcggcgttctcgagccggggccccaactaccgcgcgccggagatcctcaagccggacgtcattgcccccggcgtcaacatcctcgcggcgtggaccggcgagtctgcgcccaccgacctcgacatcgacccgaggcgcgtggagttcaacatcatctccggcacgtccatgtcgtgcccgcacgtcagcggcctcgccgcgctgctccgccaggcgcaaccggactggagcccggcggcgatcaagtcggcgctcatgaccacggcgtacaacgtggacaactccagcgcggtcatcaaggacctggctaccgggaccgagtcgacgccgttcgtccgtggcgccggccacgtcgaccccaaccgcgcgctcgaccctggcctcgtgtacgacgccgggaccgaagactacgtctccttcctctgcacgctcggctactccccctccatcatctccctcttcacaacagacggctccgtcgccaactgttcgacgaaattcccccgcaccggggacctcaactaccccgccttcgccgtcgtcctatcctcctacaaagattcagtcacctaccacagggtggtgcgcaacgtcggcagcaacgccaatgccgtctacgaagccaagatcgacagcccgtccggtgtggatgtcacggtgagcccaagcaagctggtgttcgacgagagccaccagagcctgtcctacgacatcaccatcgccgcgtcgggtaacccggtgatcgtcgacaccgagtacaccttcgggtcggtcacctggagcgacggcgtgcacgacgtcactagccccatcgccgtgacatggccgtcgaacggccgagcagcatccatgtagagtagtgttggaaatttgggtgtcttctggtttggtggcaatggggacagcttgtataggtccttcttggacagagatctccacgcatgagaccaaatccttccatgaagcttagtgctcccatggcttcatggaagggatcggttgcctgttcatcgctatgcacatgtgtaactcactggattggagtggtgaataattttatttatgctaaattacctggattcccatgctagaagttattagacttcatttcatcagataggtgtactgaataagatgtaattccctccatttcaaattacctgtcattctagttttaccat

SEQ ID NO: 98792 - DNA, 400 bp, Oryza sativa
  Clone ID: PAT_MRT4530_96667C.1
tttttctccttttccttttttttttttttttttttttgggtttttttttaatttttttttgggtttaccccccccttttgcttgttcaaaaaaaaaacacaacacccttttttattgatccggtttaaaacccgcccaaaaatacaccctcccggaaaaaatctaaccttttttccaatattaggtcaaccaaacacgggggcccaaccaaaccctaccttttttcgggaccaggaccgccctttacaggcccggggacacacagacacactttttgggaaagacccccatccttataaacccaggcagcttaacctaaagcccaaaccccccatgggaactcgggcggggcgggcatcacttgccggggacaaaggtccaggctactgcccacatcctg

SEQ ID NO: 98793 - DNA, 1063 bp, Oryza sativa
  Clone ID: PAT_MRT4530_96668C.1
ccgcctccaccgcctcacccgtcgtcggggtgctcgacaccgggatctaccccatcggccgcggcttcttcacgcccaccgacgggctcagcccgccgcccgcgtccttctccggcggatgcgtctccaccgcctccttcaacgcctccgcttactgcaacaaccagctcatcggcgctaaatgctctcggccacgccattgatgagacggaggagtccaagtcgccactagacaccgagtgggacacgggacccacatcgcctccaccgccgcagggtcgccggtgaccggtgtcgagttcgactacgcgcatggccaggcagtgggcatgtcccccgccgcgtacaagatctgctggaaatccggctgctatgactccgacatcctcgccgccatggacgaggccgccgcggacggcgtcgacgtcatctccctctccgtcgacgctggcggctacgccccaagcttcttccgcgactccatcgccatcggctccctccacgccgttagcaagggcattgtggtgtccgcgtccgctggcaactccggcccggcgagtacaccgcaacaaacatcacgccatggatactgaccgtcggcgcgtctaccatcgaccgcgaattcccggctgatgtggttctaggcaacaaccaggtctacggtggcgtgtccctgtactccggcgaacccctgaactccacactgctcccagtggcgtacgccggcgactgcgggtctcggctttgcataatcggcgagctcgattcaacgaaggtgtctggcaagatcgttctgtgtgagtgtgggagcaacgcccgctcgccggccgcatctggtgcccatccccgagcgcaagagtcccgattggtagcaccaactgggactacaaatccgaaaaaacacgccgggtcgcacgtgtgcgcctccccgcccttatctcctcgatatctccacgcctttttaagtcatttgcgtctcctcctctccctccagatgcgtcctcccctacccttcctcctcctcctccccctcccctcccctctctgtcggcgacggcgtgac

SEQ ID NO: 98794 - DNA, 603 bp, Oryza sativa
  Clone ID: PAT_MRT4530_96669C.1
atttacagcatgggatggtgggagggcagagggtttcttgaccatgggtaatgaagccgaattgctgaagctaaacaatgccctagagtttggcatccagtgaattaccatattattgtttggtgcaactactttagaagttttgttatttggcaagctgcttttcttttgatttaaattgcaaaagataatagtattactttccgaaaatgtggaacaaataaagtgaaaatgactgttgaatacatttttttctagcgttattttgattgccaaaacaaactataatgattctatttttttattttccattgtatctggaagaataatcacaacggagcacagcacaacaaccacaaactgagccttttgtatttctatgtgtattaacatatcaatgaatacttgattcatgtttttactacaatattttgggacttgctattttccttgctgattcccaggcatccagcaaaccagtagggctagaactaagtaacctaattatctggacaatgggctggcaaatcattgtttttttcctttcaataattttctacatgcatacctgataaatatataactctgaaacagtgctggtca

SEQ ID NO: 98795 - DNA, 441 bp, Oryza sativa
  Clone ID: PAT_MRT4530_9666C.1
ggtgctcctggttaaaatgcttttttaacatgctaatgtaatatatttgctcctattattcagacaagatcgatggaaaaaatagaaaaataatcagctccatcgtaagcaaagtgcataacgattcagcaataataataataataataataataataataataataataataataataataataataataataataataataataataataataataataataataataataataataataataataataataataataataataataataataataataataataataataataataataataataataataataataataataataataataataataataataatattgttatccattgtcgtctatggataacctagaaaaatttggtgttgagaacaagtagcatctaaaggcgcataatcgatgaattttatat

SEQ ID NO: 98796 - DNA, 893 bp, Oryza sativa
  Clone ID: PAT_MRT4530_96670C.1
tttttttttttttttttttggacagtacagttgaatagctgatgcatcatgatcctactctgtttttttttttttttatccaacttccaaagctttactctcacatgtacagtacagtgccatcgattacagcctagttgcatcacgcaaatccacactacaatagcattgttgtatttgtacatgccatgacttataaacgacggaacaaaatactaaagatactagagttcttgttcaggcacgaccacggcatgttaaatgtacaggacaagttgaatagctgatgcaccactatccaactcacaaagctaaaactgtgtcactactctcagatgctattttagactaccaggtatgccccattgtaaggtaaggttcactgacacgggtaacagtaccacatcactctacatcaacactgttttgcacagcattcaggcaactcgttttatggaacaagcgccaacggaccactattcttcttcgtcgtagcggtagcggctggcattgtcatcttcatagtggttggcgttgtcctcctcagggttgttcacgcgctcgcattcgtcgatccattcgctgtatatgtcgatgggttcagtcagagcattaacagatgtgctaaaagtttccaaacaaattctgcatgaggcctcgccgattaagttctttagatcaatgcgacactcaacactacttccgtggttgcaaaatggacagcaaaagacagtatcaagcttgtccattctcttcttgggaggtggttttgctttggacttcctcttgcccatgattcaacgcttatttttcccgcctcggcgagcggcggagacggagacggagacggaggcaaaacggacgacgaaaccgcacagcagcccacgcgtccg

SEQ ID NO: 98797 - DNA, 177 bp, Oryza sativa
  Clone ID: PAT_MRT4530_96671C.1
atggatgaagcccttggtgggatcgacgtttctggcagatacacctgtgggcatagattgaaggaggatttgatcaaagcggagtcggaggcggagatcgagttcagaagcagagcaggaatcggctggaatccagatcgactacgtttaggatcggctggatctgagtcgggctaa

SEQ ID NO: 98798 - DNA, 649 bp, Oryza sativa
  unsure (1)..(649): unsure at all n locations
  Clone ID: PAT_MRT4530_96672C.1
cgagcnggttgaagcaaccaagtgaggacagaaaacttgtttttatccccaactaacaatggctgacgacgaaccccaacaaatggacgctgaggttgagcaggaagctcccgcccccgttgaggaggaggtcccccttgaccccaccnccgccctgaaggctgtgcnccgcattccctcttccacgacggtctggcccgtggtctccacgaggccgtgaaggctctcgatcgccgccaggctcacttgtgcgtgctctcctcttcttgcgatgagcccgtgtacgtgaagctgatcactgccctntgcaacgagcaccaaatccccatgatcaaggtcgaggactccaagatcctcggcgagtgggntggcctgtgccgctacaacgccgacggcaaccccgtgaaggttgttggctgntcttgcgtcgtgatccgaagctggggtgaggagaccgctgcccgccagtacatccttcagcatctcaagggccngtaagcgctcgagaacccncaaacagaactagaacccccccttntgtatgctcttcctntagnccctngacctcngtaaatgttggttggngataaaaaaaaaaaaaaaaaaaaaaaaaaaaaaaaaaaaaaaaaaaaaaaaaaaaaaaaaaaaa

SEQ ID NO: 98799 - DNA, 840 bp, Oryza sativa
  Clone ID: PAT_MRT4530_96673C.1
atgggctctgatgggcatgtttcgttggctaaattgagtggatgtgcatgtgagccgttggattggtcttggaccgaggatcctaatccccaccaacagaattatgctgacatccacgcacccgtcggctactatgtgtttggattcggatatcgcgacatggatggtaccaaggtgcacaaggcatggaggtccaattatgctgaccaaggctatggcgagggcgatgtcctcgggttctacattcatcttcctgatggagagctgtatgagcccaagcagcctttcctggttcactacaaggggcttcctttccgcgctgaagctcccaaggcggctgagcagaagacgccggatccagttcctgtggccggcccagagctcggcgggccgaggcaggagaggcagcgcacgggctcggggcggagcgagctcaagacgtggttctccagactacttcacgccggggcagcggggtcggcggcggcattagcagcggcggggaacgggttgtcatcgaggaggctaaggagctcgtcggccgtggagatgaggagggagcgggagcggcggcgggcgcgggagcagcagccacggtgcggggaggtggcaggtgggacagcggcggagtgcgtcgcggttttctgctgcttcccctttgctgtcgtcgagctcatcgtcctcgcggtcgtccgcatccccgccgcgctctgccgccgcgccgtgcagcggaaacggcgcgggcatgcagcggccgtgcgagggccgcgacggggcgaggcgcgttcgacggcgaactcgagcaggcacacggttgttgatgtaaaacacgaggcctga

SEQ ID NO: 98800 - DNA, 449 bp, Oryza sativa
  Clone ID: PAT_MRT4530_96674C.1
gtcgtacaacatgtcactagtcacagtatgattgtttttctactactagtagtacattattattgtgatgatgataacctcatgaaccttcaccggcaaaagaagatggtgagatgcgatggtgatgtatttctgtaccgaaaactcgcatctgaccgacaataccagttgtttgccacctgaggaactgatgaaaactctctctcaacgacaattctattcgccagaaagtagcagttaggggattttttttttagtttgttgctgggttcaattcgtttgggcatacgttgtacctcgcattttcaagaaaacaatgataattactgattactgggtaacatttttaacatgcatatcttacatcttggcaatgaatgaatgcataatagtcagattcaccttttatgcatagagggaaaaatagtattcagcgcacataagcagta

SEQ ID NO: 98801 - DNA, 1894 bp, Oryza sativa
  Clone ID: PAT_MRT4530_96675C.1
cttttgtgtgggcggagatatcactactactactcctctttcccactcctctcgcttccttcctcctcctcccctgcttcgccgccgcgtgctcctccgccgccgccggagaagctccaagcctcctcctcctccgggccgccgggaatggcggggaagcaaggagatgggcgcgaggaggatggcgctaaggtcggcctcccggcgctggatatctcgctcgcgtttccgcaggccacgccggcatccatcttcccgccatcagcatcggactattatcagattgatgatttactcaccactgaagagcagtctatcaggaagaatgtcagggctataatggagaaagaaattgcacccattatggcaacgtactgggagaaagcagagttcccatttcatgccattcctaaactttcaagcctcggtgtagctggaggcacaataaagggatatgggtgcccaggactttcaataacagcaagtgctattactatggcagaaattgcacgggtagatgcaagctgctccacgttcattctagtacactcctcccttgcaatggtcacaatagctctttgtggatctgaggttcagaagcagaagtacttgccatcccttgctcaacttactgctgttggttgctgggcattgacagaaccaaatcatggaagcgatgcaagctctttgataactacagcaaccaaggtacctggtgggtggcacatagatggacaaaaacgctggattggtaacagtacttttgctgatgtgctcgtggtattagctaggaatgccaatacaaaacaactaaatggatttattgtgaggaagggtgctcctggcttgaaagctacaaagattgagaacaaaattggtctcagaatggttcagaacggtgatatagtttttaataaagtatttgtccctgaggaagatcgactgccaggtgtcaattcatttcaggatataagcaaggtccttgctatttcacgtgtcatggtggcatggcaaccgattggtatatcaatgggggtgtttgatgtctgccatcggtatctgaaagaaaggaaacagtttggagttcctctagtagcttttcagctgaaccaagaaaaacttgtgcgaatgcttggtaacatccaagcgatgcttcttgttggctggcgactatgcaagctttatgagtcagggaaaatgacaccagggcatgctagtttagggaagggttggacttccagaatggctcgtgaggtggtttctctcggtcgagaattgttgggtggaaatggaattttggctgattttctagttgcaaaggcattctgtgacctggagcctatatactcatacgaaggcacatacgacatcaacagcctggtgactggtagagaaataactgggatcgcaagcttcaaacctgccgcattagcaaaagctcggttataaccatcattttccgaagaggataaagctacagctcactgcaatttcttctcagattgctactacaggaagcaaataaaaatcaggtccccatgcaccgattattggccggctaatgcagcatgatgcagaccaaatagactccttggaaaattctctggtcaatcttggctggctagaaggctgtgccgtgcgagaggatatctaacgtatccgaatcacctcgttggaatcgtgtccggtggtggaggacagcatgaataaaagctccgtcctgtatgccaagtcttggcatttaactgttgtatacatttgtgaacgctgtaaaatctgaataaaggtcaagaacagtagtgtcgaattttacctctttcaaacctacactgcctgttcttgttttggtttgtttcaagcatgggtccagagaataaaaaaaaaaaaaaaaaaa

SEQ ID NO: 98802 - DNA, 493 bp, Oryza sativa
  unsure (1)..(493): unsure at all n locations
  Clone ID: PAT_MRT4530_96676C.1
ctatcgatcctaccatncatactgcatagccaaactgcagtcatatcaccgaacctatccagaaataccaaacaagacaggtccaggacgaccgattttcgtgtttgtgcgttgaagcagtggattatggttatgatgtagcagctgctgcggctctatgtgctgatcgaaccngtgcacattgggttcagatgatgagctgataattaatgagataggctcctggtttcgctggtaagattcgtcgtgatcatgagccaacatctgacggcagcgctgatggttgcgccagcaaagaaattaagcaacccaagatctgtaatttgtcgctctcttggaagtatgcctgtatgagatgtgtttcccttgctagtttaattggtgcgaccccttccttttgcaacaaactgattaaggttctgttttggagcacccaaacatgcggtcaatagaaatttcacacgaatttcagtaaaaaaaaaaaaaaaaaaaa

SEQ ID NO: 98803 - DNA, 189 bp, Oryza sativa
  Clone ID: PAT_MRT4530_96677C.1
ttggtttttttaattgggggggttttattttttaatgctttattaactacctgcataattaacactacaacagtacaataaatggttgcaccttaagcatgccacgatgcgtctgctgcggagcgagccaccaatcccattctcagtttctattacaggggcgaaaaacactggttaccagatgctagc

SEQ ID NO: 98804 - DNA, 171 bp, Oryza sativa
  Clone ID: PAT_MRT4530_96678C.1
atggacaggcggcggaagcggatgtcgatgcgcatcaagcaaaggcaagtggatgagaacgaggaggttgcaggcgaagtcctggttgggcgctcggcgccgacggcgtctactccctcaccgaggagcaacatgcagccccacagaaagtttgacaaagttgacggctga

SEQ ID NO: 98805 - DNA, 189 bp, Oryza sativa
  Clone ID: PAT_MRT4530_96679C.1
atggctgtggagcggccagtgcagcccacgctcgtgacggagcacgacaccatgaggttcacgcaggtggacgtcacacttaaggctggcagtggcgtgtgtggacctccgccagcactgccgcctccaatgcgccctccaagggaccttcgtactgaagttcctgagaagttcctgaagaaagtctga

SEQ ID NO: 98806 - DNA, 176 bp, Oryza sativa
  unsure (1)..(176): unsure at all n locations
  Clone ID: PAT_MRT4530_9667C.1
ggtcgagaaaagcagtgacccgatcggagatcaaggtgcagaaggggnccttttcgggtttccccccttccccaaaaanccaatttctcccagtncggcgagaagcggcgaccgcctaacccgcgcctccaaggtgctggagcagctcagcgggcagaccccggtgttctccaagg

SEQ ID NO: 98807 - DNA, 1064 bp, Oryza sativa
  Clone ID: PAT_MRT4530_96680C.1
ccgactctctccccctcatccgccatgcccatggcctgctcctcccttgtcgccctcccccagggcggcaagggggccgcctgcaaaattccaggccccccgctgcccatttgcaggcggccccccggccgctacaaaattgccctagcggagggcggcaagggggcgcccctgcaaatttcctggacggccgtcgcctcctccccggacgccgccgcaggccgcactcacgccgccaccagaacgaccgctgccggagccaactccctccccacctctctctctctcttcctccaccatccccttccccgagctcgaccccagatccggcggcatctccaccggccaacacctgcagcgccgccacacgggcgacgtgcaacgaccccgccgccgccatgcaagccggtgtcccagtcgggtcccccacaacgcagccatccatctggcagcagcccccatcggcgcgccgtccttccgcacgcgccgtcctcccgtcgccagcgacgccggccataacgaccctggccatccgggagtcggatccggccgtggggacgccggatccgggcggggcgccgccggagccgccgccgccttgccgtgccgctcccagccgccgggccgccgccgctgcccagccgcatcgcgccgtcgggccaccgtcgccgcccccagccgcgcaccaccgccgggccgcgctgccgcgccagatccggccatgggggtgccggatccgccgccaccccacaccgccccgccgcctccacttctcccggcgccacgtccaaccccggtggtgccatccgtggcgtcggccgtcgccgccgacgcggtggagtatgctagcctgccatgcccagccatgaccttctaccctcccttctccacgttgtttgggaaccagaagatggagttcctcctccttggaggcaatcacaacaacgcggtggtcgccgtcgaccagacttgccgcaccgtcctctatgaccccggcgagcacgccgtccgcaccatgcccgcacttccctaccagtcaggttgcttaccacttccgtcaccgt

SEQ ID NO: 98808 - DNA, 785 bp, Oryza sativa
  Clone ID: PAT_MRT4530_96681C.1
atgcggctaggggcggcggcggcgacccggcggctgggagcggcacctggcaaggcagcggcggctccggcggtgccccgcccggatccggcgtccccgcagccagatccgactcccggatggccagggtcgttatgggccggcgtccccggcgcacgggaggacggcgcgtgcggaaggacggcgcatgtgcgacgggaggacgccggcgtcgaggtcgatgcgtgcggcgccgtgcagcaggccgacgcggcagtggctggcgccggcaatgcttgccgccggacctcgtggatgaccgccggtgggggctgctgccagatggatggctgcgttgtgggggacccgactgggacgccggcttgcatggcggcagcggggtcgttgcgtgtcgcctgtgtggcggcgctgcaggtgttggccggtggagatgccgccggatctggggtcgagctcggattcagccgcacagcactgccatcacgaccggcgatgacgaggggacgccatgtgggtgccttctcatctccttggagctcctccccttcttgaccgcctggtcgtggggagctcctttgcgagacagtgaaggcggtggcaaggttgccccagcggtggtttggtcgtgctcgttccaacgtgtagctgtgggggtcgcgctggcagcaggtgctaggcgaaagccggcccaattcttgggcggcaacggcgacgtctttgggcgttgcaaccctcttgagggcgttgttgaggtgcctccctccccctcttcaaggatcctctag

SEQ ID NO: 98809 - DNA, 204 bp, Oryza sativa
  Clone ID: PAT_MRT4530_96682C.1
atggaggccgggaagaagtccttccctctggacacgtggcatgggcctaggggcggagtgggggtaggtatgccccgtcccatcggcacgctgccaggtggagtgggggcaggtatgccccgtcccatcggcacgctgccaggcggaggtacgctcttgatcatcgcgccttatcccccggccgaactcacgacgtcccgctag

SEQ ID NO: 98810 - DNA, 889 bp, Oryza sativa
  unsure (1)..(889): unsure at all n locations
  Clone ID: PAT_MRT4530_96683C.1
cccgctccccgcacgctggcgaaccggcgaaaccggcacaggccgcccgcggcaccagggcggtgggaccccctggacaggcgtggcgcgcggcccccgctacggccccgcgcgccgccccccgccccccgccgccccgccccacctgcccccctccgcgacgcggcgcgccccggcccggggcggggggccgcccgcccccccccgcgccccccgcctccgcccgcgcgccgggcccccctgggcccccggccggccgccccttggccgcgcgcgccgccggggcggggcccgcccctgcgcgcccnggcgcgcgcttccgcccgcccgccggccccccgcccccccgccgcgccggccccgcgggcggccccgggggcgggcggnggcggnggngggggtcccctcccctctcctccccctcctcacttcccatccgggccggcgagccagccgccgcccaccgccaccgcgccgagagggccgccgccggcgagccggccacccgaactcaccggacagagagagccggcgagcctgccgcgggcaccaccaccaccaccacccgccggccgtctccgacgactactgataggaaggagatcctggatagcctcctggaccccaccgactccccccttggctgccttctccccctccccccccgcatccgatgcgttctcccatgcccctccctcctttacggctcactgttgataatccactaccttctgcctcctcgtttcgctccctcttcatttcctctatcgcacattgtctcatcttcgtttcccgtcgccaactgctttctcgctttcttacgccatatttattcttctccctcttgcgcctccttatctcctcccccgtttgcgcgcgggcggtgggg

SEQ ID NO: 98811 - DNA, 282 bp, Oryza sativa
  Clone ID: PAT_MRT4530_96684C.1
atggcttggggagttcgcggcggccgacgacgtgctctggcgcgggcccgggtgcgtgcaacaattctaggtggagtgcacggagcagtgtccgccacgtggccggtaccggaatggacggccgagatctcatctcccacaagccctaaccctaacgaagtactagcagtattaacaagcggcgagcgctcgagctgggtgcgcgagcggttggcggcgacggccggcggccggcggcgaggtcgagcgaggaggcgggccggcgaggcgcgcggtactttg

SEQ ID NO: 98812 - DNA, 183 bp, Oryza sativa
  Clone ID: PAT_MRT4530_96685C.1
tcctcagattactagttactatatagagtacgactccacatatactatacattcgtatatgtacgtacttaggaggtgtacttcttgtacgtacacagcagttgtaagtactgctacatttgttacccgtacgttcgaggtattttcctcaccgtaggcgtttgagtcaaaaaaaaaaaaaaa

SEQ ID NO: 98813 - DNA, 1295 bp, Oryza sativa
  Clone ID: PAT_MRT4530_96686C.1
ttcagatttgatgagagattcaaccaagaagctaaaattttttgcgactgatgtgcattgctgaaccagttttctgttgcataaagagtcctgaaacttcttgttgcaaactgaagtggtgttctaaccagttttcttcttgctttctcattagcttctcttgaatctttctgtaggtttctttcctgtagggaaaggaaaggtgatttcagttgcctgactgttgctggaatctgtgaagcatctacaagcgatgccatcggttcaggcagctggcacagcaatgccggttccccttgccccatatccaactcctgtgccatttacacctcccaatggtatggattccaacttggcactgcaagaacacagctacattttgagttttttttccctgatgttggttggtcacctagaaatgttggtacatgccatagtgttcgccctgatgcattcttttggactagaaatcttatgaactgaacttcaatagacagctttttcttgaatcagatgttactgttcctggttcagaggttgcagtttattctgctcatagaaatcctgaaagtttagagagaactccttgttgagaaaatggaagtttttttactgctgagtttcgttgtctgaaatgaaaatgatgcatggaagatgcttttgttgtctgaaaatgaaaatgttagctgctgaaatgcgacattcagtcagtctctgaatttcaggggcccaaagccagctcgtttgctctgggtgccgtaatctgctcatgtatccagccggagcaacgtcgatttgctgcgcagtcttgccggtatgcacatcattcactcagagcagaaatctagctgcaatgttcacgaaaataaagagagattaaaggggaatacaaatggcttcagggctccgcaacagtgcgcgtgtcgcgttgatggtgtgcctgcactcaggtcgctcgagaagaagtacacactgaagttgctctggtcatatttacattattgtgtgtaactcttccttgtttgcttttcagtctaggatagagatttacatgtcaaagagtcaagtgcacttttgaaagtgtaatgcgatgcaagtaaaaacaattttggacaagatcaaaaggatccatgtcatttgctgtcagaatagtaatgtttgttacttaatgaggtttgttacaaaccttaattacaggaatatcattgtagtagttcttaactttttacactcctatttgtagatgtacatatatttatgtacaattatcagatggactattttatacactaaaa

SEQ ID NO: 98814 - DNA, 453 bp, Oryza sativa
  Clone ID: PAT_MRT4530_96687C.1
atggggaagctcggagaagctcatgttcttctgccggatgcttggctggacaataaagaggccgtcatcgaagatgcagtcggagaagcggatgttgttgtggaagatgaagttgtggagctcgtcgagctggtagattgccggaatcatgtcctactttcttgggatattggtgtcgtagaagaagacgttataggcggtgacattattgccggcgtcatctttcagaatggggtttacctattcaatggtggtgacggagaggagcgaaatctgatcgccggtgatgaggttgaggagggcgcgccctcggcggccgtcggcgaggccgggggtttcagggtgggagtagaagccgtcgcggaggagagcgcgcgcggtggtgagccaggtggcgcgaacggtgccacaacgaagcaggagcacatacctgaaccaagtgagaaagcgtag

SEQ ID NO: 98815 - DNA, 162 bp, Oryza sativa
  Clone ID: PAT_MRT4530_96688C.1
tcgagacctaccctctgccagatacgggtgcccggcatgcggcagcgggacggggaggcagcggcgtgcggcggcggccacagcgtgtcaacgtagttctctggactcactggccccaacacgctctcaagctttaccctgaacctaagctaccttgatgaa

SEQ ID NO: 98816 - DNA, 234 bp, Oryza sativa
  unsure (1)..(234): unsure at all n locations
  Clone ID: PAT_MRT4530_96689C.1
ccgcatagcccttcgccccaagttaaacacctcgctctctctctctctctctctgcccgtacactcggcgcatcgcctcctcaggcggcaacagcggcggcggcggcgatggactgccagcacggccggggagggagagagagagagcgagatgctcgnnacaagtgcgtcgtctaccggaacggcggcgtcgcccgcgcgcgtgcctcccgcagcgnccgcccctccctcccg

SEQ ID NO: 98817 - DNA, 261 bp, Oryza sativa
  Clone ID: PAT_MRT4530_9668C.1
tttgggtttttttttttttttttttttttttttttttttttgttttttttagggcgaacgcgggggtggcccctgggtttcccccccggttcctgcccggggcccgccggcgcccccggtgtgcctatttagagcttggcttaatcgggggggggggttattcctgtgtgaaaccggtgtgcaattgcaattcccccccactttcgcaccgcatgcataccgggggcatcctggggggacccctgggggggacctaactga

SEQ ID NO: 98818 - DNA, 1359 bp, Oryza sativa
  Clone ID: PAT_MRT4530_96690C.1
atggcgggcgacggcggcaacggcgccgccgatggaggtggggagcacttggaactcgacttcttcccgtcgccgctcctggacaacttcgacgtgttagaactgctcgatctctccgtccttggagacgtcgacgacgacggcgctccgccggcgccagcgccggtgcagatgagcgtggacggagccggcggcggccggattaataagcctggttcctccgtcgacgatcttgtggactggtcgaccgcgtttggtaataactgctctaaaatcgacggcgagtacggtggcgcgtcgacgtcgtcgtccgccgctccggcgctggcgccgccgcaggaggactattgcagtggttgccaagtgctaagagaagtagtgcattccaatgggttggagatcacgaagctttgcattcatggcggcgtcgctagtggtgagttctaccatgcaatactggacgtgtaccgtgtcagcgcctcggccccggctccggcgctggcacatcactccatcatcaatttcagagggcggggctacgactgggtgaagcagtacctgacggagtacgcactccggcgagccggcggcggcttcgccgtcgtgcaggactcgctgtcggcgttccacgacgccctctgcaccaccatggcgccttgcagcagccatgtcggcgacgacgacgcacatagaagagcatcgtcatcagcagcagcagcagcagaagaaagaactaatggcaatggtgatcatggtcaactcgtcgtccacaatgctgccgtcctgccaatgctagaatcatcacgttgccttgtggcagcagatcaagcagcaacaactaacaacaatggcagtggtgatcgtcgactcgtcgtcctagacactactgctatccagccgccagcatcaggttgcattctgcacatggccttcccaagcaagtcataccagtcatcacgtccaacaacgcttccatctcgctaccaggagtgcacttgcaatccagttgcctatgaaatggatggagtacgtagttcacttgctcccatttgctggccggagttgctaggctataacgtaacaaacagggagaaaactaagcagcttcagcttagcgacattgccccctactttgaactacccatcgccaaggctgctaaaaagctggatatatgtgccactgctctcaaaggcatctgtcgtaaacatggcgtattacgctggccatatcgaaaggtgagaagcatcgataggcaaattgcgactctacggagatctggtaatggagatgcaacaaggaacgagattgaaacattgattgcttcgaggagaaggatagttgctggtcttgatcaataa

SEQ ID NO: 98819 - DNA, 252 bp, Oryza sativa
  Clone ID: PAT_MRT4530_96691C.1
ggcctgtttggcacagctccagctccagctccacccctcctggagctggagctcagccaaacagtttcagctccaccagaactaggagtggagacaataccttacatcaaaaacttgccaaaggagattacattggacaaagaaagtggcaaggggttggctgtggcgaggcccgcgggttggacggggaggaatgagcgcgacggcgacggcggtggtgcccatctgtccgaggacgagcgtatgcggtga

SEQ ID NO: 98820 - DNA, 774 bp, Oryza sativa
  Clone ID: PAT_MRT4530_96692C.1
atgggtggtcgaaagaagccgggttccaagaagatgccaacccctgctgtgatgcgcatccgctctccacctccagacccgcacaggagggcgcgagctgcgccccgaaggtgcatccctccattggcttcggattccgagtcgtctgcttcttctccgacgacttctccagccgccgccgcggctgctctgcctggcatcgctcaagcccggcacgagttcttcgccaagcacacggtgtaccactacggagcgcctccgactgctcaacgaaacgagcagcgggagagcgcgggaggatgccagagcgtgcgcggcggagttcgccgccaaccagctgacggccttgccgctgcggcggggcgaggacatctccgcggcttcctcctcgcgccgtcaagaatcggtggcggagcgcgcggggcggtggatgctcctggactcatcggcgatcggtttctcgactccggccacggcagcttggccggtaccggaatggacgcaccagccggcggggaacgcattggagtacggcccatggaatcctccgacgatgacagcaccttctgctccaggtgcgcccgagctcagcggggagccgccagcgccaccgccctcgtcacgaccgctgtcgccgccgccacctccgccaggtgtcattccaccaccgccgggcgtgatcccggcgccgccacctgcgtggtggacggagcaccaccaccacccggcggcgtctatgccaccacgaggaccataggtgagatttcctggtga

SEQ ID NO: 98821 - DNA, 362 bp, Oryza sativa
  Clone ID: PAT_MRT4530_96693C.1
tttttgttttcagttaataatgttatttttttttgtggcacacgaggggccacggaaagaaataccaacagcccgtaagccccgatgtaaccaacaacaaatggacaccgttagatctacctgaccgaccacaaaagcacggagagcaaacgggatcaacaatgtaaactcgcatggggtcatcggagccggatttaaaaaataaaggttcaaccttccccaaatgattcaagggggctgtacctagaatgccattgcctcaacaggggaaggacatgactttgacgcctcatactgattcgggcagaaaggatgctcttgtcacaaccgtgaatcacgtatgtcaaagctcacagggcagg

SEQ ID NO: 98822 - DNA, 350 bp, Oryza sativa
  unsure (1)..(350): unsure at all n locations
  Clone ID: PAT_MRT4530_96694C.1
catacacgtatgccagtagtgtgtcacaggaaacgagcgaagagagagacgagcatggataacactgcatggccaccagcagcaccgccgcggcgacctctgtggttgcgcgcgccgggctcgccaggccagttggtctggcgagatgagggcgaggaggatcaagagggtgaggtgcaactactccaaggaggccgggacaccggcggcggccgtcaagggagccggcgcgtagctactggcgatggcggcgacggcggcgcccgcgatggcgctcgtcgacgagaggatgtcgacggagggcaccggncttagnctcgggctgagcaacaaccatgtggggtggatcc

SEQ ID NO: 98823 - DNA, 312 bp, Oryza sativa
  Clone ID: PAT_MRT4530_96695C.1
atgcggcgacgctggaacaggcctcccatcccgacagccaacgcctcgctcttcttcacctacaacgaggccacgcacccgctcacgccgccggcctcctctcgacggcacgtccgggcgctggtggcggccgcggcgcgcgccccgacggggagggtgcgtgcggcggaggccaagctggatcgcgcatgctgccgcaacgcggagctagaggagaaggtccgccagatgagggcggaggggcaggcgtggatgggcgttgccaagagccacgaggccgttgccaccggcctccacgccacactcgactag

SEQ ID NO: 98824 - DNA, 353 bp, Oryza sativa
  Clone ID: PAT_MRT4530_96696C.1
atggggacttgaagaaaaagaattgcattaaaaaaagaggatgatttgggtagaagtttttattgagaaagaggcatacagaatgggacaaatacagaatgtagaaaaccaaaccaaaccaaacacgatagccttgcttacagactcggtttttacaggtagataatccaagccaagcattgagttaaagagcttcagggattgttgcttaaagacacttgaacaggatgaggatgaatagatgcccattccaggagggatcagcatcgcaggacgggggaaagaaggcctttggtttaaatccaaggcggaaaggaaggcacgagaagaagggtcacacatggttttttatt

SEQ ID NO: 98825 - DNA, 249 bp, Oryza sativa
  Clone ID: PAT_MRT4530_96697C.1
tcgtattctcctcacctgacctcacacgccgcgtgggtgacattgacagccgggccccaccacagaccgcgacggccatggaccacgatcccaaggagcggctcctcctgacgtcccgcgccgaggaggtggtggcggacaatggggcccaccgtcgcgccgcgcccgatgtgggcggtggtgggggcggcgtggacattgacaggcacgggctgaagaggcgcggtggggggccgcagtcgtgggggc

SEQ ID NO: 98826 - DNA, 689 bp, Oryza sativa
  unsure (1)..(689): unsure at all n locations
  Clone ID: PAT_MRT4530_96698C.1
tntttttttttttttnaactctatttttcgtcttcttttctttttttcaaagaagttcgccgttggactttaaacttttaattaaatcgagccatacaagtacaggagctatcccaactagtagttgtatacaccactatgatgaggctactggcaatggaacatggaccacaggaacaagtaaaaggtcatggagccgtcgggcactaaccaccatctcctccgtcatgtctagatccgcagtatccatcccatctggcaattgccagttgaaatggtataggaggcttgcgagcataagctctacatttgccagaccaaatgcgatgccagggcacattcttcgtcctgccccgaatggtgtgtactcaaagtttgtccccttgaaatcaatgttgctatcctcaaacctctcagggataaattcctcgggttcatcccaatactgagggtccctgctaatcgcccacgcgttcacaagcaccattgctcctttgggcacatcgaatcctaagacttggcaggtgtttctacactcccgtggcagtagtagaggcacaggaggatgcagccgcaacgcctccttgatgacaaggtgcatgtagttcaagttgcttattgcatcttcagttactctgtcacgaacggcaagtgtctgtcgtacctcatcttgtaccttgtgcatcact

SEQ ID NO: 98827 - DNA, 133 bp, Oryza sativa
  Clone ID: PAT_MRT4530_96699C.1
gttctccacacgcggagtggaggagggattaatcgtgagtatattaatcggcggccttgacgatcggcggcgctgttctctagtgttttagttagtgtcaatctaatttccgtttgatttgttttgtttatat

SEQ ID NO: 98828 - DNA, 772 bp, Oryza sativa
  unsure (1)..(772): unsure at all n locations
  Clone ID: PAT_MRT4530_9669C.1
gacgtggaactaaacacatacagcctaagttacaattccatcatctagcaagaaagaattcaaaatggcttcaacctaagcttaaaaaaaacgcattctggaggctctgaacaatatactttagcaggatattgagttactcaatccagtaacttgcatttgttttttggttcagatctatggtacaatcagcacagcatgttaaggtcgattaacatgaaccactacaagtcatcatggtcatggcaaaaacaaaattctgtttccttttagacagattaaaacatggaaccagattttcctttccccatcagcatgtcctttgcctcatttatcttcgaagcgatgtaatggctcccaccagcatcagggggattggctaccattaccctcttgtgtgagcctccttgatcttatcgaatgcagcacgttctcttacgccaaggatcagtgccgcctctcttcttggtcatttctctctcgaatccacccagggtagaaccgccgcactcgtggcattgctgcacgggtccggaaggcttgccatgcctggagcatatatctgcttcccattgcagcagcagctactgacaacccagctaccaagggagtagccatatcgacaccgaccggggacaactgtantcgcgggcggaggggggaggattccggcgagacggaaacggtgggagcgaggcaggcgacgcgggcgagccggagtggaagagagcggcggtagataaactattcgcgttctcggcgcaagaaagaa

SEQ ID NO: 98829 - DNA, 1064 bp, Oryza sativa
  unsure (1)..(1064): unsure at all n locations
  Clone ID: PAT_MRT4530_966C.1
aattacatctcctacaccaattttttttcctgtatgttattccgcacgggctggctccaaccgtagggttactttgtccgttgcaggttgagctcctgcttcagcttgcctcatgccagcatgcgcatggtgcggtctgctgctcatgtgttctcttctttccaacatttatcctactcgttgctccttaaggtacgtactgtggcagcgtgatgcccgtgactcagcacttaggcagtgaaggggatggagcgcaggtgcagtacgaggcgacgctggcgtactcgggtgcagtcgcggggggcacgcgcgcggaactagctggccggacatcgtcatggtcttcggtctcctacgtgcttcgacctggggttcgtccacccacaccacgctgcccatgcttgccttctatgggagcggcgagcgccatgcctaccttgccccctgcagaccttcttcgccacagccgcacggccacacctaccaccgcacactcgtggcctctatatatcgctccannttcgctgacaacatcgatctgcatctcatgtatgagtggatgtgtgccatgctgccatagcaccaaggaggtttctgcgaccgcatttgaggatttaaatgaagcacattctagaaggccagaacaaggtaaggtgggtgagttgggtcacgtcccaggatcggaggaccagggacgcgaagcgtgagtggcagggcgccgacgtcgaggtctccaacagtacggtattgctccaatgagcagttgggaccttgggagctggggttattgccgcgaggatggtgcttctctttgtgttgactgttgacaacgactagccatcggatttggattctggaggtagtctttagcattttcaaattttccgattgtacctaagtatctctatgtaattgggagtgtgccaacgtcatatacagttgagcactaaacctaactttacacttatatactttttgttcaattgttatatggcattgtatacaaatgtttaattaggatatatatatatatggcatttagtagtgaaaaaaaaaaaaaaaaa

SEQ ID NO: 98830 - DNA, 1488 bp, Oryza sativa
  Clone ID: PAT_MRT4530_96700C.1
atgttcagccttctgatccagtccgtcgacttcaccgacgacgcggccgcggccgcggccaccgccgtcgccgccggcgaaaccagcggcacctctcaccccctctccccgcgctccggcgaccctctccccatcaccacctccgcctccgtaacggcgcctctcgagctgcccggcgcgacctccgcctcgcccgcccgaaaccctaagatcaactacacccgcggcatcctacacctctaccgctcctcctcctcctcgtcgaccgcctcctacgcttccgccgtcgccgctactccatcctcctcctcctccggacccgccgccccgcagctcgcctccgactgcctactcccgccatggcgcggcacacggctcctggtgctcgccgtcccaacccacgtctcaccagacgacttcgtccgcttctgcggcccttacatcgagcacgcctccgatatccatgtcgtcagggatgatggggtggaggaccggtatagcgtgctcgtggagtttgaggatcagaagagtgccgatgggttctacttggacctcaacggttggaggttctcgtcatccgaggtagaggtttgccatgttctgtttatagttgctgtccaatatacaccatcaaccaagcctgcggtgactccaccagttggatccactgagctcccaacatgtcctgtctgtattggtggggaccaggtttgccagttttgtcagaagcagtctaagaatcctacatgttctgtttgtcaaacctccggaaacctatggatctgtataatatgtggttttgttggatgtgggaggtatgaagaaggccatgcaattaggcactggaaagaaactcagcactgctattcacttgatttggaaactcaacgtgtttgggattatgttggtgacagttacgtccaccgacttaatcactccaaaagtgatgtgaagcattccaagttcaagtcaaagtgtaaatattctggtgacaaatgtgcaaactgctcctgcaatgatgaggaagatatcggtggtgctattttcagcagcaaagcagaaacatattatgaggctcggctgtcagaagctaagaaagaaaaggaacaacacatttctgatgcagtggataaagctgtaaatgataagagtaaagaaatccaacaaaagattgagaatgcaatgttggagaaaaagaaacttgcagatatgaatgaaaaactcacgaagaaccaggatatatggcgtcgaacactaaaagaaatagaggaaagggagagggctcaactgaagttgaaagatgatacaattcgtgatctagaagaacagataaaagatttcaaattttccatcaagttacagaaatcaatcgagaagaataaaaatgctgatgatctcaaaggaggtttgctggtgccactcccaatggtgccagattctggaaccaaaggtaaaagatcgtcaagaacaagcaagaggaggaactag

SEQ ID NO: 98831 - DNA, 1823 bp, Oryza sativa
  Clone ID: PAT_MRT4530_96701C.1
atgttcagccttctgatccagtccgtcgacttcaccgacgacgcggccgcggccgcggccaccgccgtcgccgccggcgaaaccagcggcacctctcaccccctctccccgcgctccggcgaccctctccccaccaccacctccgcctccgtaacggcgcctctcgagctgcccggcgcgacctccgcctcgcccgcccgaaaccctaagatcaactacacccgcggcatcctacacctctaccgctcctcctcctcctcctcgtcgaccgcctcctacgcttccgccgtcgccgccactccatcctcctcctcctccggacccgccgccccgcagctcgcctccgactgcctactcccgccatggcgcggcacacggctcctggtgctcgccgtcccaacccacgtctcaccagacgacttcgtccgcttctgcggcccttacatcgagcacgcctccgatatccatgtcgtcagggatgatggggtggaggaccggtatagcgtgctcgtggagtttgaggatcagaagagtgccgatgggttctacttggacctcaacggttggaggttctcgtcatccgaggtagaggtttgccatgttctgtttatagttgctgtccaatatacaccatcaaccaagcctgcggtgactccaccagttggatccactgagctcccaacatgtcctgtctgtattggtggggatcaggtttgccagttttgtcagaagcagtctaagaatcctacatgttctgtttgtcaaacctctggaaacctatggatctgtataatatgtggttttgttggatgtgggaggtatgaagaaggccatgcaattaggcactggaaagaaactcagcactgctattcacttgatttggaaactcaacgtgtttgggattatgttggtgacagttacgtccaccgacttaatcactccaaaagtgatgtgaagcattccaagttcaagtcaaagtgtaaatattctggtgacaaatgtgcaaactgctcctgcaatgatgaggaagatatcggtggtgctattttcagcagcaaagcagaaacaattgtggatgaatacaaccgtcttcttgctagccaacttgaaactcagagagagtattatgaggctcggctgtcagaagctaagaaagaaaaggaacaacacatttctgatgcagtggataaagctgtaaatgataagagtaaagaaatccaacaaaagattgagaatgcaatgttggagaaaaagaaacttgcagatatgaatgaaaaactcacgaagaaccaggatatatggcgtcgaacactaaaagaaattgaggaaagggagagggctcaactgaagttgaaagatgatacaattcgtgatctagaagaacagataaaagatttcaaattttccatcaagttacagaaatcgatcgagaagaataaaaatgctgatgatctcaaaggaggtttgctggtgccactcccaatggtgccagattctggaaccaaaggtaaaagatcgtcaagaacaagcaagaggaggaaccagtagctgcatctgttgtacatgtaacaagcaattgcttggctaatccctgccaaccaagataatatgatacattctgaaaaaaagagatagtgcaatattattctactacagatagctgccttttatggaatagaaatttgaaccaaaggatagcatagtttacaattttacattacatacaggggtagatgtctcagaaagctattgtctgtattattgctcatacagtactacttttctgggttggactacattttgatatacctgcagcccgggga

SEQ ID NO: 98832 - DNA, 234 bp, Oryza sativa
  Clone ID: PAT_MRT4530_96702C.1
atggtgagagatggggaaaaggggaggcaaccgttggtgggctcctgggcctcaccaccgacggggagaccgtcgccgccgatgcccccgtggccacgaggccggctgctactgccgaaaaatgaaggacgacatgacaacaagtttcatgccgcaacgagcttcttcttcattcaccactacagcaacactttggactgcgagaatagacctccaaaggcaatgcctccataa

SEQ ID NO: 98833 - DNA, 1536 bp, Oryza sativa
  Clone ID: PAT_MRT4530_96703C.1
atgaagttaagaatggatcctctagagtatttacctgttagatttcactttggtggggatttcattaacaatgggagggaaaccttttatattggtggatctgaggggatgtcctacatcaaacgtgataaggtctctctgcctgagatagttggacatttgaaagatcattgtgaagtgatccctggcatgcttctgcaatggttgtttcctggcaaagaacttgcagatgggctgagggttttgattgatgatgaggtctacaattatatgtcaaactgtgttggggaaggtggtgttgctgatatttatgtggagacagtaatggcagaggggtccagtgagtctggcagcaaggaggatagtgactttgaagatgaactgcaggacatatctcctgcagatgatgaatgggatgatgaggaagatgaggatttgtttgagttgaatatagggaaggaagttcttgtcatagtgtctacaccagagaagacaaagagagatctggaacaagtgcgagcatttcgtacacctgataaagaaaaagcaatggtagtagctgaacctagtgataaggggaaggcagtggtagtaggtaaagagaggccgaagaaacctgtgatttctgactctgacagtgattatgttggtggagactcatgttcatcagaagaagatgaagaggttcagcaaatcaggaaggcttacaaagagttcaagaagaaactgaaggatggtgaggtagggaatttggatgatgttatatgtgaggggtcatctaggcagacaaatagtagagctttggttcagattgagggtgatgacagtgctagcccatatgacaatagcagtgcagatgatgattcctatgaagaggatagtgatggacagctgaaagaattcaaagaggcagtggtgcagcttgcactggacagcaagaggttcataaggtttataaaggatgaaggttacagaacaagggccaagtgtgatttggcaacttgcccgtgggcttgtttgctatcaaagaatagcaggacagaaagctggcaaatagctagtctagttgatgaacacacctgcccaccaaggaaggataaccacctagtgacatacaagaggattgctcagaagtatgagaagatgatcacagataatccaacttggagtatacagagcatgcagtccactgtttcagaggaaatgtttgcaaatgttagtgttgggcagtgcaagagagccaaagcatttgtattcaggaagatatatgagtccaccaggggtgaatactttagaatctttgactatcagttagagttgctgaggagtaatcctgggagtacagttgttgtcaagttagatactgaccagcctagtcctatattcaaaaggatatatatttgcctggctgcttgcaaacagggattcctagcaggctgtacgaaagttgttcagccagatgctccaccaactataactagtgctcttatttctttgtatttccatttcactgttctattttgcactgcaatatag

SEQ ID NO: 98834 - DNA, 196 bp, Oryza sativa
  Clone ID: PAT_MRT4530_96704C.1
cgtccggggttttcagtggctatttgaggatcatgatttgcagatggagtgcaggtgcagattggaggtcaatccccttttggctgtgtaggccctatgcgacagtcaattcgagtctgttacacatggtgtgtgagtattttggtggtgagtgtcttcgtcttctgttgtgcagtattcccaatatttgttaagc

SEQ ID NO: 98835 - DNA, 1119 bp, Oryza sativa
  Clone ID: PAT_MRT4530_96705C.1
atgctcgaaggcgatctcgtcggcgactccggtgaggatgggcggcgcactccacgccggcgagtgagctgcgcccaaggcaacgagggtggcacgctcaaaggcgacgaggagggatctctgcggcacggtcgtggcggccacgctctccacatcggccagcaccagctgcttgtcgaggaggatgaagcaaaaggattgattgtgtactgccattactatgttgtttttaggttaagaatggatcctctagagtatttacctgttagatttcactttggtggggatttcattaacaatgggagggaaaccttttatattggtggatctgaggggatgtcctacatcaaacgtgataaggtctctctgcctgagatagttggacatttgaaagatcattgtgaagtgatccctggcatgcttctgcaatggttgtttcctggcaaagaacttgcagatgggctgagggttttgattgatgatgaggtctacaattatatgtcaaactgtgttggggaaggtggtgttgctgatatttatgtggagacagtaatggcagaggggtccagtgagtctggcagcaaggaggatagtgactttgaagatgaactgcaggacatatctcctgcagatgatgaatgggatgatgaggaagatgaggatttgtttgagttgaatatagggaaggaagttcttgtcatagtgtctacaccagagaagacaaagagagatctggaacaagtgcgagcatttcgtacacctgataaagaaaaagcaatggtagtagctgaacctagtgataaggggaaggcagtggtagtaggtaaagagaggccgaagaaacctgtgatttctgactctgacagtgattatgttggtggagactcatgttcatcagaagaagatgaagaggttcagcaaatcaggaaggcttacaaagagttcaagaagaaactgaaggatggtgagattgagggtgatgacagtgctagcccatatgacaatagcagtgcagatgatgattcctatgaagaggatagtgatggacagctgaagcttgtcccaactgtacctgttcttcaaggcttcattcctgctgtcctggagatgagcctttag

SEQ ID NO: 98836 - DNA, 2679 bp, Oryza sativa
  Clone ID: PAT_MRT4530_96706C.1
atgtcctacatcgaacgtgataaggtctctctgcctgagatagttggacatttgaaagatcattgtgaagtgatccctggcatgcttctgcaatggttgtttcctggcaaagaacttgcagatgggttgagggttttgattgatgatgatgtctgcaattatatgtcaaactatgttggggaaggtggtgttgctgatatttatgtagagatagtaatggcagaggggtccagtgagtttggcagcaaggaggatagtgactttgaagatgaactgcaggacatatctcctgcagatgatgaatgggatgatgaggaagatgaggatttgtttgagttgaatacagggaaggaagttcttgtcatagtgtctacaccagagaagacaaagagagatctggaacaagtgcgagcatttcgtacacctgataaaggaaaagcaatggtagtagctgaacctagtgataaggggaaggcagtggtagttggtaaagagaggccgaagaaacctgtgatttctgactctgacagtgattatgttggtggagactcatgttcattagaagaagatgaagaggttcagcagatcaggaaggcttacaaagagttcaagaagaaactgaaggatggtgaggtagggaatttggatgatgttatatgtgaggggtcatctaggcagacaaatagtagagctttggttcagattgagggtgatgacagtgctagcccatatgacaacagcagtgcagatgatgattcctatgaagaggatagtgatggacagctggtcagaaagaagtccaaataccccagatttaatgtgaataggccaattgctaggcttgcactaggaatgaaatttgatggcaagaaagaattcaaagaggcagtggtgcagcttgcactggacagcaagaggttcataaggtttataaaggatgaaggttacagaacaagggccaagtgtgattgggcaacttgcccatgggcttgtttgctatcaaagaatagcaggacagaaagctggcaaatagctagtctagttgatgaacacacccgcccaccaaggaaagataaccacctagtgacatacaagaggattgctcagaagtatgagaagatgatcacagataatccaacttggagtatacagagcatgcagtccactgtttcagaggaaatgtttgcaaatgttagtgttgggcagtgcaagagagccaaagcatttgtattcaggaagatatatgagtccaccaggggtgaatactctagaatctttgactatcagttagagttgctgaggagtaatcctgggagtacagttgttgtcaagttagatactgaccagcctagtcctatattcaaaaggatatatatttgcctggctgcttccaaacagggattcctagcaggctgtaggaaagttgttgggttggatggttttttctttaaaggatcaacctatggggagctcttatgtgccatagatcagcagaaggggatactaaatgctgtagaaaattgggcaccaaatgctgaacacaggaactgtgcaagacatatttatgccaattggaagaagaagttcagcaaaaaggagtggcaaaagaagttctggaggtgtgccaaggcaccaaatgtgatgctgttcaacttagccaaggcaaagctagcacaagaaactgtggaaggtgcaagagctataatgaacactgatccaaagcactggagtagggcatggttcaggtttggctctaactgtgactttgtagataataacatttgtgagactttcaacaaatggatagttcaagctagattcctacccattattagcatgctagaagctattagaaggaaagtaatggttagaatccaggcccaaaggacagtgatggataaatgggttggatcagtttgtcctaacattcttaagaaactgaatgcttacatcatagattctagttcttgtcatgcaatctgcaatgggatggacaagtttgaagtgaagcatcaaactcataggttcacagttgatcttgaaaaaaagacatgttcatgcagatactgggagttaagtggtctcccttgctgccatgctatagcctgcatacattttaggaccaactgtttagacagatacatcgcaccatgctactcaatctattcattcaagaagacatatagctactgcctggaaccagttgaggggatggagagctggcccaaatctgataggcctagcccacaggcacctagttatgtcaaaatgccaggaaggccttccaaaaaggataggagaagagagccacatgagaagccaaaggcaactagagtctcaacggttggaactgttatgacatgcaggttgtgtaaaaaacctggacataacaaggcttcttgtcttaagagatctcaaacacagcccaatgtgcagatggcaagtgcatctacatctacaagggcaagggcttcacccaggactatggaaaagacaagaacttcacccaggaatgtggcaaagacaagaactttacctaggaatgtggcaaagacaaggactgtggcacagacaaggacatcacctagggcatctgcaaagagaacatcagctacagctggaatggttgcagtggagcaatccaggaagaagttgaaagttagaaggtcctctggatag

SEQ ID NO: 98837 - DNA, 538 bp, Oryza sativa
  unsure (1)..(538): unsure at all n locations
  Clone ID: PAT_MRT4530_96707C.1
gggggggnaaaatttaaaaaggnaanaggtnnggcccgggnaaccccaggttggaaataaccntcannnaaagggaanaaaaaggggggttccncccggggnggggccngtttnangaaannagngaatcccccgggctngcaggaatttnggcaaaggaggnggntgcaaagtggggaacnaagttgtttcttgnaccgattgnaagtggggcaagngaagttnggnagcaaccgaaaanttcccnccgggggggtnaccnaccttaattagtncacaataaaaaccacccanangngngtggtttgtgngtgngctgattantgcngaattaaacccgngngttntngnttaattaagcangtggttgttttggggaanangggngtntnaaagtatgaatttgtgngangngangaacccnngctnttttnagngnaattantnnaaaaaaaaaaaaaaaaaaaaaaaaaaaaaaaaaaaaaaaaaaaaaaaaaaaaaaaaaaaaaaaaaaaaaaaaaaaaaaaaaaaaaaaaaa

SEQ ID NO: 98838 - DNA, 215 bp, Oryza sativa
  Clone ID: PAT_MRT4530_96708C.1
tctacaggccctcctccacgtccaactcggggtagaaaccaaaggaaacccaaaacatgccttcccgagcaaggaaaccttgagacccgacgaaacacagtcggactcgaacctgccggtcagaccggccacacaccgccggtctgaccggctctcaaccggcggtctgaccggccaagacacggcggtcagaccggcccactcggaggaaaccg

SEQ ID NO: 98839 - DNA, 500 bp, Oryza sativa
  Clone ID: PAT_MRT4530_96709C.1
tgcccaaatccaccaaccgtcctccggtctgtcctgttcttcgctcgatcctccaatttcctctcccaaatcatctcgagtagtaatcagtgtattttgttgcttatttcgatcgatctcatcccaacctgttcgatcgtcgcctccgccgagttttgctgctcgatcggatcggtcaaagcagcacaccggcccggcaagccatggagctgacgctgctggtgttcgtcctcgtcgcggccttctccttcgtgatcggcacggccgtcaccacggcgccggcgccgccatggccagcggcggccttcgccgcctacctcttctgggtcgtcgcctccgccgccgtcgccctgttcgtccgccgccccgccgcgtgaacacacacaccctcaccaactccggccggccaaactcaactcggatcgagatccagtcagtgattctaacccttcacttcctacctactgctccgtccaaaaaaaaagataaaaaactttaat

SEQ ID NO: 98840 - DNA, 962 bp, Oryza sativa
  Clone ID: PAT_MRT4530_9670C.1
ggggcgaattcttacatattcacttctgcaagcagctagctttacaaataatctcaagcacatttgagaatgagataatctaaacaatggctacgttacaagtagaatccaaaaatcttaataagggtcaagcttgactatctgttgaaatctgcaaagcttctatactactccatctagctgttgagagagagagccttcaggctcgggcaatcttcgacgcacggcgtggatggcatgatgcacccagggcacgacatcacgccgctctcccatggcgcggcggcgaggccggtgaggtcgtcgcggcagatcgggcaggtggtccccttgaacagccacctggtgatgcacggcgggtggaacgcgtgcccgcacggcaggttcgccggcggcgtcttgcacctctcgctggccgtcaggccgtccaggcagatcccgcaggtgtcgccggcgcgcgtctccagccagaccagcccgcggacgagcgacacgggctcgctgaacaccagctccaccgccaccttcacgcgcgcggcgaagcggtagtggccgccggcgaggccgtcgtcgtggttccgcctcaccgcgcggtggatccacgcggcggcgtcgtcgtcgggcatgggcgtcgcccagttgctgcgggagaggtcgacgcagcggagctcccgcatcccggtgaacacggcccacgccatccgccgcgtctcctcgtagtcgaggaagacgtcgccgccggcgccgtccagcacgtgcttgcgctccgtctccagcgtgaacttgatgccgtcgtggcgcacgggctcgcctccgccgccgagccgccgcgaccagcaccgcaccttgacgtcgcagacgaagcgcacgtacgaggggccctcctccagcggcgccgtcccgtggtggccctccagctgcttgctgctgctccgtaagcgtattatcgtttccatcgccat

SEQ ID NO: 98841 - DNA, 261 bp, Oryza sativa
  Clone ID: PAT_MRT4530_96710C.1
ttggttttttttttttttggggtggcccattgtagcaggtttagatggaataatacttaacttggaaacggctccaatggaaaccttccatggaatttgggggaaaaaaagaaaatggttcacaggtactttccctatagtgacattattattttccaaaaatgatacttttactatgttgtcaaaaatatttcactctgacagtaatttggatgccactaattataatgccttatgcacaacttgttttaaagcattcat

SEQ ID NO: 98842 - DNA, 608 bp, Oryza sativa
  Clone ID: PAT_MRT4530_96711C.1
ctgcaggaatcggcacgaggggatttgcactagaacttggcgcaccccgtgatcctttacgtcgattcacgctcccacgcgctggatgcattgttggctgctcggggatcgttgctccataggtttttctcgggctttttcagatagtaattaagatggtagatggggaatgtccttcacccaaagcaatggcccagcatgttctgtgctaccttgaagagaacggatatttgcaagcttagcatatatttgtgaagattgatttgattcctgagtgtcctccactcgtggacactagtgtgatccatttgatccagaataagatgcatcaatttgcaatcaatacatgtggcctatcatcatgggttactcgctcttgtgtagttgtgtactgttctagcatagctgtaatttgttgactccgcatgcacattccggttaaaaatgtgtgagatgtatttattcttagtaatgtataatttgatactggatcccaattatttggaataaattgtgcagtttaagctctcaaaaaaaaaaaaaaaaaactcgagactagttctcaactcccatcctttatcattaccctccacctggggggggggggg

SEQ ID NO: 98843 - DNA, 321 bp, Oryza sativa
  Clone ID: PAT_MRT4530_96712C.1
tctagaagttcgccgacgaggtgttcaaggggaagcacgacagccccggcatcctgtccatggcgaacgccgggcccaacactaacgggtcccagttcttcatctgcaccgtgccctgcagctggctggacgggaagcacgtcgtgttcggccgcgtcgtcgagggcatggacgtcgtcaaggccatcgagaaggtgggatcccgcggcgggagcaccgtctagccgtgttgtcatcgtcgactgccgccagctttcttagacctgtgtctgtttccccctcattattccccattctattttcgccctttagtccttctcc

SEQ ID NO: 98844 - DNA, 2502 bp, Oryza sativa
  Clone ID: PAT_MRT4530_96713C.1
ttaccccctgcttctgcttgcgttcgcgcacgcatggatcccacaaccaccacgacagattccgagtgcgacttcatcaagaagatccctagttggatgataaggaattcgccaatgcattgtatggaggccggccactttggcaaggatgccgccgccgccgccgccgccgccaccgcggacgccatggaacatgcactcccctgcagcgatcttcaccacctgagagtgggcaagacggcagagcagagctgctcggtgtgcctcaagaatttcgaggagggcgactacatctggtcgatgccctgctcccacactttccatcagctctgcatcttgggcgaccgctcctgcagggtctgtcacccggctgctcccccatccacggaggagaaaccggaggcccctcggactgttaattgattgaatgaattctcgcggaatcagtgcttgtttaactgctactctctgaataatctgaattttttgtctccagttttcctgggaatcccttatggaatatttctttttgtctccagttatctgtgaatccctctcaaccttctcaagcttctgttttgcttgagagagtatgtcatccgcattacttgttgtagacataatggtaagattttctatggaagccccatgttctagcaccgcggaagcaatagcaatttcagtttcgcctccaccatagtcaaacaacttgagaacttgtagatgtgactttaggcaagctatgtctttcaatgcagatgaccaatcatcagaatgaacgtcacattcctcctcaaagtataccttatcttctctccaaaggacaagttctttcagttctgtacaagatctgaagaaattcaacaatgcatgtctgccctttctctctttgaaagcaatactcagctcaagttttctaagacttgtaataggcacatggcccacatctaagtaaacattgtcgatgcttctagtctgacttgacaagttgaaccatacttctcgaagcataggagctccaagaatacttatccatgtggaagacgatgtccgacttgagaaagatttcattccctgtgctgctccaataatgaccttctcaagttttggtgcccattgaattgtaatgtgactaacactggaccgccaaatttggaggaacttaaggctctctgatcggattcgctcctttccctcactgaacatgccaatgtcaagctccctaaggctgacacattggcaaactagagcaaacaaattctcgtcgcttattctgcagcatgccaaatctatgacagcaagacttgaaacatgatcgaggtacatatcagggatgttgaaaaagcagagatgcagagtcctaaggcttgagcaattaagactttgaagtgggaactcaatagggtgggatggccattgacagtttgccatcaccactgtctccacatttttctttcttagaacatcacaccactcctcaatcttctgttgagcaccattgttgatgacagatgaatcaattctgaaataactaacagggccaggatgagagaggagaatcgatgttattttacctgacaagtcgattctttcattgggcatgccaccttgatctttcattgcacgaacaaggtccagatcatgaaagatgagaggttttcccagccatagttcattccaaggactagagacaactgatccatgtagagtgagctctttgccaacctcaaacgcgatcatcccgtcgcttccatccacgctgctgggaagttgctgaactgagctcgaaccggctccctgatcctccacgcatgcatccccatgggcttgaaccgaagcagcgacatagccatcaccggcgcggttcccctcctcgagcctgcggccgcggccatcctcacgcgcatcgcggcggaggcggacgctacgtccctgatcacgcccggcgccgatgcgtagttggtgggttggtgcggcgtccttgcgctggccaacgcagcgcgcgtccccaaatccatagccgcgggcatcctcatcatgcgcgctgccaccgctggggccttgatcaagtccaccgaggccgcatgcttggcctcgcgcggcatgcctcccctgatcgctgccctcgaactcgaacccacagctatggccaccttcctcgcgcgcgacgcgcttacttccactgatccctgttgctacggatggtgcggcgcccatggcatgcctgcggccgctgctgctgctgctgcttccgaccccaaaatcgaatgcatgttcgcggcggttgtccgcgacgccgctgctggtgccttgctgttgctgcgtcgcctgcgcttggccgcctccaccgctggcgctgggctcgcgattctctcccaaaacttggagtccatggctgccgaagcggtagtacatggttgaactcggagccctcggaagggagccgagggcagcttgtatagaagcgcgctccccggggtgggcggtggcgaaggccgccat

SEQ ID NO: 98845 - DNA, 1285 bp, Oryza sativa
  Clone ID: PAT_MRT4530_96714C.1
gaccccacagcaaacgcacaaaccaaaggcggaagctaagcaagcaagcagcagcagccgcagccatggaggcggagaaggagatgtcgatgagggagtggtgcgtcgcgctccccaaggtggagctccacgcccacctcaatggctccgtccgcgactccaccctcctagaacttgcaaagcaactaggtgataaaggagacattgtattcgaagatgttaaggatgtaatcatgaagaatggaagatctctccctgagtgtttccgactttttgaactgtatcatatacttacaactgatcatgatacagtgactaggatcaccaaggaggttgtggaagattttgccatggagaatgtagtatatctggaaataagaacaacacctaagaataatgaagccaaagggatgaccaagaggtcttacatgaatgctgttattaaaggtcttaaaactgttgaagctgttgaagtcgtgttattcgattctaactcaagagcagataaaactcctatgagtgagctgggtggcgacacaaggaaaaagaagatatatgttaggcttcttctgagcattgaccgccgtgaaactactttggctgcattggatactgttaatttagcaatggagatgaaggatcaaggtgtcattggcattgatctttctggcaatccagttgtgggggagtgggagacatacttgcctgccctggaacatgctaaagagcttggaatccccattacaattcactgtggcgaggtagcaaacaggaatgagatccgagcagtgctggacttctgcccacagaggctgggtcatgtctgctgcctcaacgacgaggaatggaagaagttgaagtcgttaatgattccagtcgagatatgcttgacttccaatgttatgaccggtggtgcgccttcactggagcttcatcacttcgccgatctgtacaacgcgaagcaccctctgtccctgtgcaccgatgattccggcctcttttcaacgagcctctcaaatgagtactacctcgttgcatctaccttcggtctcagcaaggctgagctgtttcaactagctcaggacgcggtggagttcgtgttcgccggcgacgagttgaagaggtctctgagagagttgttcgagcgcgtcgggaaggagctgacgacgtagggtaatccaagatgcgttcctgtcgatcggcgtcggaacaaataaatgtatttattatccatgtggtctcgattgtgattttagattttccatcgtttctgcgtttatgttcc

SEQ ID NO: 98846 - DNA, 590 bp, Oryza sativa
  Clone ID: PAT_MRT4530_96715C.1
gccccagcggtggcagcgcgcatgatgagaatgcccgcggctatggatttggggacgcgcgctgcgttggccagcgcaaggacgccgcaccaacccaccaactacgcatcggcgccgggcgtgatcagggacgtagcgtccgcctccgccgcgatgcgcgtgaggatggccgcggccgcaggctcgaggaggggaaccgcgccggtgatggctatgtcgctgcttcggttcaagcccatggggatgcatgcgtggaggatcagggagccggttcgagctcagttcagcaacttcccagcagcgtggatgaaagcgacgggatgatcgcgtttgaggttggcaaagagctcactctacatggatcagttgtctctagtccttggaatgaactatggctgggaaaacctctcatctttcatgatctggaccttgttcgtgcaatgaaagatcaaggtggcatgcccaatgaaagaatcgacttgtcagggaatgaaatctttctcaagtcggacatcgtcttccacatggataagtattcttggagctcctatgcttcgagaagtatggttcaacttgtcaagtcagactag

SEQ ID NO: 98847 - DNA, 570 bp, Oryza sativa
  Clone ID: PAT_MRT4530_96716C.1
ccggccactttggcaaggatgccgccgccgccgccgccgccgccaccgcggacgccatggaacatgcactcccctgcagcgatcttcaccacctgagagtgggcaagacggcagagcagagctgctcggtgtgcctcaagaatttcgaggagggcgactacatctggtcgatgccctgctcccacactttccatcagctctgcatcttgggcgaccgctcctgcagggtctgtcacccggctgctcccccatccacggaggagaaaccggaggcccctcggactgttaattgattgaatgaattctcgcggaatcagtgcttgtttaactgatcaatgtcgtggcgtgcaacaaatctgcatttctctgaaaattgcaacaaacctgctactctctgaataatctgaattttttgtctccagttttcctgggaatcccttatggaatatttctttttgtctccagttatctgtgaatcccttatggaaatttgtaaccggatgtttaaattcacatagttatatatatttacttctgctttcacaaaaaaaaaaaaaaaaacccgcggcc

SEQ ID NO: 98848 - DNA, 747 bp, Oryza sativa
  unsure (1)..(747): unsure at all n locations
  Clone ID: PAT_MRT4530_96717C.1
cggcgctcttaaaaatgacagtaagtatgnctgccntgcaacnnnagaggaccccagatggcagcaaatgaactggctgaatttaagaaacagttgtattagttgaaagaattttggaatataccttccaaaacttccttgtggggttcttgggtgatttttggggggaggaaagacattacaatgaggatgtgccttgactacagagctctcaatgaagacaccataaaaaacaagtaccctcttacccggatcgatgatctgttctatcagcttaaacgtgccactgtattctccaagattgatcttcgttccggatattaccaattacgtattcctgaataagatattgctaagaccgcattcaccacgccataccgactgtataaattcactgtgatgtgattccttttaaccaatgctcctgccttcttcatgaacttaatgaacaaagcgttcatggaatacttgtataagatgttgtggttatcattgatgacattctgctgtactcacaatcagaggaagaccatgagcaccatcttcgtttgatgttgtgaaagtatctgaaacatcaattgtatgctaaacttagctagtgtgaatactagttgtgcgaagtcaaattcttaatgcacgtgatatttgctaaaggagttgctgttgaccccaaaacagtgacccgcgtcaatgattggaaacaacccaatataatcacttaaattcgcagatttttaggcttggcag

SEQ ID NO: 98849 - DNA, 435 bp, Oryza sativa
  Clone ID: PAT_MRT4530_96718C.1
gccgccgccaccttcgtagccgtcggatccgatgcgggaagcagctgccgccaccaccacgcacgtagccgtcgtcaccgtcggatccaccgcgggaagccgccggtggatcgggccgcgggaaagaccggcgccgttgatgccgccggatctactaacaggaagccgccacactaagaggcgccgccaagaggagaggagagggggagagggagtagcggagagggtgcgacagaggaggagcggcgccactggtcgggagaggggaagggagggggagaggcgccgctaggaggggaggggaggagagtggcggagagggggcggcggaggaggagtggcgccgccggtcgagagaggggaggggagggggagaggcgccaccggtcggggaggggccgagcggaaggtagagctcgcggtcgggtcaaggtg

SEQ ID NO: 98850 - DNA, 827 bp, Oryza sativa
  Clone ID: PAT_MRT4530_96719C.1
ctaccgccgtgccgtcgcgcgtcgctcgacgccatcccgtcgcgccgtcccatcgcgctgtcccatcgcgtcgcgcgccgtcccgtcgccactgccgagccgtcgccactgccgagccgtcgccgtcgtcgcctcgcgccccgtgccgcgccgctcccccgagccccgtgctgccgctgctaccgcgccgcgctgcccgttccatcgccgcgcgccgtaggcgttcggccaacgcgtcgccgttgccgcgctatcgccatcgcgcgtcgcatcacctgccgcgccgcgccccccaagccccgtgccgccgctgctgccgcgccgctgccgctcctcgcgccccgcgccccacgccaccacgccgccgcctccacgccgccgcgccgccgcctccacgccgccgcgccgccgcctccacgccgccgcgccgtcgcatagagccgccgcgccgccgccacgaagccgccgcgccgcgccgcaccttgcgccgacgtcgccaccgtcgccgtcgccgccgtcgccgccaccgcagtcggtaagccgccgcctcctccacttgctcggccgccgtcgccgcccataacgactcaatggcgggaagctatccttgggatcacaatggatggtggacagaaccgtcattgtttaatatgaacactgaggtcggagatgaagcttcggaggatccctacgcttactaccaggagggtgatgaagacgatggcgctcagtatctaatcacctgtgacgggttgagaatgcaacccgtcacagctctgacgggttgcattctcgaccgtaaacgggttgcattcacaagtgagtag

SEQ ID NO: 98851 - DNA, 981 bp, Oryza sativa
  Clone ID: PAT_MRT4530_9671C.1
ccgcgggggcccggcccgaggcccgcccgcgccgcggccccccccgcggcgccgccgccgcgtcggccacgcccgcgcccgagcccgcgccggccgcctccagacgagggttttctggtcatggcgactcccgtgaaccaggatagcatcactccggtgaacacgtgggaggaggatgaactggagctggaagaagaggagggtttgttatgcaagcgcaaaagggctaagttttcagattccactgtccgacagcaacaggggattgaagctgcagccatggatatggtgatggaggaggctgctgctctttcactcggagtttccgctagcaattgcaaggagcctgtgcatgtggccactggtcgtgtcgagcagagcaattgtggagcaaagcatgaaccagcaaggttgagactgcataaaatctgctctgcaactcactggaaggaaccatcatatgactttgaagaacaagggccttcccatcttaaactgttcacttgcaaggtgactatccatgtggatacattcacaaccaccattgtggagtgcatcagtgaacctaatcgttccaagaaagctgcccaggaacatgctgctcaaggtgcattgtggtacctcaagatctttggacacgccaattaatctcagacgctccaggtagtaacttaaacgacttccaggtagcacagtgctaacccagtgttccttttccactcgcgtgtatttcatccactacatggggcagtgttctttcttaatccaaggttcgatcagttgctccatgtacatatccgaaattcttgctctacgtaggtgtcatctatctagtccaggagagttctatgttatgtcgtacatggccacatggggtcccttgtatgtatatactgctactacgtatttaccacttgggccgagccacgaaaggcctttctactatgctctatacaatcagttaactctttagtaaatttc

SEQ ID NO: 98852 - DNA, 170 bp, Oryza sativa
  unsure (1)..(170): unsure at all n locations
  Clone ID: PAT_MRT4530_96720C.1
gcggggacactcatgcanccgtgaagaattaccttgatcggattctctacgctgtggctgatgcgatctatacaaaagctcgtggattctggtggtggttttagtttgtcccaagcaatgcaagttgctcgcaatatgtctggtatcgagcgtgcgtgtcaggttttcac

SEQ ID NO: 98853 - DNA, 233 bp, Oryza sativa
  Clone ID: PAT_MRT4530_96721C.1
gggaatgggagcacattatggtgaagttgaggtttgggaggaaagcggatggcatgagggggaggatggaggagatgaggttggggaggaatggaagcggcgtgagggggaggcggcgcggtgtgggatgggggacgctgtagctacaggactcaggaagcaagattatgctaggagagctgcagcgctgtggctgtgcagccacagcccagctgaaccgaacagacccaatg

SEQ ID NO: 98854 - DNA, 180 bp, Oryza sativa
  Clone ID: PAT_MRT4530_96722C.1
cttattattattagcccaccaccatgttgtgctttgtgcaatccaagcagtggtctggtcaactcctgttgctgctaggagttcagctagaggaggcgcacatgaacatctacgtatatagattatagagtactaatttgtgcatgaattagagatgcagatctgcaatttccaattcaa

SEQ ID NO: 98855 - DNA, 903 bp, Oryza sativa
  Clone ID: PAT_MRT4530_96723C.1
atgaagggaattgattcgtatggatttaagggaggaaaggagctagggttcacgggagagagagaggaggccgtgcgggaggaggacgatgaccgagggtgggacccacgtggtctggcgcagtcagcacatatgtctgtgctggcgatatatgaggtcaggcttcctgagcttagcccgtcagcattcccgaagttggccgtcttcgcatggatgtgccgaacgtgtggtttcgatcctaccaccgaattgttcgccatcttgtttacggcgtgcgccacaaccaaagacgtgaacatgccagccgggccgaggaagacagttttcggctgcgtcaacttcatgcttcggccggagcgttcggacgcctggccggtgcctgcgtctatggtgaagtgggagtggaactggatgcagaagtggttttacatcaacaatccttaccccgccgaggatgacaaggcgaactggctccgtttttggcgtcttgcggtctccattgtcgtgaagccgaaagtggagatcgatggcaccctcgagtcccggctcatcctccttcgcaaggttctgcggcgattaagtacccacaacctttgcgaggagttttgccttcttcggatttccccccttgcttgcgactggggggtttccatcaacaagggcgaggtggtgcttgggcttcctcgccttgttctccccgccgggaccgaacttcgtactactgcagaattcgcccgcctgcttcagcgccaggctgacggtcaggtgaaccgggttcatggcggcgaattggccaaccgatcgatcccttccaaggctggcgacgacgacgttgggatgtcgaggaagcacaagcgagccgtcgcgaagagcggccaggtgcgaactcgtcgtgctgcgtag

SEQ ID NO: 98856 - DNA, 1251 bp, Oryza sativa
  Clone ID: PAT_MRT4530_96724C.1
atggcggccggcggccatggaaggtggccgggaaaggcgcagccgttccgagcgattaaaagcacgaatcaagttgccggcgctcgccatctctccttcctcgcttcggattcaccagttgcgggagagggcgaggtcgagggcaacagcccggacactaagaagcaggcgaggcacaggcgtgtggggttggcaaaagtaaagctgaaggagttgatattatccaagggaattgattcgtatggatttaagggaggaaaggagctagggttcacgggagagagagaggaggccgtgcgggaggaggacgatgaccgagggtgggacccacgtggtctggcgcagtcagcacatggcgtgacagccgggtcaaccggcgaaaaccctggcgaagggtggtcgtgctaccttggcaagtcccttgtcaaggagcctgacttggctgagttcgtcctctccggtgctcttgcagagggccaaatgtctgtgctggcgatatatgaggtcaggcttcctgagcttagcccgtcagcattcccgaagttggccgtcttcgcatggatgtgccgaacgtgtggtttcgatcctaccaccgaattgttcgccatcttgtttacggcgtgcgccacaaccaaagacgtgaacatgccagccgggccgaggaagacagttttcggctgcgtcaacttcatgcttcggccggagcgttcggacgcctggccggtgcctgcgtctatggtgaagtgggagtggaactggatgcagaagtggttctacatcaacaatccttaccccgccgaggatgacaaggcgaactggctccgtttttggcgtcttgccgtctccattgtcgtgaagccgaacgtggagatcgatggcaccctcgagtcccggctcatcctccttcgcaaggttctgcggcgattaagtacccacgacctttgcgaggagttttgccttcttcggatttccccccttgcttgcgactggggggtttccatcaacaagggcgaggtggtgcttgggcttcctcgccttgttctccccgccgggaccgaacttcgtactactgccgaattcgcccgcctgcttcagcgccaggctgacggtcaggtgaaccgggttcatggcggcgaattggccaaccgatcgatcccttccaaggctggcgacgacgacgttgggatgtcgaggaagcacaagcgagccgtcgcgaagagcggccaggtgcgaactcgtcgtgctgcgtag

SEQ ID NO: 98857 - DNA, 513 bp, Oryza sativa
  Clone ID: PAT_MRT4530_96725C.1
atgacgatgacgatgaagatgtatcactggattcagcaaccatatgagcataatgatgcctgcctcaccaaggcttgctcgagttcgccgcggactgaggaggagaccgacgctgccagcgaggtggggacgcgcggatcggccgcgggaacgggagagccagcttgctggcgccggcggcagcggagtaggcaaggcgctggtgctagagcccgccagatggaggaggaagaggaggcgaggcggcggccggagctggcaggagtcatcgggagcaaacagctcaccgcggcggtcgggcaccacgccgagcagcttctccatgcagcaccccgcgatggcggcgaaggacccgccgcgcgcgccgccgcggcgacgacgccgccgactacgccgaagcgtgaagccgcgcggatgacgtggttgcgcttgcggctgctgctgctacaccacccacagcttcgtggcagagcccctgaagatggggctctgcgggcaggcacgccgccctaa

SEQ ID NO: 98858 - DNA, 690 bp, Oryza sativa
  Clone ID: PAT_MRT4530_96726C.1
atgccggattcggacaacgagtcaggggggccgagcaacgcgggggagtacgcgtcggcgagggagcaggacaggttcctgccgatcgcgaacgtgagcaggatcatgaagagggcgctcccggcgaacgccaagatcagcaaggacgccaaggagacggtgcaggagtgcgtctcggagttcatctccttcatcaccggcgaggcctccgacaagtgccagcgggagaagcgcaagaccatcaacggcgacgacctcctctgggcgatgaccacgctcggcttcgaggactacatcgacccgctcaagctctacctccacaagttccgcgagctcgagggcgagaaggccatcggcgccgccggcagcggcggcggtggcgccgcctcctccggcggctccggctccggctccggctcgcaccaccaccaggatgcttcccggaacaatggcggatacggcatgtacggcggcggcggcggcatgatcatgatgatgggacagcctatgtacggctcgccgccggcgtcgtcagctgggtacgcgcagccgccgccgccccaccaccaccaccaccagatggtgatgggagggaaaggaaaggtagaagaagtacaaagcaaaggaaaaatccgagactttctacaactacaagcaagcatgcttgagttgatccagggagaaaattaa

SEQ ID NO: 98859 - DNA, 1278 bp, Oryza sativa
  Clone ID: PAT_MRT4530_96727C.1
atgtcccccaacttacaaaaccagtgcaaactaggtccctcggcgggtttgaccctggttttgttcgacgtggcagctgagtcagcatgggacccacgtgggccccacatgtcaggatgccacgccggcttcattggcggcggcaacgttgtcggcgccgccttgcacgactgcgaccggtgcagtgacgcggcaccggcgccagggacgacaagcgggcgcgacgaacggaggagggcgaggttgagggtcttgaagaacgggagagacttcacgtcggtagcgccggcggcgggacccatggcgggcggcgaggtccttggcgagaggcaagtgatgaggtcgcgcgcgtcggcgtcagcggggccgaacgacctcgccatcaccggctcggccatgcggccgaaggggtggcgcggcgtcgagcggcagcaagaatggtgggcggcgcactggatccgtcgccccagcagcccgccgtcgtcgccactgccgcttccgtctcccccgccacccgccatcgtcgaccccgctggatccgtctcccccaccgcccgccgtcgtcgccccagccagatccgtcggcggaggcaccggatgcgtcgccccagccgcccggcgtcgtcggcggcggcggatccgtcgccccagccacccgccatcgttggcggcaccggatccgcgcagtgcggcggcgccacccgaggcggccaagccgcccctgccgtggcggcgttgaggaagagggagggtcgcctcatcgtcgttggtgaggaggggatggcgggctgccgagctgaggccgccaagccggccgccgcccgccgccgccgctgcccgccggcggagggttcgcctctcccgagcttgctggcagcggatccgctttccccgagctcgatcgtagtcatcgtcatcgtcaggaagaaccgcccgaagcgccacgcctgggctcgggaagggcgaagccacgcgttggcgaagccggagtcccatccggcgagcccgcgccatcaagaactcctcctccccaccaccatcgagaactcctcctcaccgccaccgccatgggactcaccgtcgagaactcctcctccccgccgccggtggcccctcaccgtcgcggcatggggatgggagggcatccaccgctgccggtggtacgtcgatcatgcgagaagagggagggaggagaaggaagaaaccggcggccaaatccggcgccgccgccatggggctccgccgcgggggagaggccggaggtggaggcggcgttga

SEQ ID NO: 98860 - DNA, 691 bp, Oryza sativa
  Clone ID: PAT_MRT4530_96728C.1
acatgacatccagggtgaacgtgagccttggtcccatcgacgatcgcgctttcatgactggccttctccccctgcctaatttctttggatgctccggcccccgattccgccgccggcgcggccgatgttgccccggtccgcgctttttagtggggcctcatctccgcacttcccatctcgcacgggcggttcccgcgtgttggccgccctgtgctagcttcgatacttgctcgctgtttcgatcgggtgatgtcctatcagagcactcctcgggtgttgactcgctcggctttgggggcaatttctggatttcctgctcgtcgagtcgcaaccagggcagagggtgtttaaggctaagttctgtggggtgatctcggcggcgtaggatgtcatcgtctccaaggagctccgaggccgccttatccgggcctatgcattcgacagcttataggggggactagaagtacaaagaaggcaagtatatattagagaagcacatgatgctgaaagaaggatagtgattggaaaaccgctgaactaccaagtctgcaaatgcaggcatatgaaaccatgtaaaatatcgctgaatattgggtttcaattctccccaaaattgattatctggcgaggaccatcgtcattaaattgcatttatgaaatataatgtcatgtgaaaaaaaaaaaaaaaaaa

SEQ ID NO: 98861 - DNA, 415 bp, Oryza sativa
  Clone ID: PAT_MRT4530_96729C.1
gaccatttgttcttacaagagctggttttataggaagccagcgctatgctgcagcatggaccggtgataatctgtcaaattgggagcatttgcacatgagtgtaccaatggttcttcagttgggtctcagtggtcaaccattatcaggtcctgatattggtgggtttgctggaaatgccactccaaaacttttcggagagatggatgggtttgggtgctttatttccattttcacgtggtcatactgaaactggaagcattgaccatgagccatggtccttcggtgaagagtgcgaggaagtttgccgtcttgcattacttagacggtatcgtctactgcctcatatctacactttgttttacttttcacatatgaagggtactccagttgccgctccagttttctttgctgatc

SEQ ID NO: 98862 - DNA, 336 bp, Oryza sativa
  Clone ID: PAT_MRT4530_9672C.1
atgcagttgaatgatgccgacctcaaaacgctgagatatgctcaacaagttcaacctgacatccacattcccttctttagagacccccataattacctcatcctgatcattattggatggtctattattgaaacaatccacaaaacaaccaacaatctcagtggcctcaacattgttgtcttcgatagagaaggcagtgatggtatcttgcccaccaagatgaacaaggagaaatggaacccagatgactgccagccaaatgaatatcagtatcaatttgttggttctacggcgtcggaggcctccagtgaagaagagaaagagctgaaggaatag

SEQ ID NO: 98863 - DNA, 477 bp, Oryza sativa
  Clone ID: PAT_MRT4530_96730C.1
caggcgatctattacagagtaaatattttttttaacgactcgcacgaaacaatacccactgacagagcgggtaaaattttcaggactataaccttggaggtgtttaacccgtactaaggaggccattttttttcacccacacactgagggctccaacgcgacacgaccgggagaaggctaacaccggtccggccgtggctgaacaatgactgaacaccgcttgaccgcccaaggaacgcatacgagattatctaaaagaacaccctaacaccttacgcaaagcccactcctagagtgagcttgcaccacgggatcgagaggctggggctatgagatgccaaaacgacgtccttaatatcagaagcgatagggaaccgtcggcaccgaccgttggggttcaaagaagtcaagactgggtttcgcccggcaaccacccttgagggaggagacagcacaaccacgcccttaggagggaaa

SEQ ID NO: 98864 - DNA, 137 bp, Oryza sativa
  Clone ID: PAT_MRT4530_96731C.1
tcgcaccgtcggtactgcgaactctctttatcctaggctacctactagtattgcgaccgcgcgcgttcttgacccgcgcatgcttttttatctggccgcgcgtgcgagttgtgtcttgctcctggcctatcagcatg

SEQ ID NO: 98865 - DNA, 162 bp, Oryza sativa
  unsure (1)..(162): unsure at all n locations
  Clone ID: PAT_MRT4530_96732C.1
ggtgattttatgtagatttatatgacatcaagggtcagcgggcacgcatgatgatgcatnacgttatgtttaacagtttgagaccattatgactatgtgacgaatgtcagtgaccagacgaccaccaacggtagatgtcgtgcgtcggagcatatgtagtag

SEQ ID NO: 98866 - DNA, 1542 bp, Oryza sativa
  Clone ID: PAT_MRT4530_96733C.1
atgcagcagcgaaacaatgccgactcccatcggtgcgcaccgcgcgcccccggctacctccgcaccgccgccgcgctcgccgccgtcgtccagagcctcctcgacgagccccggccccggccgcggcccgggtcccagaccctccacgcgcagctactcgagtccggcctccgccccaccgacgacctctccgtcaagctcctcctcctccacctccgatgcggctcccaccacaacgcgcgcgcggtgttcgacggaatgccggcgccgacccacgccgcgcacaactacctcgccgcggggtactcccgcctgggcctccccgaggaggcgctcgggatcgtgaggcggctggcgaggtgcacggggaggctgaacgtgttcgtgctgtcgatggcgctcaagctgtccgcggcgctggcgctgccccgcgcggtgagggaggtccacgcccgcgtggtgaggtcggtcgtcgagtccgatgacgtcctcttcgcggcgctggtggacgcctacgtgaagaacgcgtcgcttcggtacgcgcggcgggtgttcgacgtaatgccggtgcggaccgtggtgtcctcgacggcgttgatcgtcgggtgtatgaacgaagggctgtacgaggacgctgaagagatattcaacacgatggacgagaaggacgtcgtggtgtacaacgccatggtcgaaggctacagcaagacggaggagacggcagagagctcgatggaggtgttcaagtcgatgcatcgggcgaggttccggccgaccgtgtcgacgttcgtgagcgttctcggcgcgtgctcgctcctgtcctcaccggagatcggcgagcaggtgcactgccaggtgatcaagagcagcctctcctccgacatcaaggccgggagcgcgctgctcgacatgtactccaagtgcggccgtgtcgacgacggccggaggatcttcgaccggatggcggagcggaacgtcatcacatggacctcgatgatcgacgggtacggcaagaacggcctctccgacgaggctctccagctgttcgagcagatgctgcggcggcacgacgacgccatccggccgaaccacgccacgttcctgagcgccctgtcggcgtgcgcgcgcgccgggctgctgtcccggggccaggaggtgttccagagcatggagcgcgagcacgcgctgaggccgcggatggagcactacgcgtgcatggtggacctgctcggcaggttcggcagcgtccgccgcgcccacgacttcatcagggggatgccggcgaggcccagctccgacgtgtgggcggcgctgctcggggcggccacgctgcacggggacgtggagacggccggcctcgccgcgagggaggtgttcgagctcagccgcgccgccgggaggcaaaggcccggcgcctacatggcgatgtcgaacacgctcgcggcggccgggaaatgggacggcgtgcgtcaggtccgggagatgatgcggcggcgaggggtactgaaagacgctgcctgcagctgggttggctccgagtga

SEQ ID NO: 98867 - DNA, 495 bp, Oryza sativa
  unsure (1)..(495): unsure at all n locations
  Clone ID: PAT_MRT4530_96734C.1
atgaagacgaacggtgccaaatgatttgttgaataataagtgcaatgggcgttgaaacatttgaagggatggagggagtagtggacagtgccactgactgagctgccacccgtgtcatctatgagctgtaatgctgaatgagccccattgcatgatgaatgaggttggcttactgatgattgattgaatgatatgagtgcccacctgatgcatgacgtgaccctgcgtgcttgggagtgccgtgctgcagctgggctgacagatgctgatgagcccgctggctgcttgctgctgctgcatgcttttattnttgattaaaatgatgtttgatgagctggactaatgagcttggctgattggtgacctgctgcttgatggcaccctgcggatggtgatgaatgactgctgctgccgtgccccaaatgagttggttgtgttttattaaattttatcctataatactttgtcacttggtaaaaaaaaaaaaaaaaaaaa

SEQ ID NO: 98868 - DNA, 978 bp, Oryza sativa
  Clone ID: PAT_MRT4530_96735C.1
atggagtaccacgtcggcggtgtcatcggacagtcacccaagcccaaggtcgtcttcgtgctcggcgccaccgccaccggcaagtccaagctcgccatctccatcgccgagcggttcggcggcgaggtgatcaactccgacaagatccaggtgcacgacgggttccccatcatcacgaacaaggtcaccgaggaggagcgcgccggcgtcccccaccacctcctcggcgtcctccacccggacgccgacttcaccgccgaggacttccggcgcgaggcggccgccgccgtcgcccgcgtcctcgcggcgggccgcctccccgtcgtggccggcgggtcgaacacctacgtcgaggcgctggtggagggcggcggcggcgcgttccgcgcggcgcacgactgcctcttcctgtggaccgacgtcgcgccgggcctgctgcggtggtacaccgcggcgcgcgtggaccacatggtgcggcgcgggctggtgggcgaggcgcgcgccgggttcgtcgacggcgccggcgccgcggactactacacccgcggcgtgcgccgcgccatcgggatcccggagatgcacgggtacctcctggccgagcgctcgggcggcgaggcggccgacgacggcgagctcgccgccatgctcgacggcgccgtgcgcgagatcaaggccaacacctaccgcctcgccgcgacgcaggtggcgaagatccggcggctgagcgcgctggacgggtgggacgtgcggcgcgtggacgcgacggtggtggtggcgcgcatggcggagggggcgccgcacagggagacgtgggaggcggtggtgtggaagccgtgcgaggagatggtcggccgcttcctcgaggcgtccgccgccgtggatgacgatgacaatgccgccgccggttcgccggcggcgttggcaccgatgacggcggcgtgtcgcctgagggcgcagctggtgcagctgcaatactaa

SEQ ID NO: 98869 - DNA, 396 bp, Oryza sativa
  Clone ID: PAT_MRT4530_96736C.1
tcggccattatttatatgaaaaaaaagaagaagagagaacttggtatgtataccattccggtgctttgctttatttggtatacaacaaaaacaacagctatgtgatggtgggaagtgtctagcactgtagtgggtctttttatctggtttgctcaacaatgtgctgcatggttgtggcaagtccaacaagtggcatgttgtgtgggtgagatccatgggtgatggtgtgagagtggtggcaaggttgttgcaagctatgtgctacctgattccatggtggtgacctggtggggcatatgaccgacatgtccctttatgggataaggtaaacaggcggttagtctgactaagtttgaactggcaggttccctgtgggttaaatgggcttggagtatc

SEQ ID NO: 98870 - DNA, 362 bp, Oryza sativa
  Clone ID: PAT_MRT4530_96737C.1
cattggcaacttatttgctcattttataaaaagggagaatgcgtaaatgacaggctgtctaggctgtttagcgaaagtagacaaaacttcacttttttaaagggaaaatgggacttcactttttttaagggaaaatgcgtaaacaataggttgtctagcgaaagtagacaaaacttaccaaatccaactttatgcctattttacatcacccctgctgggccggggttttgttccgggatttagtaggatgtaaaaggctcccctataaggaaagaaggatcggtttgatgagttttgctcattatcctttaaaccaaatagcttccttccccaccccaaacattttgccttggggagaaaaa

SEQ ID NO: 98871 - DNA, 273 bp, Oryza sativa
  Clone ID: PAT_MRT4530_96738C.1
atggagaggacaaggagacacttggagaaggaattagagtcatcaaggatcatcgaggacgtccaagttaaggtggaggcccaaaccaactcaacttcgagcgcaattcggagtccagtaccagtctgcactaaaatgggcgcccaggtcgcatacgtgctcggattggggagttctttatatggatggaaagctaagaagataacatttccaatggtttggtcccacgtccaaattctttccgcgtcaatgggaatcaaccgaacaagttga

SEQ ID NO: 98872 - DNA, 1935 bp, Oryza sativa
  Clone ID: PAT_MRT4530_96739C.1
gcgaggtgagctggagcgaacggcggcgatggcggcggcgaaggaggcggtggtgccggtggaggggcggaggaacgtgctggtgacgagcgcgctgccgtacgtgaacaacgtgccgcacctggggaacatcatcggctgcgtgctctccgcgagccttcgcgcgctactgccgcctccgggggcaaacgtgctctacgtctgcggcaccgacgagtacggcaccgccaccgagaccaaggccatggaggaaggctgctcccccagggagatctgcgacaagtaccatgccatccacaaggaagtgtacgagtggttcgacatcagcttcgacatcttcggtagaacatcgtcgccgcaacagaccgaggtctgccaagacatcttcctcaagctactggacaacaattggctgtcagagaacacaatgcagcagctttactgcaattcatgccaaaggttcttggctgacaggcttgtggagggctactgccccacagagggatgcaactatgactctgccaggggtgaccaatgcgagaagtgtggaaaattgctgaattcaactgagctggtttgcgggagcacgccttgtgtccgcgacacggatcacttgttcttggagctccctctgctgagggagaaacttgagaagtatatcgacgagacttctttgactggatcatggagccaaaacgctattcatgcaacaaatgcttggttgaaggaagggttgaagcctcgctgcattaccagggatctgaaatggggtgtgcctgtcccacatgagaagtacaaagacaaggtgttctatgtctggtttgatgcaccaatcgggtacatctccattacggcgtgctacacgcctgagtgggagaaatggtggaagaatccagaaaatgttgaattgtatcagttcatgggtaaagacaatgtcccattccatacggtcatgttcccctccacactacttggaactggagaaaattggactctgatgaagacgattagtgtgacagagtatctcaattatgaatcaggaaagttctccaaaacaaagggcattggagtgtttgggaatgatgcaaaatccacaaatattcctcctgaagcatcagatacattgttcacttggacagatttgcaagccaagtgtaacaacgagctgctgaacaatttagggaacttcatcaatcgagtactaagctttatcgcgaaaccagagggaactggatatggttctgttgtacctgattctcctgatgtggattcccatgctctgactcagtcattggctgagactgttggtaaattgattgatcagtacatcgatgcaatggacaaggtcaaaataaaacaagggctgaagattgcaatggccatttctagcgaaggaaatgcatacctacaagagagtcagttttggaagctttacaaacaagatccagccagttgcgcaactgtgatgaaaacctcagttggaattgtgtacctcctggcatgtttgctggagcctttcatgccaacattctcaaaagatgttctgcagcagctaaatctaagtccagaagagcacctatcattttgtgatgaaaaaggagaggttgagaaggccaaaagaccttgggatctcataccatcaggccacaggatagggaaacctgcacctttgttcaagggattggaaaacgaagcggtgaagggcttgagagaaaaatttgcaggcagccaagctgaaagaaaattgaggactcaagtcgccgcacaattggaagccacaagcatatagaaaatctaacactatttcccttcaactactagatgttaaaaccgggcttaacaaaaggagcgtttgttttctttattttgccttgaataataattgtacagtgtagtgacttgagattaatgataatacatattacttgtaattcc

SEQ ID NO: 98873 - DNA, 1866 bp, Oryza sativa
  Clone ID: PAT_MRT4530_9673C.1
atgatgagagagctctttctcttcttcactggaggcctccgacgccgtagaaccaacaaattgatactgatattcatttggctggcctatgtgggagcagacctagttgctgtttatgcccttggtctcctctctcgatatgaatacaaatccaaaattggaagtgactccttgacagtcatctgggttccatttctccttgttcatcttggtgggcaagataccatcactgccttctctatcgaagacaacaatctatggctaagacacctattgaatctcgttgttcaggtcagtctagccttgtatgccttctgcaattcatttggtcagatcagtttgcagctagtagttcctgcaattttcatatttgttgctggtataatcaagtatggggagaggacatgggcactcaagtgcgggagcatagatggccttcaaagctcagctggtggttacaaagacaaagaacaggaagagcaaaaggataataaatatggaagctatcttagcaaggtattctatgctcatcaaatggtgctatatgctcgaggattatttgcgggggtcacggtctcacaacttggccaaaaagtaagaaaggaactaacacatggtataagaaggtgtgaaaaatatgtgaaagcaaagataatagagctggagcttagcatgatgtatgacatcctctacaccaaggcaatgatactccagacatggatcggttgcatactacggtgtatttcccacatcgctatggttgttgcatttgtgctattcctagtaaccccaaagcatggccatagaatggctgatgttgcaatcacctacacactatttgctggtgcccttcttatggaagcatgtgccattggtgtggtagtggcatctccactaacatgggcacgttggagaaggcacaattatgttaatttgcttgctattgggaagatcattggagcaaaggaggagaggtcagttgtgccaatttctttggggcaatttagcctagcaacatgtgctttacatgatgggtccacacccaggataatgtccaatgcgttgtatgcatttggcttggagaagatctatagagatgtacgtcatgtgaaacacgttgaggccactgagattgttggttgttttgtggattgtttcaataatagaccatccaataatgatcaggatgaggtaattatgggggtctctaaagaagggaatgtggatgtcaggttgaacttgttgagcatatctcagcgttttgaggtcggcatcattcaactgcatttgttcacagatatttatacaacttcagtactattacttgaaccaggcatctgggaagaaaagacaggcattgtatgggaatgtgtgatgctatcaaactatatgatgtacctcctgttagcacacccctccatgttgcctgttagcagtgattacgctgtgatggaacatttgaactatatggctaaattagtggacatgtacaaatatgctggtggcaagctggatcctcacgcaaggatggacttactgctcaaagctcttgagcaaatgacaagcaacacaaactctgacctcattgttgttgctagggaactcatttatattactagggtcagtggcacattattgaagttggtgaaggagacgtggatactcctcctcatctatgctgccagcaagagccgcggtgagctccacgcgcgtcggttggacaacggatcggagctcctcaccttcatctggctgctcttggttcatcatggcctcggcaatgtggcagagtttgggttaacactaggccgctatgtcacaagtgaagccccgccaagcttatctgaaattatcgacatcccgtga

SEQ ID NO: 98874 - DNA, 485 bp, Oryza sativa
  Clone ID: PAT_MRT4530_96740C.1
gaaattagttttgaactgttttctgttaattccaggcatcagatacattgttcacttggacagatttgcaagccaagtgtaacaacgagctgctgaacaatttagggaacttcatcaatcgagtactaagctttatcgcgaaaccagagggttagtaaaacgaggaaaatcttagttctgaacatgatacctctgttttagtgctctgtttccttaagatttctctagtagcatccgcattcacttgtccattttattctgattagctcctgcatgatctgtctaacaagatgttaagaaataagaagttaagatagttcaactgctgttgcaggaactggatatggttctgttgtacctgattctcctgatgtggattcccatgctctgactcagtcattggctgagactgttggtaaattgattgatcagtacatcgatgcaatggacaaggtcaaaataaaacaagggctgaagattgcaat

SEQ ID NO: 98875 - DNA, 1466 bp, Oryza sativa
  Clone ID: PAT_MRT4530_96741C.1
tcattgcatcgccgccgctcccgtcgtcatcgccgtcgtcgcgccgccgccgccgctcatggtcgtcgccgtcgtcgcgccgccgccgctcctggcctttgacgagtcttcaggcttggcaagttcaggcaacggcgagttatcctccaggaaacccatcgcctcctgcatggtagggcgcatggaagctttaggctgacaacattgcagccccaagaagatgacacgctccatctgcctctcatcaaactcacctctcaacctatcgtcagcaacatcagagctacggtcgaactttcccgtcttcatgcactctggatccaagtaatttgctgttcctactaccattgacgattgtattgttccgttgtcagcagttctggacagcccgaagtctgctagcttggcgttgaattctttgtccaggagtatgttactgggtttgatatctctgtgcaggatgtacggctttctgtcatggtggaggtaaatcagtgcgcagccaatgtccttcactattttataccttgctgtccatggtagcactacagctgcctcctcgtgcaggtgcctgtgtaggttgccgttgtccaccaattcatataccaagaaaaggtcactcttcttctgcctacaccagcacatgaaatcaatgatattccatctacgctttattccccaaccaagaagttcgacgagattcttctgctttgctctactgatggtctggacttcgtcaaagaaatccttgtttccttctctgcattccttcaagatcttcttgacagccacttcacggcccaattctgtcaagtaacccttgtggacttcgccgaacgcacctgctccaatcttattctccatggaaaactgatttgttgcagaaaccaattggtggtacttgaaccgcctgaccccacgagttcccttgtcaaatccacggctgttgtcacgaccgccgccaccactgccgccgcagttgctcacctctccgtcacgggatacgtcgccggtgaccaccccaccctcagcgccccggatttcaccacccagggctgccttgtggaaattgaagatggacatggaaccaggaaccattggacgctgctgccgattcagccatatccaggacctactccatcggccgagcaagggtcagaataggagccgcgtctaaggtcctccgcctgcccatcgtttttgcatttgcagaggtgggcgacagcagcagtgaaggcccctggtgaagaggacagccaccggcgccaaccacacccgatccgatccggagcagtgagcaccaccctccaccgccacgtcgccaccaccagccgagtagccgacgaggcagaggcggagtggggaacacgccgccaccgcgaagccatcctcctggtcgtcgttcctcaaacgcacgcgtgggcgccacgcgtgggtgggtgcgtgcgggcaatcccggaccgggg

SEQ ID NO: 98876 - DNA, 497 bp, Oryza sativa
  Clone ID: PAT_MRT4530_96742C.1
aggaattacaagtaatatgtattatcattaatctcaagtcactacactgtacaattattattcaaggcaaaataaagaaaacaaacgctccttttgttaagcccggttttaacatctagtagttgaagggaaatagtgttagattttctatatgcttgaggcttccaattgtgcggcgacttgagtcctcaattttctttcagcttggctgcctgcaaatttttctctcaagcccttcaccgcttcgttttcctgcacatagtgggaggcatgaagcaaaggaaggttagtaaaacagataaagatggtccccaaatatgcatataagctcaccaatcccttgaacaaaagtgcaagtttccctatcctgtggcctgatggtatgagatcccaaagtcttttggccttctcaacctctactttttcatcacaaaatgataggagctcttctggacttagatttagctgctgcagaacatcttttgagaatgttggca

SEQ ID NO: 98877 - DNA, 1367 bp, Oryza sativa
  unsure (1)..(1367): unsure at all n locations
  Clone ID: PAT_MRT4530_96743C.1
tccttgacttgcttcttccatcgtctgcgagttgtcggtcgacttgtgcccgtagngcgggctctcagncttcggcgtgcctcctcactctcgcgngtgtggtgtgtgctgcgtcttcctttctctccttcatgtagtcgtacgtcctctcacgtccgttctctcgcgtcttactctcgctctgncnttggttagtgtctcttgcgctgcgctctgcgcancttgntcttgtctactncngctcgtctcgtctctgtctgcgctcgtgtcgtgtctctctctctgtgacgtcttgcntgttcgctgtgcgctcgatgcgcgctgatatggcttggtctgtgtgtgctgcntgctcatcgctctctgtgtctcttagtctatggttcatgcttctttgccctcgtctttcgtcgccgtacatgtgtgttctgcgtcgtcgagtncgtgttcttcctgtgttgtgcatctttgcttctgctctattacgcgtcgcgtcttntgtcctacacctacttatgcctccgattgtctcctgttccttcttcgcttatgccgtctcttacctcgtcgtctcttgtttagctacatgttctcttggttttgctcttgctctctcttgatctctgctgtatgctctgcgttgtcctcgtcctcctcttgtcctctcctgcttcctcctttcttctattcgtgctcntcctcgttttctcgcgctttgttgtcgtcattgtcttatcactgcgctctccctcctctcttggtgctctccttctcccctcgcttgctcatcttgtcttttctgctctcttctctgcttccttcgtcctcgtgctcttcctctcctcgtttggtgttttctggttgttcttccgtgttttcattctccttttctcgtatctcttgtctctgctgcttcgtgctggtctcccncgtgtgttgtcttgttcgtctgtggtccttcgcgctgtctctgcgtgcgccattggcctggcgtctcctctcacgctattcctctgctttttcttctttcctcatcctgctatctctctctctcgcatctccctcggctcgtgctgccttcttgtgttggtgncttgtctctgtcgctcttgtgtgcatcgttcgcttattctctgtgttattgctctgttgtctgaccgtatcgtcggttgtctgtgttgtttcttcttcctacgcgggttgattgtgcttagtcctctgtttccgcccgtctcgcctctcctactcgtgttcgtgtgttcatcgtcctctcttgttctgcagttgctcgtgcnctatggcctagatctctcgcctcagtatcgccatctcctgctattgcgttctcgtccgtccgcctcgcgctg

SEQ ID NO: 98878 - DNA, 495 bp, Oryza sativa
  unsure (1)..(495): unsure at all n locations
  Clone ID: PAT_MRT4530_96744C.1
gttttcccgctcggcgacgccgacgcgatttcctcgcctcgctcgatactgaattggaggcgaaattgtagatcatatagcanagagagagagagagagagagagagagaggaagcanactcggaccccttgatttctcggctagatctgagatatcatcgcatcatgggactgctggggttgaatcggctcatgtccatacagcgggagcagcgctgtcgccaaatcgaagccaatcgtcttcttgcatccactgataaaagaaaggggtctccctgcaaacaagataattcccgatgcagcaaaagagagagatattctcagccagaccttccggaggacatttggcgccatatacattccttactgtcacttcaagatgctgcccgtgctgcttgcgtgtctcgggcttttctatgtttatggaggtgccgtccccacctcaccttcagtttgcaaactctgggcttgagtgaaatggcatgtaaaaagggt

SEQ ID NO: 98879 - DNA, 261 bp, Oryza sativa
  Clone ID: PAT_MRT4530_96745C.1
tttttttttttagggtacaaagccatccaaaaccagttcatcggatatacatgacggctttaatacttttgagatcaaattcaaacaatatcgctttatagatgacacagaagaaaacggtggaagaaatagctagtggagcaggggcgggtatatgggtcatccagcattctacgcacatataaccttccagcccgggttcataaattcaacctaaccttccaacaacaattttcctgtttgaaagctttcttttgtctt

SEQ ID NO: 98880 - DNA, 252 bp, Oryza sativa
  Clone ID: PAT_MRT4530_96746C.1
gtacgttaattcgtgtaaaagaggcaaacagtgggctgtcaacaacactgacgatgtggcttttgaactacacatacaaatgtcgcctgtcaagcatctaacatgtacagcaccgaacatatctgtcgtggaagctatctgtgatctacagcaacacctgactttacacaccaggcacgaccttatttgcaccaacaaacacactactcacttgggagggtgaacgacgcaaatcaaccactgttgaacact

SEQ ID NO: 98881 - DNA, 833 bp, Oryza sativa
  Clone ID: PAT_MRT4530_96747C.1
atttgaccatctctgggtacaatgctcacgactgtcacaagatgttaactgtcttcctacctattgctataagagcggtcaagccagttcacactaagttggtgataacaaagttgtgctattttttcaatcgagtatcacataaggtttttgatcctgaagagttaggcccccttcataaattcgcaatcgagacagcttgccagcttgagatgtttttccctccatcttacttcaatatgatagagcatctgattgtccacatcgtccctcagattatcgaaattggtcccctatatctacatcatatgtgggcgtatgagaggtacatgtcagttctgaaatggtatgtctgtaaccaagctcatctggggggatcaatgatagacgggtacataactgaggaggtggttgaatgctgtatagattatatgaaggacgccacactcattggtatgccccctcctgtacacgagggccggttagctgggaaggggaccgtaagcaagaaatggttctatgatgaggcctataaagttgtagcggaagcacatagcagcatgctgcaacagcgcgccatcctcgagccgtacattgaggaacacatgaacgagatcagagcttgcaacccaagaagaccggcatcttgggtctcgaaggaacagaagcacaaatttcctgaatggttgaaggaaaaagatctaccgttcggtgaaacgatcgaggaaaaaacattaaataggctggcaactggcccaagtagccttgtgacctcatggcaagggtacggcatcggcagatatacgttttacacgataggcaaggtggactaa

SEQ ID NO: 98882 - DNA, 776 bp, Oryza sativa
  Clone ID: PAT_MRT4530_96748C.1
ttttttttttttttttttttttttttttttttttttgccattcttcatggaagaatttttcattatgttaccgaaaatgtttcagtcggatgcaaacactaaaaacacagacttcaagagcaaaaacatatgcaacacccaaagaaatcaactgcaacatcaagtaccaaatgcaacatccagaaatatgaattgcaacatagagaaataccaaatggaacatcaagaaacacttgtgtgcaacataaagaaactagcatggaacatccttgctagctcgatgctcccaccatcctcaccttcgtcggcgagcgcagggccatctccatcaacggcgcctcaagttttagtccgctccctcgcagtgccaccgccgccggcaagctcagggccctaaccgtcgctaggcgtatctccttgtgacgttgacgccgccaccgccatcgccgccgccgtgtcgccgccgccgagctcggatcctctttgacaacggttgtaccttgtcgtggtgccgttgccaccagcgaggtcaaggcctaaccggcatcgactgttttctcgcggtgttggctgaacggccaaatacggccgcccgcaacggtagaccccgcctgttggtatttcttaacgatattactagaaatataatttccaacaatgacgcagaaatacttctggtatattatggttacagagttcatccgcaagcgcacggatataccattgtagcatttcacccgagagtattcccaaggtatcatatttattttatcccg

SEQ ID NO: 98883 - DNA, 276 bp, Oryza sativa
  Clone ID: PAT_MRT4530_96749C.1
atggcggcggcggaggaggaggaaacagccgcagggagctggagatcatcctccagccgcagcagcagcagaagcagcaccccctaccaccactcggacctccgatccatgactgcaaagtacaacatagacactcacccatatgaacatatgcacgtatatcttattcaccctattcttatgagcatcttcgaagattgggccagcaaatcctggagattaacacgaagccaccacaggtgcctcgctgtcgacggagacctaaggtgctactga

SEQ ID NO: 98884 - DNA, 732 bp, Oryza sativa
  Clone ID: PAT_MRT4530_9674C.1
atgggcaacgtcgcgatcggcgtggggcggcggaggcggcgctggccggaggtggaggagcggctcacgcagccgcggaggctcctccgccagctgtccgacgtggactccggccggcttcggaggctcatccgctccggcgacctcgccccgtgctttgatgccgccgaggacgacgctggcctcgacgaggattgccccatttgcttctacgtgcgtttctatccgagcctgaatcgatccaagtgttgcggcaaggggatctgcacaggccagggctcgggttatggggcctggtctgggccaaacggtggttcttacactgcgtcaggtcatgggttgggcttgggctccggatatgggtatggatcaggatccgcgtatggagctggagccaatggtggcactaacggcgggtcagattgcgacactggctctgggtcaaactatggctctagcacaggctcaagctctggctacgggtcgggtggagtttcctaccgctcacgtggtcatggcgggtcttctagtattgggtcaggttcgggggttggtttaggagcaacttctggtgttggtgccggttctaatgttgggccaagtggtggttgctcgacttgtggttctggttctaggatctggttcaagttcatcatccggttccacagggatgtcatatggttcatcaggtgctggctcattcagtggatcaagcagcggttcaaactctaa

SEQ ID NO: 98885 - DNA, 2998 bp, Oryza sativa
  Clone ID: PAT_MRT4530_96750C.1
agataaatccaatttttaatttcttttttaaaaaaagtcaatcaacactcttcatcatctgttctcaaacgggactaaatatcactgtacaaaaactatacagatgctaatgagaatctactaacggaatcacataagcacaaagcaatcgataatttgtcacaaattttctctctcatctgtgagaatttgtcaggtcgcctatcttgatcatctcgaacggcctgtccaggatcggtcgccggcgagcggcgagctcctgcgcgacggcgcgcatcgtcggccgggcgtcggggctcgtccggacgcaagacagcgccacgacgaaggcgaacacgacctgcccggccagcttccccgccggggcgtccagcctctgatccaccacgtccttgagcagcagccggcgcgacgccgacgccgacgcctcctcgccgccgccgccgccgctgccgtcgtgcccctcggctgacagtgactgcggcgagtgttgcagcgagctgatgagcccgccggggtacttgcccatgagcatctccatcgccacgacgccgaagctgtacacgtcgcacttggtcgtcaccctcatgtacgccagctctggtgccatgtagccgtaggagccggcgatgctgtcgcaggtggagcggccggggacgaggaacctcgccgtgccgaagtccgacacccgcggctcgtagtccgggtcgaggaggacgttgttgacggagacgtcgcggtggatcatcggcggcgagcagtcgtggtggaggtaggcgagcgcgtgcgcgacgcccctgatcgccctcatcctcgccggccagtcgaacctgcagccgccgccgccgccgccgccgtacagcaccgcgccgaggctgccccgctcggcgagctcgtacacgaggtacatgtacccgcccatggcgcagaagccgtggagcttgacgatgttgcggtggcggacccgcgtcagcgccctcacctcgttctcgaagctcctctcgctgacgccccagcacgcgtcgccggtctccgacgcgtcgagccgcttcacggcgacggcgcgcccgccgccgaggtcggcgcggtacacggtcccgaagctccccttgccgatgcagtacgcgtcgttgaagtgctccgtcgccgccaggatgtcgccgaaggagaacgtcgtgtccttgctccatatcgaggcctgcaccgccgccgccgtcgagctcccgccgcctccgctcgccgacgtctccgccttctctacgacgacggcggctcgcctcgccttgcgtgacaccgcgcaaaccacggccaccatggacaccagcagcgcggcggcgacggagagcgtgacggcgagcaccagcctcgtcttaccggagtggccgtcgccggtggtggtgttcgagctgcaagagttcagcccggcaatgtcgtggccgcacaggccggggttgccgctgagatccagcgtcgtcagcgacctcatcttgccgagcaggggcggcacctcgccggagaggttgttgctgctcaggttgaggtaccacatctcggccagcttcgtcagctccaccggcacgccgccgtcgagcgcgttcccggacaggtcgagcatctccattctcgcggcgttcccgagcgtcgcagggacacgtcccgacaaggcgttgcggcgcaggttcagcttggtcaacggcaagctcccgagctccggcgggatctcgccggcgagacggttcgacgagaggtccaaatcttgcagggacatggcgccgtagctcgccggaatcgctccggcgatcttgttgccgctcaagtggaggaacgagaggctcttgaactgcgcccagtgctcggggagctcgccgtcgaacgagttgccggacaggtcaaggtagtaaaggtcggggtgcgacgcgaggatctccgacacgtcgccggcgagcttgttccgtgccatccggaggcgcacaaggttggtcaggttgcggtagcacgccggcacggtgccggagaattggttgtcgtcgaggccgagccaccggagccgcggcgcgctcgcgcacacgccacgaggcagctcgccggagaagcggttgttcgccatgctgacgatggagagctggccgttccggccgaactccggcgggatggccccggagaggaggttgtcgaaggcgacgaggccgacgagcctcggcagccgcgcgagccccgccgggagctcgccctccagcatgttgctgcttacggacagcctctgcagcgccgccatgtcgccgagctcgtcggggagccggccggtgagcttgttggtgtacagccgcagcgtctcgaggctcgtgaggttgccgatcgtgcgggggatcgcaccggcgagcttgttctcggcgaggtcgaggagcttgaggttggcgagcgttccgatcaccggcgggatcgcgccggagaggttgttggtcgccaaggagaggaactccagcctcgacgccatggtgatcgccgtggggatctcgccggtgaaccggttgccgtccgcctggaacacctcgaggttggtccaggcggtgaagtagtcgggcaagacctcgccggagagcatgttcttggagacgttgaactcccgcactctcgtcagcctcgccagcgctaccggcagcttgccggtgagcttgttcccggcgaggccaatgacggtgaggttggcgcagaggctgagctcgtcgggaatggtggactccagcccggcgaggctgacgttgatgtgttccagcgaccggagcttgccgagagtggtagggatcgcgccgcccaacgggttaccggagagctcgagcgttcgcaggccggagatgttgccgatcaccggcggcacgccgccgtggaggaggttggagccaagaacgacgctctggagcttcgtcagcttcgcgagggacgccggtatctcgccggagaactggttggacgagaggttgaggtgctcgaggttgggcat

SEQ ID NO: 98886 - DNA, 481 bp, Oryza sativa
  Clone ID: PAT_MRT4530_96751C.1
ggaaaaaaaaaggggagcagccgagccccccccaaccctggttttgtttttccaaatcccaaatcatcacatggcaatccaacacaaaaacaaaatcccaatcggaatcatcacaaaatatcaacgagacaaaatttcaacccaaaaaaatgaggagaggaaagggaaggtcgagccggaggccccgttgttccttgccgaaccaccaccttgccgccttgttgccgggggggggccaagctcgggagctaaatcctgagccgccgttgccaccggggagccgtcgacccgtcgttgcgctggggagctgccgcgccgccgggtcgccgttaccccggaaatcaaccgccccgccatggagccgttgacttgccgcgccgtcgggagccgccgacccaccggatcttgaaaggaggggggcggggggggccccccaacaaggaggaaagggacccccggtggggggtgagggaaacccccc

SEQ ID NO: 98887 - DNA, 591 bp, Oryza sativa
  Clone ID: PAT_MRT4530_96752C.1
atgcccctaacactgttcttcctctctctatctttttttccccttcttcttccttgcagcagagcagaggcgcgacggcggctggcccaacccgagacggctcggccacggcggggcggcggcgggaagatgacgaagctggccgagatgtggtatctcaacctgagcagcaacaacctctcccgcaaggtgacgcccctgctcggcaagatgaggtcgctgacgacgctggatcttagtggcaaccctggcctgtgcggcaacaacattgcagctcgaacaccaccaccggcgacggccactccggcgaggcgagccgccgacgtcgtcatagagaacgcggagacggcggcgagcggcgggagctcggcggcggcgacgacaacggcggtgcaggcctcgttatggagcaaggacacgacgttctccttcggcgacatcttggcggcgacggagcactttaacgacgcgtactgcatcggcagggggagcttcgggaccgtgtaccgtgccgacctcagcggcgggcgcgccgtcgccatgaaacaactcgacgtgtcggagaccggcgatgcgtgctgcagcagctga

SEQ ID NO: 98888 - DNA, 1704 bp, Oryza sativa
  Clone ID: PAT_MRT4530_96753C.1
atgggcgcacgcgaggtgcggcgcacgggtttcgggtgcgcatggcttaggagcggtgcaccggttggacggatggcggcgggcccacatgcagccgcacggctttccgtggactgcgcgcacgggagggaagacggagggaggggacggctgaccggcttggcccggtcaaagccgaggtggcgccgacgtggcgcctacgtggcagccacgcgggccggcgggaggaggaagaaggggaggccgagatggacggcggacggcggccgtgttcaccggagcaagcgcgacggatttggtcttcggggagcacaccggagtgacgagggcgtcgagaaggagcgagccaacggctcggattcgccggagggagttcgacggcggtggaattcgacagtggcggccggcggcgagagaaaggggaaatcactgaggggcgacgaggactcaattaaaggcggcggaagcatctccggtgttcaaggaactcatttccggggtcggatgggtctgagcggcgccgtggaggtccggcgacgagaggcggcctccgggggtgggcggcaatggcggtggggccacgccgggtggcggcggtccttggggcggcgtctacgcgcgttcggcagggctaccgagctaccacgcaagctagcggggacgagggagagcgaggaaggggaacgggaggaggcactaccgagccgggcgggcagtgatgggcagtcgacggcgcggggcgagctctccggccttgggccggggaaggggaagaagaaggatggaaaagaggcggtttgggagggggaaccgacattggcggtcaaggagagcgagctggcggtcatcgacgcgtgcagccaaggcggcgacaggaaaaaggtgggggaacagggagctctgctggtgttcacgggcggcagcggcggtttcgtgggcagtgcgaaggcggcgacggtgtggatgcgttgggcggcgaaggcggtggatcgagcgtcggaaaatcgaaccgcgggagcgggaggattagcgcgggctggcgcggtcaagaaaaatcaatggggcagcggcggcgtacaggctccggccagtgaaaactggaaatacgagcgggcagaggccagcatgggggcagacgccgtgcaggtgggcgacgtgcgcgcgggtggtctcggagagcacgcgacggccggcggatggcgggaggtcggcgaccgggcatgcgcatggacagccgccgacggcattgtggacgacaggcaacaaagttatggaaaagtcttaccttttggggcagttttggcggaggtgctgggagttcgtcggtggtcgctggagaagatccctccgccttcttcagtcatcacacgggctggcacggcccacggccgacaatgccccagctattcgcctcctccggtccaacaagaagccaagcccctcaccagcgacattctccaagcacgaactgccgccgcattgcaccaacctccaaaccccacttgtgccaaggtggtgaggtcgcttcgacgaggaaggggacatgggtatatcgtgctagaggagagagctggaccaagactgaagaagggcaagaggctggcggtgcttgaggagatttgcaagtctaaaaagggagtgggtggcatgcttactcccaataatctggattataataatcacaagctgaaagaaacagggcct

SEQ ID NO: 98889 - DNA, 855 bp, Oryza sativa
  Clone ID: PAT_MRT4530_96754C.1
atgtcggcggcaaggttcacgggggaatgggttcacgcgggggtggcgctagggctggtcgtgctgacccggtcgcggccgatgtggctccgacgtggcgcctacgtggcagccacgcgggccggcgggaggaggaagaaggggaggccgagatggacggcggacggcggccgagttcaccggagcttgtcacgacgattcgagagggagggagcacaccggattaaagagacggaggagataaagtgcgccaccggctcggattcacggaaaggagaccggcgacgacgaaacgcggcggccctcgccggcggtgagaaaaagggcaaacggcggaggggcgacgaggattcaattcgaggcggtggaagcatctccggggttcaaggagtccgcttccggcgtcggatggggcggaagagcaccaaggagggctggcgacgagcggcggcctccgggagcgggcggcaacggcggcgaggccatgccgggcggcggcggactagagggggggcgagggagagcgaggaagggaaacgggaggaggcactaccgagccgggcgggcagtgatgggcggtcgacggcgcggggcgagttcttcggccttgggccagggaaggggaagaagaagggtggccggagtcctcttcggctccttgcgcacacgctggcttcaccagcacgcgcgacggcgaagggagggtcggcagctgctaggcggcaacaaaggcgcggcggcgacgcgggggatgtcggtttggggagggaggaaaccgacctcgtgggcggtcaaggatgcaagggcggcgagctggcggtcgtcgacgcgtgcagccaaggcggcggcaggtga

SEQ ID NO: 98890 - DNA, 663 bp, Oryza sativa
  Clone ID: PAT_MRT4530_96755C.1
atgagggttcgattcaaagggggtggagcatctccggggttcaaggaatccgtttccggtgtcggatggggcggaaaatcactgaggagggctggcgacgagcagcggccttcgggagcggacggcaatggcggcgaggctgtgccgggcggcgacggcgctagggaatggtttggggagaccctagggagctcaaggacggtggtggcgcgagatggcgagaatttgggcgaggagctcaccggcgtgcgggaacggtatcggcggcgatttggggatggaaaggggtggaaggccgatggcggcacgcgaccgagcggcggcgcacggcggatgacgccgaggcggcgcggcgtcgaggcgagtgcgccgggggagaagagagggagaggtggcgcccggagctcctcgtcacgcgttcacgctcgcaccggctccctcggtgctcggcgacagacggcgacggcaaggacagcgggaaggcaacaatggcgcggtgaaggcgagggaaaaacgagagggatatggggaggaggctcgggctttataggcgcggggaatgtcggtttggggagggaggaaaccgacctcgtgggcggtcaaggatgcaagggcggcgagctggcggtcgtcgacgcgtgcagccaaggcggcggcaggtga

SEQ ID NO: 98891 - DNA, 2756 bp, Oryza sativa
  Clone ID: PAT_MRT4530_96756C.1
acgtgtgcttcgctttgttgcaatgactaaaacacgtatctaattacaaaaaagaattttatgcatgctatgcgtttgcggggttgcgtgcgtggcgtgtcagcggtagaacgacacgggcggcaggcggaagccggagttgcgttggcgcaggaagggtatcgcctcgggccgcgactcgaggtcacggtagaactcgtactccgcctcgtagtcgtgaaggtccagctcgcgccgttgcagcgtgtggtagtggtgccgcgccgacgcgtccttgccgaacccgaacaccgacacgcggtcgcacacgcccgccgcggccaccaccgcctgcatccccgacgagtagtggaacatgccttcctcgtgccgccgcgcccactcctccgccggccgccccgtctcccgcgcgaaccgccgcagcgagtagtacttgacgatccgcgcgcacagcgcgtccagcctcgggtccgtcacgatcaccggcgccgccgcggtggcgtcggcggcgcccgacgaggaggaggaggcgttgttgcacacggcgtgctcgacgaagtgcgcggcgttgcacatgtacgtcaggatgggcacgccctcgccgtaggcgcggcagaagcaggcgccgcggcgcgggacggcgcactggctcagcacgttgctgttgaggaacgcgaggccggtcctcgcgccgacgtggcgcgcgtaccgaccgtcccccgccggcgcgttgttgaggcggaccacgagctcgtgcccgtcgatgagctcgccgtgctccgccgccagcaggatcccgctgttcccgaccaccgcgcaagacgcgtacctccggccctccccctcgccgccgccaccaccgtcgccgttgtaccgatcgatggggcgcttgatgagttccacgagctcggacatcacgccggggtcgaaccgctcctgcttgccgacccactccctcagcccccggagcgcgacgtcgcggtgcctctccggcgccctcgccaggttcccttcgagcagcctctttgccgcctgcagcaccgccatcgccgccgggtccacggccgcgagctccacaagcctctcgtcaacgtcatcaccatcgttccgtcccgcaccaccatccggcgcggcggccgcggcgccatcgccggaatggcgcagctgggagcagcggaagacgaggagaaggcagaagacggcgacgagcaggaggaggccgcacgacgggtggctccaatgcctcctcttcatctcgccaagtaagctcccgcccagcacagctcgcctcggtcggtgactcggtggtctaacatggcagctgatcgacattccgtccagctctgaactgaacatttggtcgaagtgctcggtcatctttacacgcaaatacgcacggtaacgccctgagtccctgaccctattatcatgccatttgtaaccgtgggaattgtctgcagtactacaccttaacttaggttgcagctcagaacagcccgagaatgcaaccgacgacgcaccttgtggttgcactttgattatgctcgatgagtttcccataggaaccggtcctaatatgcgaatacggacagtgccacataggcacaaccccggagtgacgagggcgtcgagaaggagcgagccaaacggctcggagtcgccggagggagttcgacggcggtggaattcgatagcggcgtccggcggcgagagaaaggggaaatcaccgaggagcgacgaagactcaattaaaggcggcgagagcatctccggtgttcaaggagctcatttccggggtcggatgggtctgagcggcgccgtggaggtccggcgacgagaggcggcctccgggggtgggcggcaatgccggcggggccatgccgggtggcggcggtccttggggtggcgtctacgcgcgttcggcagggctaccgagctaccacgcaagctagaggggacgagggtgagcggggaaggggaacgggagggaggcactaccgagccgggcgcagtgatgggtggcggcggtgcggggcgagctctccggcctcgggccggggaaggggaaggagagggtgcccgattcccgcgtcacgcgtccatgcacgcaccggtctccactggtgcttcggcaacgaacagtgagggcgactgcagggcggggtggcaacaatggcgcgggggaggttgggcatgaaacgaggaggaaagggaagggctcggttgtttttatgggtgtgggaaatcgcttttgggggaggaaaccgacttagggcgatcaaggggaggagctggcggtcgcgctcgtggtccaggcggtggcaggcggtgacgccgatggtggtcgggcaaaaggaaaaagaagggggagaaagggaggtctgctccttgctgtttcgggaaaagttgaaggagggagagggagtgagagaggggctgcctctctcggctttggaagctagcggcgtggagcggcagagtggcagggctgacggcggcaacaaccggccggtcggccacgcgcgagcgcgggaaagagcgaaggcggtggcgggttttgggcggcgacggcgggaagcggcgtcggcgcgagagagagaaaacgagagagagagagagagagagagagagggagaaacagagagagcgagagagctctctctcggctcggctcggcacgtgcaacgcacgtgcgaggctgagggaggagaaacggctaagggggaaaacggcccacaacacccgagggaggtaaa

SEQ ID NO: 98892 - DNA, 1725 bp, Oryza sativa
  Clone ID: PAT_MRT4530_96757C.1
ttacacggtccaggaggcggagcgcttgaggacgggcttcatcatggccctgtcctcctcgagggagatcatgccgaggtgggaggggtcctccaccatcatcttggcgacgaggtagccggcgacggaccacgtctgcagcttcctcgcctgcttgcccacgtagcggcccagcttcccgtcgtagtactccggccacccgtccctcgccagcctcgcctcggcgagctcgatcgcccgcctcgcgatcttcagcctccccgtcttgatgcacgccgccgtcagcagccacaggagcactggccaggatccgccattgtggtagctccaccgggtgttcttggggtcgcacccggtgacgaactcccactcgtgtgattcgatcgccgggaagctgatcttgagcggcatctccccgatgaggtcctcccaccgctcctcgatgaggtccatgatcgccgccgcctgctcgggcgtcgccatggacgcaaggatggcgacgaagttgcccagtgcgaaccatcggaagtccatccgggcggggctgacgttgccgacgaagtagccgccgcggctgggcatgaagtcgaacacccagtccgggatggactccgggatgacgttgaacttgttgaccgcagtgtgggagtactcctcggtgcggtagcggtagacatcgttgagctgctggaagtcgagccagaagtaggaccgcatgtggtaggtgagtgcgtggagccgtgtcgccacgcggtccatcgtctccttcccctcgggggcgtccggcttcagcatcagcagtgcgcaccgtagcgccatgaagaagagggcctggatctcgattgggtacccgtacacgcccatcctgcggtcgatcatgcagcagccgtcggcgcagaggagggtggggaaggtgtcgaagccctcggcgaggcactggttcatgatgaggcggatcccgcgctggcactccgccgtctccgccagcgacaggtcgccggtggacttggtgtacgcgcggaggaggatgatccaccagaagccggagtccaccggcgccacccgcccgatggcgctctccccgaagtccgccaccagccgctccgcccctcctcgcttcgcgtccttgagcaccttgaagctcgccggcatcgccccttcccccagcttgaacctgtcgatccgcttctcccacccctgcagcagcagcgtcttgagcaggaagttcttcacgatctccggctccccgttcatcaggaacgccagcgcgctcggcacgaaatccctcacgaacacctggtcgtagttgaggacctcgtcggaggagtggtcgacggcggcgatggtgccgaggggctggccgcggaagcagacgagggagcggcggagggcgtcccaggcgtcgaagacgagggggtgggggtcgaaggagaggcgggtggaggacgccggggtgccgcacagggaccggagcccgccgccgggggagtacatgctctcgtagctctccatcatcgccgggtaccctcctccgccgccgccgcggctggccgtgccggagatggagagctcagcgagggagcggtcgtcgaaggagcgctgcctgtccacgttgatccgcggccggtggttcagcatccgcgtcaggtcgaagtcgtccgggtccgccgccgccgccgccatcgacgcgtgcgacgacgccttcctcatccccgccacctccat

SEQ ID NO: 98893 - DNA, 1440 bp, Oryza sativa
  Clone ID: PAT_MRT4530_96758C.1
atgggcgcacgcgaggtgcggcgcaagggtttcgggtgcgcgtggcttaggagcggtgcaccggttggacggatggcggcgggcccacatgcagccgcacggctttccgtggaccgcgcgcacgggagggaagacggagggaggggacggctgaccggcttggcccggtcaaagccgaggtggcgccgacttggcgcctacgtggcagccacgcgggccggcgggaggaggaagaaggggaggccgagatggacggcggacggcggccgtgttcaccggagcaagcgcgacggatttggtcttcggggagcacaccggagtgacgagggcgtcgagaaggagcgagccaacggctcggattcgccggagggagttcgacggtggtggaattcgacagtggcggccggtggcgagagaaaggggaaatcaccgaggggcgacgaggactcaattaaaggcggcggaagcatctccggtgttcaaggaactcatttccggggtcggatgggtctgagcggcgccgtggaggtccggcgacgagaggcggcctccgggggtgggcggcaatggcggtggggccacgccgggtggcggcggtccttggggcggcgtctacgcgcgttcggcagggctaccgagctaccacgcaagctagcggggacgagggagagcgaggaaggggaacgggaggaggcactaccgagccgggcgggcagtgatgggcggtcgacggcgcggggcgagctctccggccttgggccggggaaggggaagaagaagggtggccggagtcctcttcggctcctcgcgcacacgccggcttcaccagcacgcgcgacggcgaagggaggcgagatggaaaagaggcggtttgggagggggaaccgacattggcggtcaaggagagcgagctggcggtcatcgacgcgtgcagccaaggcggcgacaggtgatgacgccggcggtgtcgggcaaaaggaaaaaggtgggggaacagggagctctgctggtgttcacgggcggcagcggcggtttcgtgggcagtgcgaaggcggcgacggtgtggatgcgttgggcggcgaaggcggtggatcgagcgtcggaaaatcgaaccgcgggagcgggaggattagcgcgggctggcgcggtcaaggtgggggtggcgagccggcgctggcgtctgcgtctctgcctccgagcgctagcggccaaggagtggaggcatggcgtcgttgcttgggagggaaaaagagaagggaggacggtggaaagggggggctttaccatgccggtttgggaaaaaggaggtgggagagggagaggagagcgcgtgaggcagagagacgcgctgcctccacgtcttggacgcacgcgcgcacagggtgggggcgagcggcagggcggcatgggcggccgtgcggcgcaggcggccagggctga

SEQ ID NO: 98894 - DNA, 255 bp, Oryza sativa
  Clone ID: PAT_MRT4530_96759C.1
atgggtatagagaagatcaaaatgaaaactcaggggtatataagggatgagataattacttacctcgacctacttcaagcaatctcaacaccacaattctctgcaggggcagggattgaacttagccgcttcttagaggaaagaagcaaatttcagaaatcacaaaaactgaggatgagtgtatttgtcaacccagagaaaacccagcgtattatgatgtatgaggtctcaatgctgggctccgtgcgtacctga

SEQ ID NO: 98895 - DNA, 1296 bp, Oryza sativa
  Clone ID: PAT_MRT4530_9675C.1
cggacgcgtggggcacagttgcacacagtcttgatcagcaatggcatctcacagagctgctgtttttgctgttcttacgctgctactttcagtagctgcaattgcaatggctaggccaatcagaagaagcgatttgggcttgggccttggcgctaatggtgggctaggtgtaggactaggacttgatatcggactaggtggttccggctcggcatctagttcaggccagggctcgggttatggggcctggtctgggccaaacggtggttcttacactgcgtcaggtcatgggttgggcttgggctccggatatgggtatggatcaggatccgcgtatggagctggtaatgggggctctgcttcgggttgtggctctggctcaacatcttgctcgggctcaggatcaggttccgtaggactagggacatcgattaacgttggtgtgggtgtaggagccaatggtggcactaacggcgggtcagattgcgacactggctctgggtcaaactatggctctagcacaggctcaagctctggctacgggtcgggtggagtttcctaccgctcacgtggtcatggcgggtcttctagtattgggtcaggttcgggggttggtttaggagcaacttctggtgttggtgccggttctaatgttgggccaagtggtggttgctcgacttgtggttctggttctaggtcgggatcaggtgcgggtgggggttcatattctggatcaaatagcggctcgtcatcgagttctggctctggttcaaactcaaattcaattggagggtcaggatcaagttcgggtgctggctctggctcaagtgcaagctcaggttatggtggctctagttctggttctatgtcaggatctggttcaagttcatcatccggttccacagggatgtcatatggttctggtgcaggttcaggttccagctcttcttcatggtccggttctaattctggctctggctccggctcgactatgccatctggtataggggttgcttctaatgctggctctagctcaggttcttggtctaatgctggctcaaacactggcacactctctggggctggatcctctaactggtcaagctcgacgtccgggtctacctcaagctcaggtttaggtggtgggcaaggggttggaagcagattcggttccggagcccaaccgacttttggtatgggtggaggaggtgggtttggagcgggttacggatttggagccggagccggaggttggtacggcgggggcatgggcactacacgcggatcggaccacca

SEQ ID NO: 98896 - DNA, 838 bp, Oryza sativa
  Clone ID: PAT_MRT4530_96760C.1
atgagggttcgattcaaagggggtggagcatctccggggttcaaggaatccgtttccggtgtcggatggggcggagaatcactgaggagggctggcgacgagcagcggccttcgggagcggacgacaatggcggcgaggctgtgccgggcggcgacggcgctagggaatggtttggggaggtcctagggagctcaaggacggtggtggcgcgagatggcgagaatttgggcgaggagctcaccggcgtgcgggaacggtatcggcggcgatttggggatggaaaggggtggaaggccgatggcggcacgcgaccgagcggcggcgcacggcggatgacgccgaggcggcgcggcgtcgaggcgagtgcgccggggaagaagagagggagaggtggcgcccggagctcctcgtcacgcgttcacgctcgcaccggctcctccggtgctcggcgacggacgacgacgacgagagcgggacaagcggcaacaaggcggcgatggtggttcggtgctccgggagcatggcgtcctgaagagcctgctggccgacgacgacgaagcggcccggttcttcagccgcatcggcgaaggctgcgccatcgactacgaccgccaggctttcgccgacctgtacgaggacttgcgccagtactgcaactcgcacttctactaccgctgcaggctggcgctattcgacctccggcggaactacttggggagtccgtggaagaccatctccctcgtggccgccgcctcatcctcttcctcaccgctacgcaaacttacttcaccgtgtttcctgccaaaaattgacagccatgagatgatgtttaagtga

SEQ ID NO: 98897 - DNA, 1463 bp, Oryza sativa
  Clone ID: PAT_MRT4530_96761C.1
atgggcgcacgcgaggtgcggcgcacgggtttcgggtgcgcggggcttaggagcggtgcaccggttggacggatggcggcgggcccatatgcagtcgcacggctttccgtggaccgcgcgcacgggagggaagtcggagggaggggacgactgaccggcttggcccagtcaaagccgaggtggcgccgacgtggcgcctacgtggcagccacgcgggccggcgggaggaggaagaaggggaggccgagatggacggcggacggcggccgtgttcaccggagcaagcgcgacggatttggtcttcggggagcacaccggagtgacgagggcgtcgagaaggagcgagccaacggctcggatttcgccggagggagtttgtcggcggagtccgcttccggcgtcggatggggcggaagagcaccaaggagggctggcgacgagcggcggcctccgggagcgggcggcaacggcggcgaggccatgccgggcggcggcgggtctagggaatggtttggggaggtcctagggagctcaaggacggtggtggcgcgagggattggcgagggggcccacggcggtgcacaggcgggcgcggcggcggcggcgaagtagagcaacggcggggcggcatgtttagggggacgagcgagcaaccgaacggctcggggcttatccaagatgatgcaaatggcaagaatttgggcaaggagctcatcggcgtgcggaaacggtatcggcggcgatttgaggatggaaagggatggaaggccgatggcggcacgcgaccgagaggcggcgcacggcggatgacaccgaggcggcgcggcgtcggggcgagtgcgtcagggaagatgagagggagtgcgaagatggggcggcccggagctcctctttggctcctctcactcgccggctcccacggcacgcgcgacgacgacaacggcggtcaaggcggcaatggtgtggtggggagaggaggcgagacaacgagggagatgggaggggctcgggtttttatagtggagcgaggtcggtttgggaggcatgggcgagctggttggcgcttggctgacgagcaacaaaggcagttcgtgggcggtgcgaacacagcgatggcgtggatgcaagggcgcggtgaaggcggtggatcggacggcgagaatcaaattgcgggagcgggaggattagcgcgggctggcgcggtcaaggtgggggcggcgagctggcgctggcgtctgcgtctctgcctccgagcactagcggccaaggagtggaggcatggtgtcgttgcttgggagggaaaaagagaagagaggacggtggaaaggggggctttaccatgccggtttgggagaaggaggtgggagagggagtgctctgcctccaggatttggatggacgcgggtggagcggcttgggcacgcgctgcagagctcgcggcaggcagcggggccgagcggtag

SEQ ID NO: 98898 - DNA, 2456 bp, Oryza sativa
  Clone ID: PAT_MRT4530_96762C.1
ccggccggggatccatttttcattctattttctcccccttttccttctcacactacacgaccgccatctccattccttctttcgcgcgcacggtcgccggcgggcgccgtcaatctcctgcagcgtgcggactccgacggctggggcctcctctgctcatgctcatgctcattctcattctccattgatggggttctttcatgtagggaaaggaaaggtgatttcagttgcctgactgctgccagaatctgcgaagcatctacaagcgacgccgtcgatcaggcagtcggcacggcaatgacggatccccttgctccatacccaaccccgcctgtgccatttacacctccgttcgagcgagcgcgcgcgcgacgcgggcgtggctccggctcgattcccatgccaccctgtgacagcagcagccaccgctgcgcagtttgcagtctttctggaggcttccctgctcctcgtggttgcggggggactcgcggagtcgcggtagcgagttgtctccttgctactctactagtttgctcggcctgccttttagtcattctgggagcacgctactgttactttccccaatcctatccaatccaatccaatcctcgccggcgctggttcgctcatatcacaagttagttgggcccatacctccagaaattggaaggttaaatcagttgcaagctctatcactgcaagggaatagcttgtatggctcactccctccagaattgggaaattgtaccaagttacaacaactgtatctacaaggaaattatttaagtgggcatatcccttcagagtttggtgatctggtggaacttggtacactggacttatccagcaatacgttgagcggatcgattccaccctctcttgataagctggccaagcttacatcattcaatgtttccatgaatttcctgacaggagcaataccatctgatggttcacttgtgaattttaatgaaacttccttcatcgggaaccgtggtttatgtgggaagcagattaactcggtgtgcaaagatgcacttcagtcaccatcaaatggccctctgccaccttccgcagacgacttcatcaatagaagaaacgggaagaattctaccagacttgttataagtgcagtagcaacagtaggagctcttctgttggtcgctttgatgtgtttctggggttgctttctgtacaaaaattttggaaagaaagatattcatggtttcagggtggagctatgtggaggctcttccattgtgatgttccacggggacctcccttactccactaaagaaatcctcaagaaactagagaccatggatgatgagaatatcattggagtagggggcttcgggacggtttataaacttgcaatggatgacggtaatgtttttgcattgaaaaggataatgaaaacaaatgaagggcttggtcagttctttgatagagaacttgagatactgggaagtgttaagcatcgttatttggtcaatctccgtggctattgcaattctccctcatcaaagctattgatatatgactatcttgcaggtgggaacctagatgaggtgctgcgtgaaaaatctgaacagttggactgggatgcacgtattaacataatacttggagctgcaaaaggcctggcttatttgcatcatgattgttcacctcgaataatacatcgtgatattaaatcgagcaacatcttactagacggcaattttgaggctcgtgtatcagactttggactcgcaaagctattagaggacgacaaatcccatattactacaatagttgcaggaacatttggctatcttgcaccagagtatatgcaaagtggcagagccaccgaaaagactgacgtctacagttttggagttttgctacttgaaatactaagcggaaaacgacctactgatgcatcatttattgaaaagggattgaacattgttggatggttgaatttcctggtcggtgagaatcgggagagggaaattgtcgatccatattgtgagggagtgcagattgagaccttggatgctctactttctcttgctaaacaatgtgtaagttctttgccagaggagcggcctacaatgcacagggtggtacagatgttggagtcggatgtaattacaccatgccccagtgatttctacgattcagaataggcttcgacttacggctgctcttgaaaacgccacactgccgctggttttcctgtggaggcacattccatttattctttgcagattatgtaaattcattcctgcggtgttcggctccaatcggctagctcaatggggaggacatttttgtgtctatgtatctatgctacgtacaaattattactactacatgtcaagttaataagaaacttaccaggagattactgtacttgtattgaactgtcaatctcggaagaatggaaatggtagggattagggatgcct

SEQ ID NO: 98899 - DNA, 1427 bp, Oryza sativa
  Clone ID: PAT_MRT4530_96763C.1
tcactcgtggttgcactgttttcgggcgaagatgctcacctgcctcttctggggtgttacatctacgactatgatgtcgtcgacaacaccgatgacctggccacgcacgacatccctagggcgcggacccccttggctcctaaaggcgtagggccggcaattgtcacacctcaatctgataccgccgtacaacggcacttctcggctcccagagccattccacttgattaatcggctcccagagcctttttcattttctcggactcccagagtccagctgcccagcagcaaagcaatccgcttccactcgggaagccaggaacctggtttggctccaaccgaccccgccctggcgttcccaactattggcatgcgaggtttcctcggcggcttaggcgcggcccaaggggtcatgcgcagcgcggtcaggccattggccagcgcgggcgcgggtggtcggcccattaggggcgcgcggcagggggaggccgaccggtggatcgggtgcacctcgcggggtcccgggtggggcccgcttgtcggtgactgggttcactgagggaagggctcacgggaagggcagcgatagggtttggtggacgtggtttgggcgcgtgcgccgggtggagcgaggcgcgatgggcccacgtgcagccgcatggctcatcgtggtctgcgcgcgcacggagaccggcgacgacgaatcgcggcagccctcgccggaggtgagaaaaggggcaaacggtagaggggcgacgaggattcaattcgaggcggtggaagcatctccggggttcaaggagtccgtttccggcgtcggatggggcggaagagcaccaaggagggctggtgacgagcggcggcctccgggagcgggcggcaacggcggtgaggccatgccgggcggcggcgggtctaggggcggcgtctacgctagagggggcgagggagagcgaggaaggggaacgggaggaggcactatggaaaagaggcggtttgggagggggaactgacataggcggtcaagggtgcaaggacgacgagctggtgtggtcaaggtggtggcaggcggtgacgccgatggtggtcgggcaaaaggaaaaaggtggagaagaaagggagctctgctccttgctgtttcgggataaaggaaagggagagggagcgaggccgagggctctgtctccctcccttggacgcatgcgcacaggcggggctgggcgacgcgcggtcacgggcggcgtcagggctgacgcggcggcgaccgagcggctcggcgtcagggctgacgcggcggcgaccgagcggctggcctcgagcgagcgcgcgcgcgcgggaacgagcggcacggccgaaaatcgaatggcggcagcgggaaaaatcggcgatggcggcagcgctggcgtgggagagagagagagaaacat

SEQ ID NO: 98900 - DNA, 1608 bp, Oryza sativa
  Clone ID: PAT_MRT4530_96764C.1
atgcggcgggtgtggtgggtgtgcgggctcgggtactgggtgcaggggttccgctgcttcccgtggctggcgctcaacttccacctcacgcgcggcctcggcctcacccccgccgcgctccagctcgtccagaacgccggcaacctccccctcgtcgccaagccgctctttggggtcctctccgacgccgtctacgtcggccgcgcccaccgcctcccctatatctccatcggagcgttactacagcttatggcatggggaacacttgcagtcattccagtaacaggggacacatttccaactcaaatggcttgcattcttattggaaatcttggcgcatctgtcactgaagttgtaagtgatgctgttgtcacagagttcagtagaacgcagaaggccggtgtactacaatcttacgcgttcataattctggcagctggatctctcttaggaaatttgtctggtggttacgttctgttgagaacacaggaaccaaagactatgttctcagcattctccatcctccttggcctccaactagcactttccttaagtacaaaagagacgcttccaagctctcatagaaactggaacatttgtcatgtcagaacctctctgtctgacaatctccgcaagcaattctcaaacttgaggacagcaatcagcgaggagcagatcttttaccctcttatgtggataatgacatcatttgcagttgtgcctattctctctgggacaatgttttgttttcaaacacagtatctgaagcttgatccatcagtcatcggcctatcaaaagttgttgggcaggtgatggttctatctctaactgtcctctacaataagtatctcaaaaagatccctttgaggcggcttgtggctggagttcagacgatgtatgctttggcagttctatcagacttggtcctggtgaaacaagtgaaccttatgttggggataccgaatgagatccatgtgctttgtttctcggctctagcagaagcaattgctcaattcaaggtcttgccattctcagttctgttgtcaagccaatgcccacctggctgtgaaggttcgcttttcgctttcttcacatctggactggtgttttcagcaatagtaagcggagtatttggagttgggttgtccagtttaattggggtgtctggtggggattacacaagcttccctttgtgtattttgctgcaaagtttggcagcattggtacctttgggatggatatcctttctacctgaaaaatggactgccgacgacaagattcttaaaccaagatgaggcaactctgtagggtcaataggtaaaccacacaacctcgagatgttaataggtaatgacagtgtagaggattacatgtatagatacgaagatgtcatttttctttggaatcaatagttctagttcgaacgctccagctgaatattggcatcaaattgtattctcttgcttccaagagcattgtgttcagcttatcatgcctgaagaatgggaagaatacttcaggaagaatgtggtcttgtttcacaatgtaaatttcaaattaaagatgaaaactaagaaagatacatctaaatttagtacaaaaaaaaa

SEQ ID NO: 98901 - DNA, 927 bp, Oryza sativa
  Clone ID: PAT_MRT4530_96765C.1
atggcgctgtcgccgacgggtggggaggagaccgacggggcgaggcgggagaggaggtccggcggcaggcgacatggcggcggcagcagcggcgaccacgtgacggcatcgaagatcgcccacacctgcagcggccgccgcatccgcgtctccctccaccttccccgttgcttcatcgacggcttctccgacccggtcgaggacgaatactacaagccgtaccaactccagcgacaacagatcatgctagacgagaacatcggcttcctctcctactctggcgacggcggccacgagttcatggtggcggacatcaggaactaccacgatcggtcacagcaagaagcagctcagcgatgggtgaacgacgtcgtgctcaccctgcacagccgctacctgcgctgcgtcgacttgtacaacgacatacgcctcatcgacaccaacaacctgcgaagcttcagctacatcccgctgccggaggaggcaatgacgcacgaccgccacatcgatgaagacaagcccgatccggctcgccgtgtctccatcaccagcgcaggctcgataaatcttgtttgcatagacaacgtcatcgtacgcagcgagataagaaggctgatgattgatcatccaaaaatgacatcttctttggtttatcctgtacagtataatccatcgaatatgtgcagtgatgttgtgcacccggtcagatggagcagatgcaggtttgacagtgagttgactggctggtccaagcagctccgacagcttttctgcaagctgagcctaatcaaatccgttcatcatgggggccacctcacctcccggctttgccccggcgaaacttccgacagggaggccggcaacgcaaccactacagtacatcatcatccagccacgcacaaccaactagaagcagcaagtgattaa

SEQ ID NO: 98902 - DNA, 267 bp, Oryza sativa
  Clone ID: PAT_MRT4530_96766C.1
atggagtcgggctccgcgttggacacaccgtggataggggagtggctcatgatactgctcccacccttggattttccccttccacccctcgccccagcagatctgacggtgaagaggaccttcgtcggcgacggcgaagagggagagagaggcgatgacgggcggagggagaaagaggcgacggtgccaccgccgccgccgggcggagtcagagcagcggtggatcttgctcatcgatgcagcgcggtcgacgccgctcgacactga

SEQ ID NO: 98903 - DNA, 440 bp, Oryza sativa
  Clone ID: PAT_MRT4530_96767C.1
gcacgaggaagagactacctaattgaacaatcatgcagggcatccgatgtgcctgtcggcgagcaggtagtgcagcgcaacttgtacttggtaaacaacgtcttacagtaaataactcaagatggtcaaaacttgcttatcaaccagctgctagttttcatattgttggtaaacgtaatgccgccgcccaagcagcacgagacaaaaacaaacagcaactaaacaaactcaaactggtcaagaacaacaaccagtacaagctggcaaaggagctaaaggccgagttgtttcagtcattggtgccgttgtcgatgtacaatttgatgaacaattaccacctattcttaatgcacttcaagtcgatggtcgttcacccaagttgattctcgaagtagctcaacatttaggtgataacaccgttcgaaccatcgctatggacg

SEQ ID NO: 98904 - DNA, 1316 bp, Oryza sativa
  Clone ID: PAT_MRT4530_96768C.1
ccgtcttcgatccccctcctccacctcagatctccggcgagccgatcgaatcggcggctgcggcggcggcggcggcgcgatgtcggggcagacgcagcgcctgaacgtggtgccgacggtgacgatgctcggggtcatgaaggcccggctcgtcggcgccacccgcggccacgcgctcctcaagaagaagtcggacgcgctcaccgtgcagttccgcgccatcctcaagaagatcgtcgccgccaaggagtccatgggggaggccatgagggcgtcctccttctccctcgccgaggccaagtacgtcgccggcgacggcgtccgccacgtcgtcctccagtccgtccgctccgcctccctccgcgtccgctcccaccaggagaacgtcgccggtgtcaagctccccaagttcacccacttcgtcgaccccgccgccggctccgctgggccatccaacgcgtcccccagcctcaccggcctcgcccgcggcgggcagcaggtcgccgcctgccgcgccgcgcacgtcaaggccatcgaggtgctcgtcgagctcgcctcgctgcagacgtccttcctgaccctcgatgaggccatcaagaccaccaaccgccgtgtcaacgcgctggagaacgtcgtgaagccgaggctggagaacaccatcagctacatcaagggggagctggacgagctcgagcgtgaggacttcttcaggctcaagaagatccagggttacaagaagagggagatcgagaggcagatggctgcagccaagcaattcgcagaggaacagcttgcggaggaggttgccctcaagaggggtatctctgtgggtgctgccaccaacatgttggttgccggtggagagagggacgaagacatcatcttctgatcatcttcggtcatacagtgattcaatcgtggtggaaataataagttgtgatgctggagctccagaatcgcacctgtttatagagtggcggaggttttgtttcaggcggtagtctggactctgttcatccaaaagaccacaaataatttgtacttggaaccaaccaacggatggattgtttatgtgcagttttcgtagttaattcaattgggctgtatttctttgccatgttcgttttagctatatatttgtttggaaaggtgttcgttgattggggtttcgcaaactgaagctgcagactcgaagtgtatttcgatctggttgagtaattctgtactctgtactgtagcagcacacttttcgttctgaattgtcgtggatgggaaaagaataattaagctctcattttgccgactgctgctaggat

SEQ ID NO: 98905 - DNA, 3645 bp, Oryza sativa
  Clone ID: PAT_MRT4530_96769C.1
atggaagggatcaagttgaaatttcagggatatagaagggatcagcttactacagaagaaagcttacgccagaagccaacttacagaggaagccagcttacggcgcaagccagcttacaggagaagcccgcttacggcgtaagccggcttacaacgcaagccagaaggtccaaggcttacgacgggcgatgtaggtgcctgaagcaccggcatggcaacttggacggctccgcggccgttgccaccaaatatcggaggcaaacgaaccttctgcacgaccctgaagtgtcgttttggatgtcctttgttttatggacatcacccatatgggcccttgatgccactaagaacatgtcggacataacaaagaaggaattcgccgagcttgccttggatggtagtaactacctcacttgggcattggacgttgagattaaactcgactccattggtctcgatcatactattgtgctgcccgaacttggcactgtggagtctacgaaggccgagaaagcaaaggcattgcatttcttgcgccaccatctccacccagacctgaagtctgagtatatgaccgagaaaaatccactggtattatggcaatccctgaaggatcgctttgaccagcaagggtcaattgtgctcccacaggtacaacatgactggatcaccctacacttccaagactacaagtctacggcggcgtataactctgccccccataggatcatttctcagttgcgtttttgtggccagaagatcactgacgctgagatgatcgagaaaaccttatctacctttcatcccaacaacatagtgctgcaacagcaatacaggaactcaaagtacccgaagtactctgatcttatctcagtcctgttagttgcagaaaggcagaatgaagttcttctaaagaatcattctgctagacccactgggtctatggcagtgcctgaagcacacgccaatgttgttggaaactcgcgtggccgtaaaagaggccatggtgagaagaaagggaaaggtaagggaagtatcaaattcaagggcaagagcaagggtaaacccagaggtaaaggcgaactcaagaaggttacaggtgaatcatctggggaaaagcaggataactgctatagatgtggaggcagagggcattggtcccgtaactgccatgtccccaagcacctggttgagctctaccaacaaagcatgaatgagaaaaagagccaacatgagtcccacttcaccattgagcctgaagctcagattgaaaagcatgatgacatgcttatcaatgttaaggatggtggggacgtccgtatggacgatgattggaacaaccttcttgaaaaagatgataacatatttggagacctgaaaccttatgggaatcccatggcagaagaggatatatgtctagtagacaatgccaccactaacacaatcttaagggaaactatgtatttccacaccttaactaagaaaactagaaatattatgaccattgccggaagcaatgctcatatagtaggcaccggaagtgctactctagttctccctatgggtacccatatctttgtaaaggatgctctattggatcctgattcaaagcgtaccctcttaagctttaaagatatccgtgcaaacggtttccatatagaaaccgagattgagcaagatgctgaatatctgctcataagaaaaatagatggatatcaaaagcaagtggtggaaaggctcccttcattgccatcgggtttgtactacacgtacataaaacccactgaggaatatgtggcgatgaagaccatatttagaaacccagagtcatttagagtttggtatgacaggctgggtcatcctgggttgggtatgatgaggagaatcatcagcaattctgctggccacaatgttgaaactaatgacttccctaatcctgaagattttatttgccctgcttgtgcaaaagggaagttgatcattaggccatccctcctgaagattagggatgagtcacctgttttcctggtaagaatacaaggtggaccatgtggacctgttgtccacaaggaaccatgcttttcaaagctaattgcccaaatcatcaagctaaaagcttgcttccctgatagccgcgtacaatccattcgaatggataatgctggtgagttcaggtcgaaggcttttgatgattattgtttagccatggccatgggcattaaggtagaatattcagtaccacatgtccacactcaaaatggcctagctgaatccttgatcaagaggatcaagttgattgcacagccactgttgcaggattggggagaaaggcatccagaagaatgccgagatataatatggaatgcaactgggatgcagtccttagatccacgcactagtgaagctgaactagaagttcagagaatcataaatttgcaaaatattgtaaataagttgccagatgccttcactgattacaagggagtgacaaggtcgcatatacctacagtaaatgcgccggaaagagtagaggtaacccagaaggttactgactctgctcttaccccccatcctaggaagatggggagacctccagttgaagaagctcaacctgaagttgagaaagccccagaagaggcaactcaacctgaagttgagatggtcccagaaggacaccatcctaaagatggagaacccagtgccttacgcgcgtaccttggctctggaagatcggaacactccaactcggtcgttatgggaaatcacgatgagctggaggaaataaatgaggagatttccactaattgttctgatacaggagagttacatcatagaaagaccactatcgtcgacattcactttgcctcaaagattgttgtcataatggatccagatccagaaccaaagtccatgattgagtgccagaagcgctcagattgggacaaatggaaagcagcaatagaggcaaagatgcggtcgctttataaaagagaggtttttgggcctgcagtcccaacacctccaagaatcatccctgtaggatgcaaatgggtcttcctccggaagaggaatggccaggtggtgaggtataaagcaaggctagtggcacaatggtccatgcagagacccggtattgactatgatgaaacttactctcctgtgatgagtggaatcacgttccgatacttgatctcaatggcaactaatatgaacttagatatgcagttgatggatgtagtgaccgcatacttgtatgggtcactagattcggaaatttatatgagggtccctgaaggactcaagattccgaatccgaaaggaaatcgcaacatgtatagtgttcgcctgcagcgatcattatatggattgaaacaatccggaaggatgtggttcaatcgattaagtaactatctcctgaagagagatatagtgcaaccccaaccagaagacattgggttggcgttaaaactatcctcaggtaccttcgaggtactcaagatcttgggttgtggttcccgaagaaccaagatccatccatggtgggatatgtggatgctggctatatgtctgatcctcataatgccatatcccagactgggtttatatttctttgtggtaatactgccatttcctggcggtctgtaa

SEQ ID NO: 98906 - DNA, 139 bp, Oryza sativa
  Clone ID: PAT_MRT4530_9676C.1
caagggttgttttaaacgaagcataaatgcaccattacacgaagaaagacaggcttataaccctgaaacaagaaccactatgaaacaatgctgcaaaacggttcccgtaaaccaaaaatgacgagacccacacaaatcc

SEQ ID NO: 98907 - DNA, 404 bp, Oryza sativa
  Clone ID: PAT_MRT4530_96770C.1
gccacgcgtgcgctcgatggagcactactaggagcaccaggccgagtccaaggcctacgccagcgactccaagacctacccgacgatggctgggaccatctgcatagatggctacatccgcctctggaacggtgccggcgtggctgcctatgaaacagcctataacggtggcaagcacggccactccgagggcctcttcgttgctactgacatgattactgccgatatgctggcatatattgagacatgtgatgacaactgtgatgaccggcctgtgaaccggacggaggacctatttattgatgtatctgaggatgggttagcgagtctggtcactgccaatggtgacaccaaggttgactactgggttcctactgttgatcacctgcttggtgggatcaagg

SEQ ID NO: 98908 - DNA, 1893 bp, Oryza sativa
  Clone ID: PAT_MRT4530_96771C.1
ttactctcctgtatcagcatagttagtggaaatctcctcatttatttcctccagctcatcgtgatttcccataacgaccgagttggagtgttccgatcttccagtgccaaggtgcgcgcgtaaggcactgggttctccatcttcaggatggtgtccttctgggaccatctcaacttcaggttgagttgcctcttctggggctttctcaacttcaggttgagcttcttcaaccgattctttgagtggaacaagtggctcaggtccttgtctccgcggaaccttgtcccgagcacccggaggtctccccctcttcctaggatggggggtaagagcagagtcagtaaccttctgggttacctctactctttccggtgcatttactacaggtatatgcgaccttgtcactcccttgtaatcagtgatggcatctggcaacttatttgcaatattttgcaaatttatgattctctgaacttccagttcagcttcactagcgcgtggatctaaggactgcataccagttgcattccatattatatctcggcattcttctggatgcctttctcccccaaatgctgggaaaatagtcctaaacgggcccgacaggggctggataggtccacatatgtcaccttgtatccttgccaggaaaacaggtgactcatccctaatcttcaggagggatggcctagtgatcaacttcccttttgcacaagcagggcaactaaaatcttcagggttagggaagtctttagtttcaacattgtggccagcataattgttgatgatcctcctcatcatacccaacccaggatgacccagtctgtcatgctgaactctaaatgactctgggtttctaaatatggtcttcatcgcgacatattcctcagtgggttttatgtacgtgtagtacaaacccaatggcgatgaagggagcctttccaccacttgcttttgatatccatctatttttgttatgagcagatattcagcatcttgctcaatctcggtttctatatggaaaccgtttgcacggatatctttaaagcttaagagggtacgctttgaatcaggatacaatagagcatcctttacaaagatatgggtacccatagggagaactagagtagcacttccggtgcctactatatgagcattgcttctggcaatggtcataatatttccagttttcttatttaaggtgtggaaatatctagtttcccttaagattgtgttagtggtggcactgtctactagacatatatcctcttctgccatgggattcccacccaagtctttccctttcttctcaccatggcctcttttacggccacgcgagtttccaacaacattggcatgtgcttcaggcactgccatagacccagtgggtttcgggtactttgagttcctatattgctgttgcagcactatgttgttgggatgaaaggtagataaggttttctcgatcatctcagtgtaagtgatcttcaggccacataaacacaactgagaaatgatcctatggagggcagagttatacgccgccacagacttgtagtcttggaagcgtagggtgatccagtcatgttgtgcctgtgggagcacaattgacccttgctggtcaaagcgatccttcagggattgccataataccagtggatctttctcggtcatatactcagatttcaggtttgggtggagatggtggtgcaagaaatgcaatgccttttctttctcggccttcgtagactccacagtgccaacttcgggcaacacaatagtatgatcgagacccatagagttgagtttaatctcaacgtccaatgcccaagtgaggtagttactaccatccaaggcaagctcggtgaattccttctttactatgtccgacat

SEQ ID NO: 98909 - DNA, 2961 bp, Oryza sativa
  Clone ID: PAT_MRT4530_96772C.1
ctaggatctggcattatgaggatcagacatatggccagcattaacatatcccaccatggatggatcttggttcttcgggaaccacaacccaagatcttgagtacctcgaaggtacgtgaggatagttttgacgccaacccaatgtcttctggttggggttgcactatatctagccaatagattaactgcaaaaacaatatcaggtctcgtgcaattggctagatacattagtgctccaatggcgcttaagtagggaacttcaggtcccaacacttcctcatcatcttccttgggtttaaatgggtccttatccgcttccagggattggaccaccatgggggttttcaacggatgacatttattcatattgaacttaccaaggaccctcttggtataggtagactggtgcatgaacactccttcagggaggtgctcgagctgtaggtccaaacagaacttagttttccacaagtccttcatctcaaactcggtcttaaaataagccattgcttctttaatgtcctctgtggtgccaatgatatcaagatcatcgacatagaccaagatgatacaagatccattcagggatttcacctggccattcctcttccggaggacaacccatttgcatcctacagggatgactctttgaggtgttgggactgtaggcccaaaaacctctcttttataaagcgagcgcaactctgcctctattgctgctttccatttgtcccaatctgagtgcttctggcactcaatcatggacattggttctggattgggttctccatcttcaggatggtgtccttctgggaccatctcaacttcaggttgagttgcctcttctggggctttctcaacttcaggttgagcttcttcaactgattctttgagtggaacaagtggctcaggtccttgtctccgcggacgtctccgcggaaccttgtcctgaacacccggagatctccccctcttcctaggatggggggtaagagcagagtcagtaaccttctgggttacttctactctttccggcgcatttactgcaggtatatgcgaccttgtcattcccttgtaatcagtgaaggcatctagcaacttatttgcaagattttgcaaatttatgattctctgaacttccagttcagcttcactattgcgtggatctaaggactgcatcccagttgcattccatattatatctcggcattcttctggatgcctttctccccaatcctgcaacagtggccgtgcaatcaacttgatcctcttgatcaaggactcagctaggccattttgagtgtggacatgtggtactgaatattctaccttaatgcccatggctaaacaataatcatcaaaagccttcgacctgaactcaccagcattatccattcgaatggattgtacgcggctatcagggaagctagcttttagcctgatgatttgggcaattagctttgaaaaagcatggttccttgtggacaacagatccacatggctccacttcccttttgcacaagcagggcaaataaaatcttcaggattagggaagtcattagtttcaacattgtggctagcagaattgttgatgattctcctcatcataccaaacccaagatgacccagcctgtcatgccaaactctaaatgactctgggtttctaaatatggttttcatcgcaacatattcctcagtgggctttatgtacgtgtagtacaaacctgatggtgatgaagggagcctttccaccacttgcttttgatatccatctatttttgttatgagcagatattcagcatcttgctcaatctcggtttctatatggaaaccgtttgcacggatatctttaaagcttaagagggtacgtatatgagcattgtttccggcaatggtcataatatttccagttttcttagttaaggtgtggaaatatctagtttcccttaagattgtgttagtggtggcactatctactagacatatatcctcttctgccatgggattcccacaaagtttcaggtctccaaatatgtcatcatctttttcaagaaggttgtcccaatcatcgtccatacggacgtccccaccatcctcaacattgataagcatgtcatcatgcttttcaatctgagcttcaggctcaatggtgaagtgggactcatgttggctctttttctcattcatgctttgttggtagagctcaaccaggtgcttggggacacggcagttacgagaccaatgccctctgcccttgctcttgcccttgaatatgatacttcccttacctttccctttcttctcaccgtggcctcttttatggccacgcgagtttccaacaacattggcatgtgcttcaggcactgccatagacccagtgggtcgagcagaatgattctttagaagaacctcattctgcctttctgcaactaacaggactgagataagatcagaggacttcgggtactttgagttcctgtattgctgttgcagcattatattgttgggatgaaaggtagataaggttttctcgatcatctcagcgtcagtgatcttcaggccacataaacgcaactgagaaatgatcctatggagagcagagttatacgccgccacagacttgttgtcttggaagcgtagggtgatccagtcatgttgtgcctgtgggagcacaattgacccttgctggtcaaagcgatccttcagggattgccataataccagtggatctttctcggtcatatattcaaacttcaggtctgggtggagatggtggcgcaagaaatgaaatgcctttgctttctcggccttcgtagactccaccgtgccaacttcgggcagcacaatagtatgatcgagacccatgtagtcgagtttaatctcaacgtccaatgcccaagtgaggtagttactaccatccaaggcaagctcgacgaattccttctttgctatgtccgacat

SEQ ID NO: 98910 - DNA, 1506 bp, Oryza sativa
  Clone ID: PAT_MRT4530_96773C.1
atgtcggacatagcaaagaaggaattcgccgagcttgccttggatggtagtaactacctcacttgggcattggacgttgagattaaactcgactccatgggtctcgatcatactattgtgctgcccgaagttggcactgtggagtctacgaaggccgagaaagcaaaggcattgcatttcttgcgccaccatctttacctagacctgaagtctgagtatatgatcgagaaagatccactggtattatggcaatccctgaaggatcgctttgaccagcaagggtcaattgtgctcccacaggcacaacatgactggatcaccctacgcttccaagactacaagtctgtggcggcgtataactctgcccaccataggatcatttctcagttgcatttatgtggcctgaagatcactgacgctgagatgatcgagaaaaccttatctacctttcatcccaacaacatagtgctgcaacagcaatacaggaactcaaagtacccgaagtactctgatcttatctcagtcctgttagttgcagaaaggcagaatgaggttcttctaaagaatcattctgctcgacccactaggtctatggtagtgcctgaagcacaagccaatgttgttggaaactcacatggccgtaaaagaggccatggtgagaagaaagggaaaggtaagggaagtatcatattcaagggcaagagtaagggtaacccagaggataactgctatagatgtggaggcagagggcattggtcccgtaactgccatgtccccaagcacctggttgagctgtaccaacaaagcatgaatgagaaaaagagccaacatgagtcccacttcaccattgagcctgaagctcagattgaaaagcatgatgacatgcttatcaatgttaaggatggtggggacatccgtatcgcgcgtttgaagagccctagcaccatgccagcttcaaacgccccctccctcatcctcttcagcattagagacgttgcatatgttgaggctgctatgataattttcttcttcttgatgcagcgttcacattgggaatttgggttaccgtaccatatcctgcacattgcttcttcttcagtatcaagagggggagacctctgggtgctcgggacaaggttccgcggagacgtccgcggagacaaggatctgagccacttgttccactcaaagaatcagttgaagaagctcaacctgaagttgagaaagccccataagtggcaactcaacctgaaggacactatcctgaagatggaggacccagtgccttacgcgtgcaccttggcactggaagatcggaacaccccaactcggtcgttatgggaaatcacgacaatcccaacacctccaagaatcatccctgtaggatgcaaatgggtcttcctccggaagaggaatggccaggtggtgaggtataaagcgaggctagtggcacaagggttcacgcagagaccggtattgactatgatgaaacttactctcctgtga

SEQ ID NO: 98911 - DNA, 243 bp, Oryza sativa
  Clone ID: PAT_MRT4530_96774C.1
atggatcttggttcttcgggaaccacaacccaagatcttgagtacctcgaagggaacttcaggtcccaacacttcctcatcatcttccttgggtttaaatgggtccttatccgcttccagggattggaccaccatgggggttttcaacggatgacatttattcatattgaacttaccaaggaccctcttggtataggtagactggtgcatgaacactccttcagggaggtgctcgagctgtag
